United States Patent Application Publication US 2014/0057251 A1 - sequence listing, part 89

SEQ ID NO: 158117 - DNA, 1231 bp, Cannabis sativa
  modified_base (34)..(35): a, c, t, g, unknown or other
  modified_base (598)..(607): a, c, t, g, unknown or other
  modified_base (1186)..(1190): a, c, t, g, unknown or other
cagtatttttgtaaaaaaatggcaaaagttagtnnaccatgtaaatttccctttaaatatgatattaagtggttttgggccttttttctttaaccttgaacttcattattgggcttagtataacaagggtcctttctaataactaaaaaaagagctccaatgaaaaataattttatatttagaaattaaattagtaaatgttttcttaaaaaaaaaaatagtaaaatgatcaactacaataaattaattaataaaacttataaccaaacatttactaagtattaatttttttttaacaaaatatataataattaaattatgtgatatatattttttagtattgtataataatatattgatatattataataaaaacgaataaatatattagatcattaaatatatacaatattatttaatatattatatcactgaaaattaatatattgtagtaataaaattatataccgcaaaaattatattaatactcaaaaaatatatgtatcatactaataaaattatatacactattattaaaatatgtatacatagcaaaaaatttatatataatccttatatatatataataaaataaaannnnnnnnnnatcttaaataaatgatatactacacacaataaaaattatataccatataacaaaacatatacctacaataaaaaaataaaacaaaataatataatattatgaaaaaatactatattaacaaaattatatacaaccataaaataattatacgatacttacaaaatcatatatcacctatatataataaaataaaaactaaaatctaaaataaaatgatatactgtacaataaaacttatataccatataacaaaaaacatataccttataatagaaatatatatataataacaaataaaaataaaaatatatagtatgttaataaaattatatgtcacatcaacaaaagtaccataaaaaatataactttaatattattttaaaaaaatgatataaagtataacaaaacatattatataccattcaccataatatatatactaacaataataataataaatatataaactaatatatatatatatgtatactatactaactaaattaaataccgtaattaaaatatctataccatgacaacaaaattatatactaccattgtatataataaaatagaaannnnntaaatattatttaaaataaatattatacaattaaaatatat

SEQ ID NO: 158118 - DNA, 508 bp, Cannabis sativa
actgaaattggacctagttcaagaaccgtaaccggacatggtcccagactccaaatcaaacctagacccgaattgggagtcggaccgggatccaaacctggagtcgtgatccaaacctaaacctggactcgtgatccaaacctaaacctgaactcagaccataaatggaaccagactagggaaacagaaccagggtcgggacctagaacgacaccccagtctcaatcccgaacccaaactaagaaatgggaccagggacctcaccagaactagaccgagacccgtgactatgatctagatcttgactcgggattcaggaaacggggcttggaacagaccagtagtcggtgtctagatccagaactaagactaggactagaaccaaacttgaagccagtcctagacttgggacccaaaactagtacctgaacaagaatcgcggaaccaggaccgtagaaaaagactacgaccgtgactaggacccgcaccgtgacctagaaccgaacac

SEQ ID NO: 158119 - DNA, 655 bp, Cannabis sativa
  modified_base (105)..(105): a, c, t, g, unknown or other
tatttaattttatggggactttttttacgattttgatctataattatcaaatttaaaaaattatatttaattttttaaaaggcaatatttttgctagtgggggcnatagcccccaaactaatacacttgagtccgtccctgtttataacatagtataaattatacaatacaatatcatattagatttcaaaattttaaattgttgaaaataaagggagggaataatttttttgtaagggagggaataaattttaatttattaagaaatgagaattagagctatgtgaaatgaggggtggtccacctcccaaaaataactttcaaagatgccaaaaatttatacattattaaaaatttatacattatttaaaatttatacattatttaaaatttatacattatttaaaaatataatattttattttatttttctaatatttgttgggaaccataaataagcactcttctcaagattactcttggtcccacacattattattgttattattatttttgaaatggacaacacatcattatttaatgagaaatgctaaaggctatcagtggtgctcaccatcctcctatatgtcaatatcgttattggtcttactaagtatcaggtcccatataatttagagcattgctattgggcacc

SEQ ID NO: 158120 - DNA, 720 bp, Cannabis sativa
attgacaagtcatgcaaatgggcaatgtgtgtagtaaaagttagcaactcagagtgtttctcaatacgaacttattgtaacactcacacttgctccattatcagccgaaagagaaagcatcgttaagcaaatgcagaagtagttgctaatgtcgtgaggtcaagttttgacgatcagaacgagacaccgaaacctacagcaataatgaaaattatgcaaaacaatcacatgccgataacatattggaaagcttggaaagggaaaaagattgcaaaaaaccttcttagatgttcacctaaattaagtttttcaaatcttcaagcttacttgtgcatggttcgaaagatgaacccagacacgatcacaaatttggaggtggatgaagactctaaatttaaatatgtttttatagcatatgtgacatgcattaaatgattttattgtatgagaaaggttattgcggtggatagaacttggttacagagtaggtacaaaggagtaatgctcattgcaacgacaaaagatggtaattttcatcaatattctattgcttggggcgtggttgatttagagaatgatgcttcgtggtcatagtttctcacaaaattacatgaccttataccggatgagagtgaattggtcttcattaaagcatcatcaatggattgttaaatatttataagaagtcacaacatgggcactatgttgggttttatgccc

SEQ ID NO: 158121 - DNA, 539 bp, Cannabis sativa
ggcttggacccaacccctagtgggggtctagatatgggaatcgtaccaagacccgaacctggaaacatttctagactaggacccaaacccaaactcggatccgagacccgaaatcggaatcagaactggtataaggaccgtggaacaggaattggacatgggcccaaaacaagatctaggcgtagaaccgaataatgactcgaacccaagagacccgaacccaagcccagacttgcgccaagacctgcgacccagattccataacgcaggacccattacccgggaccaggtctagaacccagacatagaccagaacccggacccagacccaaacccagaccaagacccgaacccagacacagactgaaacttggacccagactcagacccaaacccagactcgtactcgtactagaacacgaactcgaacccgggacccggacgtagaccgatatcaggtatgggacctagacccggactaggacaaagacctaaaccaggactaggactagaatctggactaggaataggatcgagac

SEQ ID NO: 158122 - DNA, 520 bp, Cannabis sativa
ttataatttctgtgccaaatctatcttgaaaataggcttataatcgttatcgaatatctgcataacagtttgatgctttcattgagagcctacgtgataaaagctcagaaaaatccctcctaaccaaagaggaaagaatttttctccatggttgtcatgaggagaacgacaatagtcgtccagaagagactaatcgtcgtcctagaaaagagccaatgggctcacgaaggccacccaccttaagaactacgcgtttaacacgatcaacacgttcaagaagaagccaacttgataatgatcagaaccgagaaacagggaatgaggaaaccaatgctgaagttggtgtttatataccaaggagtgagaatacatatgattccaccaggtacgtgccataggttgaattggaaaatttccaactccggcaacgactgaccgaggctaataaacaaaacgctgagttggagaaagaagcagtcgcaaccagggtgactctagaaaataacacacagaaccaacc

SEQ ID NO: 158123 - DNA, 517 bp, Cannabis sativa
tgctgggcttggctcacgggtgccttactgtgcaggaaagggtaagactattgttgatcagccatgagtgcaggagctggatgaagaatgtacatgttcgggccctataagaccaagcgggttggggtctaccagtgttgcatttttgagactctattttgctgcttaggccggctgaaagaaaaagggcttgtaataatattttgtaaatgtttttgggatcccaatttttgtaacttttagatcgtaaatttaaattattacaagttttatttttactctgtttatgattaaagtttaaattccgcgctaatttcattagtaagcccgtttaggggattagggtttcataggtatcttgggtagcgtgcctaattatttagggcattacaggtctttttgaaatagatgtcaaaaagaaaaaaaaaaattgcagtcagaaaaactagaataaaaggcatggattaatttaaccaagtctaatgcaaataattacttacgaattatacggaaggtg

SEQ ID NO: 158124 - DNA, 515 bp, Cannabis sativa
ccgcccacttgagtaaccgtctagaggcatccaacttttgcaatatttggcgtaacggttggtcagtgtacacccgaacaagatgatcttgaaaatagggcgttaactttcttgttgctagaatcaggcagtaagtgagtttctctatcaatggatatcagccttcgacctcaatgagtcttttactaatgtaatagatcgggcgttgtatgttgttttcctctctgattaccacgacacttacaacatgctccgtgaccgctaattatatcccaagttcttctccgtccagaggtttcaagagtacaggaacttctacgagttgcatttttagctcctgaaaagctttttcaaattcctctgtccactcaaattgcttgtttcctcgcaggatgttgaaggatggaacacacttctctgttcatttttaaacaaatctgcttagtgcggcgatctaacaagtcaaactttgtacttccttagttcttgtcggcaatttcatatccaggagggct

SEQ ID NO: 158125 - DNA, 1158 bp, Cannabis sativa
  modified_base (670)..(671): a, c, t, g, unknown or other
aaaaaattataaaaaagatactaaaaaaatacaaacacatattataaaataaaaaattttaacaaaaaaaaacttataaacaaacacttaaagtaaggtaattatgtatttatttaactttttaatttaatttttatttatacttaatttaaatatattaataataaaataaaattagatttttaataaaaataaaaaaaaaaagattaaaacaaaaaaatttatagctaaaaaataattattggaaactcctacggagtcggttatttcataataaccgacgccataaggatcctacggaagcggtttgttcataataactgcctccgtagggtccctacagcgtcgatttttttaacctatttagcgccacctgaaacaacatcggtagcgaattttgccaaaaccaatgctaaatggccttaaaaactgcctctaaagcctaattttgtagtagtgcccccacacttgactcttggtcttcctcgagtaagttaatgataaagtgaatgatacttatacaaattggtctttatgaaaaataattttcgtttcaaaaatcgtacatccacttataattctaagaaaatacaaactcttcaatcattaaaattttaactcaagataattacttttcaaactcaatttttttgtgtgtgtgtgttcaatnnactcatcatattactaacattcaaattaattcatgcatgccaacaatcaatgtttatctcaaaataaatgtgtatttcaatgaaaattcactccttaaacttaattatcaaaccattctccactaatgtaattacacacaatctaaagatcaataggactttataggttagtaatgtaaggctaaggtgaaaggtagataagaaggttaatttaggctcaaatcacactgtagcatacatatacaatattctctcacataattcctatttatattccccaaacactctcctcaataattcaatcttgtatcttttttttcataaaacttattatcccccacacttaaattattgcaagttttcatttatttttctactagggaactaagccgcgcttcgcgcggtgtgcccaacttttattataaacttatatttttattattcttttgtcaattttaagctattttttccataaaaagtagttttt

SEQ ID NO: 158126 - DNA, 653 bp, Cannabis sativa
gtaatgggttttatttagggcacaaaacccaacaatgctaagcctcctgctgactggcagcagatgttccaagtaatgtgaagtatcatacttcgttaagtagaagagttgcaacgtttaaggcatccggctgccccaattgatcaagtattaccaccagcacctatgccagcgttgggtaaccaggggtttgttatgccgcaccgagattctgtgttcgagcggtttgtgaagctgcaacctctgacttttctgggaggttttgatattatcaaggctgagcagtggatgagcactgttacccgtatcctcgataatatgggggtgatgggaactgagagagtgaattgtgcagccttcatgttacaagaccatgctcgcgtcttgtgggacatagtgggtcagactcgagatgttagtgtaatgacctgggaagaattcaagaaactattcgaagaaaagttttataatgttgttgtgaggacttcacatcaagaagattttgtgaagttaactcagggaaaggtgtctgtggccgagcatactttggagtttgatcagctgtctaaattttctggttacctggtgcccacagatttcattagaaaataaaagtatgttcgaggattgaatgctacaatcagtcgagactt

SEQ ID NO: 158127 - DNA, 503 bp, Cannabis sativa
aacattaggaaataatgtctccaagaagatcagttcgaatcaacggcaatagaaacatccacgtggatgcagctccagcacccgcaagggttggaggccgaggcgatggtcgacgcggaggatgacatggaggccaaagcggtacgggaggtagacaaggagcatcggtagcaccggtagatgaagtagcactcgaacaacaacaagcacctcccaatgcttaagctgggatactccgagaaaacgctcgtatacgtgaggagctaactcaagaaattgcaaggctacgagctcagaatgaggagttacgccagaatcaaaatccacccgttagaaacctagctcttcaaccaactgcattgaatccagaaccaatacaatgttttgaacctgtgaacgagtgattcaggaaacaacaaccaccaatattcaatgggagctcggactcacttgaagctgaggaatggttgcgctcagtggagtccatattggaatatatggac

SEQ ID NO: 158128 - DNA, 535 bp, Cannabis sativa
aatcatgatagtgacctgggaaacagaactaagaccaggacatagtacccgaccctcccgaacttgaacctaggaccatgttcgtgacacagcacaaaaaattgaaccagagtgggacccgagattgggatccagatctggacccagggcttggacaaaacctatagttggtgtctggatttgggacccagcactagactaaaaccctgacaaggacccgaaccctcactcggacctgaacccaatcgcaaacccaaaagtggaccctaccctgtgacccaaaattggaaccaaaactggaagttgcctgggactagaactaggacttggacttggaaccataactgaaattggacctagatctagaaccgtaaccacaacaggtctgggactcaaaatcaaacatagacccaaactgggagccggacccggatctgaaacccaaacctggactcaggacccgaacccaaacctgaactcagacttaaacatggaatcagactagggacatagaacaagggtccagacctagaac

SEQ ID NO: 158129 - DNA, 504 bp, Cannabis sativa
tgcccctgatatcgaagtcgaggagatggatgaagactggatggttccagaccgcgagtcagatgaggaagagggcgctgagggaagtgggaccgatttcgtggataatacacaattggatgagcctttctcatgcgaggacttggtttttgcgagtcaccaaatctgatctcaccacttttacgagattaaatttgttgggacttgcctccatgcgtcctcgtcctacccagagggcgcacctttcctttactaaccctacgatcatacccagagaggatatggtagtttctatccccattcttcggtgtggagtatcaatccctttcaatccatttatctccactattctgaagcggtatgatgtatctccttttcaactaaccccaaatagctatggcatagctttaggtttttatgggatgtatatggagtatgtgcatagggcacctttgatggaagagtttagctatttttatgacataaagaacgtgggtctccaca

SEQ ID NO: 158130 - DNA, 516 bp, Cannabis sativa
ttgatccaacttaaagcttccttcatgcccatgatttcagcaatttcgggaagcaccacaccaaacttagactccgcaaaagcttccaaaagttgacccgtatgattacgcgccaagcacccaaaaccaaacaattgttggggttcaaaaatagctccgtcgacatttattttgatcttaccactcattggtttggtccaaatgttgctgccagaatgaacaccagtagcgaaagaggctgcagtgttcgaattcgcaactcgccattgatcaaaaacctttctagccgactgaactactctcgaagcattgctggtttttttctgccagaaaacttcgttgcgtgtcttccaaatactccaagaaatcatagccgcatccaccaccacctcagcacgattgctatccaaaaggccgaagaaccaactgctgaaatcatccacaccagcagcaatggtagccgccgaaaggttccagcaggcttgggcaaaccgacacccaagcaacacatgaaaa

SEQ ID NO: 158131 - DNA, 644 bp, Cannabis sativa
aacgatgctaagtcaattaaagcaataaaagaataaatgctaattattaaatgaaattaaacaataagaatacaaagatttatagagatttgaccctgtgatagtagtaatagcctactctccttttacttgtattacttgtgagaaaataagcaattgagtttcttgattttttttttgaaagcttacaattttacagcataagagctctcttgaagaataaagttcagatccttaaataatggaatgactccaccatttgtagggaagaaatacttcaattatgttttacaaataaatgagaaataagaagaaaaactaggaatgtttcctattttacaacaataacatgtgaaaattattaaaataggaactcaattggtaaaataaataagaaaaatatctccaaatatatttcagccgcatttactctggctggtgtatgtggacttgctacgagattgacgctggtcggacggtgtcatttacgtaccctttctagatgttccaacttattcttcaaataagttttttgagaaataacccaccctgaacgacatgtcgaagatagtatctgtgacagtcagtagtcccgtgatccgtaaagagaaatatcgggtaagctgtgcaatcccacatcgcct

SEQ ID NO: 158132 - DNA, 576 bp, Cannabis sativa
ttagggcataaaacctaacatccagttcctcgaagaacctagcattactggcacggaagagatccaaatgattgatacttttccaaacaggatgacgccaatagcaacctacctcaaaactagggaactcccagataattgttagcctatttttagcctaagttttgggttacattaataagcatttactcagttattgtagcctttttggagctgttttatgcttgattttccttgtttcagtttatcagtgcattgtagttcaaattcagttaattggcgaaaagatgggacaatttggtgcaaaaatctgctgaagcttccaaagacaatcagtagacgcgactatggaatggcctagtcgtgacccttatatctggtcacgactaggggaggttggaaaaaagctcatttttccatctttgcctgtggtcacgaccagccattaagtgggtcgcgacctggtacgaaacatgggatttttgacctaattccgatatatttccaattggaggcacaaccctaattcctatataagggactcgactcagattgccaaaatcatcaaaaatcggc

SEQ ID NO: 158133 - DNA, 756 bp, Cannabis sativa
aacaggaatgtatgtgacagttttgatatctttgttgagccatggaaacttgtcatggaagataaatcttgagagttcaagataaagcaattttcgttttggtcttaattatattgcatggcaagttattttttaatgtaattaatattattgagaatggtgcatagctgtttttgtgctagggcaatagttgattgtatggtttatagttgtttttgttgttaaagagttccaattatggtcttttacttgtttagtaaagtgacacatgttatacatataattaatgatgaaatcagattttatgtttcaggaaattagaaagataaagtgcttaaataatgatgtatttttcgaagtgttatacctattacctacatagacattgattcaattgcaatgtgcatctaaattttggaacaacttgaaagctgatcgttctcttatccaatctcaattacaaaggacaaaactctatatctcagaattcatcttccaagacaagttcccatggctcaacaaagatatcaaaattgtcacatacattcttgttgatgaagaaggctttcaattcaaacagacaatcttagattttcaccctaaggatgttgtggtatcgtcatcgtgtcaaggtctcattttttgtagtagttgtttccctactcaagacgtcacaatctacatttgcattctattaaacaaggaaaagaccaaactgagttgggattcgcttggaaatgacagcattatatcttt

SEQ ID NO: 158134 - DNA, 508 bp, Cannabis sativa
cataacattaaactgttttttttaataaatatcgatatttgtatagtattcaaaaaattattataatctttattctaacgattaatacgttaatgtaatcttaaaaaagttattgtaacatttattccaacgaataatattttaatgaaatcttaaaatcatatttaataaaaatattgagttttcattatttgtaaacatcataatttaatttcttattcatttgggcacacatgtttatttagacataatattaggatatttgttgctacatgtgacaagtttatgtggccattgttgttgtttagggatgggaacaaaatttcacacatttaaaaacagaatttttctaatcaaagtcaaccaaaccctaacgaaaccgatcatttggttgattcaaattacgtctcccaaggaaaatttaatagttggttgggtttgttcaacttacgttttcaagggattgaaaaaatcagatttatattggggttatatcaccccttcttta

SEQ ID NO: 158135 - DNA, 511 bp, Cannabis sativa
cctatattagacaacaaaatcagagtaatatattacaataatatttttaatttgaaagaaaaaaccacaaaactatttgccttacattaaaagaggatagtcacatattttgtcacaacgatcacaggtataaacactatgtttgagtaaaagctttctcaaacatgttttgcaagatatataataccaaccaaaagtggtatcaattccaaaattttgttgcctttatagtaactttgtattcctacaatcaaaattttcaatatttttaatttaatttgtataatgaagcactaatgaaaataatacaacaataatagtaaagagaaaaagaaagagaagaaaagtcacctacattccatcatcccaatcatcctctaccagttctttaatgttcattcggttgacgaacatctcttcctcaagagaaaccttactcatattagagcttttaataaattgcaccccattgacgacggttgaaaatcgttcaattaaagatgctacataa

SEQ ID NO: 158136 - DNA, 515 bp, Cannabis sativa
  modified_base (263)..(265): a, c, t, g, unknown or other
caccctcattagtgacgcgcgttgaagtgtcactaaaaagttttagagttactcaatgtgtgtcactaaaactcatttttctagtagtgaaacgatgatatttaaaatagagtaacttgtgtaataaaataaagctgatacttcaagcctaaattcgactatgttctgtttagatattggaaaaagtcaaaacatgaaagttctagatttctcttttatctttcctaaaaatcttaaatcgtccaattccgagcaatatcgannnagttatggccaaaatactatcagtaaatgcagtcctaagcagaataggttttctaatcctaaggagagtaggttttttcttcagcgaagtttatcttattttatcattttttggctataaaagaagtagacttcaatagttttattgaagcaattcagagggaaataaatagagaatatagatacgaatttcagagatcaactgcaatactagaggcattcttcagaggattttcaacattcttttcttc

SEQ ID NO: 158137 - DNA, 708 bp, Cannabis sativa
  modified_base (648)..(651): a, c, t, g, unknown or other
aaaatagagagagggagagacgacgaagacagggttggggtgttgggttctcagacggtgacggtcgccgggttcttggactggaagaaggtgacgatcgggcttagggttcgcgatttgaggggcttagggtcgcgattggaggggcttggggttctggttgggcagtctgttcgcagtagagagggagagagagttaggttagaacttttagggatttttgtaagaaagagatgaatttatactcatctatttctttttttttttaattcatttttattaatatttatttttattaattttataattatatatatattttattttttttattaagataaaagggtatatagtgacacgccacgcgtgtgagcaaacgtatttacctacacgttgtgcgcgttgctaaagccacgtgaatcatgtggcttttgtgacgcccacaacgtgtgggtaaatacgtttgctcacacgcgtggcgtgtcactataggccatagttttttttatttttataaaattgtaaattttgggttttagtatttagtgacactctatatctttagtgatacacattttgcgtaataaacacagaacatttagagtcaaatgttgtgtgtcactaaaaactacttttaattttttagtnnnncacacttttatgtgtgtcactatatagtgtcactaaaagcttaattaatttgtagta

SEQ ID NO: 158138 - DNA, 727 bp, Cannabis sativa
  modified_base (257)..(269): a, c, t, g, unknown or other
ataactattaataataaaattttattaatattatattattatattattatattattaatatattattataatattatttatatatataagttaatcgtaagttaacttacgttatatatatatatatatattatcagtgaacagaacgaacgaaactctcgttctccttctttcaataaaatcttctctttctatatccattttcttttattttcaatccaaaacttagcgatctaagcttcggtagtagcaggatnnnnnnnnnnnnnaaagggaaagcttaaggtatggtttaattacgttttaagctaaaaatgattagttttatatagggattttgtgaattagaatagttatggagattctgactttgtagaattgttctttggtacctattggactagtatcgatgtttacttgttgaatttgaggtgattttgagttagaaattgagttttgaactttttagagcttagtccgaatgttaatggcgtttttcatttaagggctcaatttttatttctgttacttaaggatggtaatatttatggtgtatatccgccatgtgaagttttgcagtgatttggataagttttggtagtatttcagtgagtgcgaaaattggaaatttcgagttttaattatagtttttagaaattcctaaaagattagaaatcatatttttatcataacttttgactctggtgtccgttttggacattctata

SEQ ID NO: 158139 - DNA, 999 bp, Cannabis sativa
ttcatgtagagttatgcacggtggcggcctatattggaaatgttatatgtgagtaattagtaactgggaatatggttattaccttaacatgagcggtttcatagcctaggcttattaccctagtgatatatgatgtgtaaatggtatgccatgttaattatatgagtatgttaagatttaggattgtgtgttcaaggcataaataagttggactcggtaactagaaccaagatgaactattctaagggcttattgtaattagatgtgtgagcgtaacacgtaggtctataccacatagacataaataggcgtgtgagtgtaacacgtaggtctgtgtcatacaaataaagatgaaatggcattattaatacgtgatgagttatttataattattgatattttgtactgtcttgctaggcttggctcatgggtgctctactgtgcaggaaagggtaaatctgtctctactcagccatgagtgcaggagctagacattgtatgtacatgtttcggccacactagaccaagcgggttggggtctattagtgatgatttctgtaactctgttttgccgctttggtcggcttatggaaaaagacttgtaataatattttgtaaaatatttttgggatcccgagacatgtaacttttgttggtttgtaaatttaaattattacaagtttattttccttatttttgcatttaaagttttatttccgcgcttattttattagtaatcccgtctaggggattagggtttcttaattatcttgggtagcgtgcctaatagttagggcattacaatttggtatcagagcgccaaggtttttaaacttcttgtagactgaccaaacatgtacattcatcgtcagagaaaagctcgactcgtggatgagtaagtgttgagagtaaatactttactgcttatgtgatcgtttaattaccgctttccattttaggcagtttgcaagcatgtagagtatttatgtgatatgtgat

SEQ ID NO: 158140 - DNA, 627 bp, Cannabis sativa
atgtatatatgttgatattgatattgtcatgaaatttttttttattatttattttttgtagataaaatggctcgtttaagtttagcaagaaagtaaaagttaattactgtagtgcagaatttaattgtgattttagatgttattttaactatatgaactattgtgagtgcttatgcatggataaattctagaagacgtcacaatcaaccattatgcataatgagaatctacaaacagttagaaaacttgcatgatttagtattcgcaagtgatgtcaattgtatttcacaattgagaatggatagagaaacatttcaaaggttatgtaacatacttagcactaggggaaatttaagaaaagaaatgtctctatcgaggagatggtagcaatgttcctatacattctagcacaccaccataagaattgagttgttggttatagtttcaaaagatcaggaaaaactgtttgcaaatattttcatgaatgtttgaatgcaatgattcgttgccaaaattttttttggaaaacacctgagccaatattagagacctcaatcgatccaaggtggaaatggtttaaggtaagaattatagattcaaaattatagttgttgattgttaaattta

SEQ ID NO: 158141 - DNA, 524 bp, Cannabis sativa
caaactcaaaacaagatccccttgtcgctgcctacgtcgctgcagaatcccatcgtcgaaatcatggtgtgtgatcatcaaacaactaaggacttcaaaacagaatcccttactttcaagatcctctgccattgaatgaaacacttcaagaaagtttttgttctctatagggatgaattcaggattaaaaaagcttacctcgaaacgaagaacttcattgatgatacgatgaactaattcgtcttcgatttcatcattcaaataaaacattgtcttcttcctttccttcttattcttcttattgtaccatgcaaaatagttttttttttatttttttttattttcatttcatgttttaaaaatcgtagtatagtatcaaaatattgtatgaccaaagatttcttacaatcctcttccacatttaagcattggattcaagcttaagctcataaggacaagcattaaagtacaatttaagctcacaaggtgttaggttatttttagtattaattttagattaagtt

SEQ ID NO: 158142 - DNA, 551 bp, Cannabis sativa
aggctattaccactatcacggggtcgaacctctataatactagtgttttctttatttattactctttgttttttctattctttatttattcttcttgctttaattaaggctcaatgtcgttggctaaaaatgaggtcaacactttcttaaatgtttagagaaattattcaagagaactgtttggaataattgctaactcatttcttttatcttttttaatcttaaacaacaacttgcagtgataaaagggctatttcctcgccgagataaggaggagtatgccaggttcatcacttatgatgatgtggagatcttgattgaagttggtgtgtgtgccacatgttatattattttataatataataagtataaattaaaatatgataaatatattatgtgaataatatatattaagtgtatggtgaataaatgtgtaacctatgatttataacttacacttttgaaacctacatgttgtaacttggagaggagttacaatttgttatcacttgtaactcatgtattgatcacacattattagtgtaataaaa

SEQ ID NO: 158143 - DNA, 758 bp, Cannabis sativa
gataagatatgtcattttctgttgtcttctatgaatttcttctttcttatctgttgctaaatttttgtacaattctcttttttcgcatttctatactcttatcttctaaataattttttaaaaaaatgctactaacaaatacaaattcagtaaataaacttaaatacttcatatttatataataattaatttcctctatccattattgatagttgtgtggaaaattcacaaatattactcatgacattagtagttttcttaattctcattatattattgagagcttcataacattagtttttaatatttgatgttgattagaagctgcattacttgttgtaactttttttttggcatatctttctctttttcttctataatttttttctttcatttcttttaataaaattttataagcttttcttcttttcatattctttgccctatctacaagtaaaaacacaaaataaaatttagtatttatttatataaaaattaattaataattatggccaaatcttactctttaaaaactataatttttatccacgagaataattattactttttcattgactgaactttttggtttattctgccaaagaaaaaatttaagaagcaaaaaaattataacatatttaatattctcaatagcacagataattttcaaatataatgtaataattattacaagttacaatgaaattaaatagaataattttaatttaaataattaatattaattgttacaagttaca

SEQ ID NO: 158144 - DNA, 951 bp, Cannabis sativa
aactctctgtgttgataagttatgtgttggtgaatagttttgagttttggttaaggtttgggttgaattgggtgtgaattggccatgtttttcgttgctggttttgtgattttctgggtttggaacccaagggctgtggcccagctccttgggcaccgcggcccgcctccagttggtggcctgggattcgaacctaggtgccgcgaccccatgtgcggagtgtcgcggtccgccccttgtttctgggcagattcgaacgcgatattcaaatattcataactttgtgatccaaactccgtttttggagttctatgtatcattggaaagctcgtttcgagctctatgtgaataactgtgatttaaatgccaagtttatattatgtgaaagtggaattagggattaaccctttatttgtaaatctcagaatttgtgactaggattaccggcacttggtcaggagcacccgcggatttggaatctccacgtttgcgggacatcaggtaagacagtatttagcacgtagagttatgcgtggtggcgataatagtaaaaatgatatatatgagtaatgaggaaccgggattagggttattaccctaacatgagcggtttaatggcctagggttattaccctagtgattattaatgtgtatctgctacaccatgttaaatatatgtgtatattgagattaagggtgatgcgttcaaggcataatcgggttggactcggtaactagaaccgagatgtaccgttctaaggccttagtgtatatagacgtgtgagcgcaacacgtagatctatgccacatagacataaataggcgtatgagcgtaacacgtaggtctgtgtcatacagatatatgtgaaatggcattaatactgttgtgatatgttaagtatgattattgatattttatattgtcttgctgggcttggctcacgggtgctc

SEQ ID NO: 158145 - DNA, 669 bp, Cannabis sativa
tggttaacgagtggtaagagtactttatgaagtacagaaattgtgtaattacgatgttgtgaaatgaatcaaaagtgttattatgtgctaagttgtaactgaatacattttgttatagtatgattgaatgaacgttatattgcttatgaagttgatcacttttcttgtaatctcagtggcttagggatgtaagaatataagattataatgatccttgactagagtgctttatgaagctctgtaattgaatggacatgttaatgtgtgaactagagtgctttatgaagcattgaaagtaagtgtttatgatactatatgattagggtattttatgaaacactgaggttggtgattatgtataactatacttactttcgtaacaagtttgctcgtatagatgttgcattgtatacgtatgttgaaagaaaatgatctcatggtatatacaatctgtggtactataatttgctatcatttcccatgagttgcattatctagtaacttttcttgctgagtcactgtgactcacgggtgcttcttggtgcaggtaaaaagattaacaattttgttcggctatgggtcagaggtctcccagcaatatacatatcaaccgtgttgtcttggcttctgggcagcagggtcgaccacttttctcttatgtatgaaagt

SEQ ID NO: 158146 - DNA, 532 bp, Cannabis sativa
agacaagcggacattgtgtactttttgttgcaaaaatatgctctcttgttcgttctttgcaaattattttggggggcatattttgaaaaaattaaagaaaaaggggggcatatttattcgattctttggtactgcttttttttcttttattttttcttttatggaaacatgtttttactttacttttggcgattttttgtgttttaggaaacttgttcttaattaaatatttttttttgtggtttcctttttggtgacaatttcggatttggttgggcttttaattcttagattttgtggggatatgatttcctttttccatttaaggtaacctttaccaatttttgaaaaatcttttggtttccttttttctctccacacgtggtgtctaaggtaaggaagttactttcctttttcattgttgtttgcttatagggtaattaaaattgaaatgttatacatactcaactacccactcacccacgatcaccactctctcctctcttcttattttttttctcaaaagtctaat

SEQ ID NO: 158147 - DNA, 662 bp, Cannabis sativa
  modified_base (161)..(169): a, c, t, g, unknown or other
tccgggaggtatcttctcgctgacactcctgttgcaaaaagacttagtcgatttatctaagagttgagcctctgagatccacgtgtcgttgtcatacaagtccacgtattttggccaaaatagggggcaacaaccaccattgtatataataaaatagaaannnnnnnnntattatttaaaataaatatatatcatacaattaacatatataaaaataataattaaatatatgtaacatgtcaataaaattatatacacgcattaaaatgtttgtatttatgctaacaaaattatatatcactattagacatagtaaaataaataataaatatcatctaagaataataatatactatagaacaaaacaaaaaaatattgtacaataaattttatatcccaacaacctacaacaactcataaaacattaaaaaattcgacataacttttaaataaaaaaaaattaacaaaactaatatatatacaccttatttcatacgtaatttgcttctaattctaaaaaaaatatattagttttttttatggggcaaaagataatataaaatttataaataataaataatctaaaaaattattttactacaagttttgaaatgaaaacatttactaatatagggatatgattttgtcccgttattgtactt

SEQ ID NO: 158148 - DNA, 610 bp, Cannabis sativa
  modified_base (570)..(575): a, c, t, g, unknown or other
ggacaagcgacagaaaagggggtacactccccaatacacccagtacaccaaactgacgaactcccaagaacatgtgtattttgccaccaggcaaaatacgcactaccggaggccgcctatagcttcgaagggatcccaacaaaagatgcgagtaccataacgacattagacacaacactaatgaatgcaaaaactgtaaagatgagatcgaaaacttaattcgattgggtcatctctacgagtggattaagaactggctgcctcatctcaacccagttccggcagcaggacctttgccccaaggagcgccagggggtgcgtccggagctttggcactagtcgctcccgcgggggaacctcagcaaattcttggcctgccaccgagacccaatggaagagtagctatgatctctggaggaccatatatcagacgggctactcgaaaggaattgaagcgctacgccgagggcgtaaaacatagtgaggtttgggaagttactcagatcccagctcagaggccctgactcatggatcaacccattacgttcacagaagaggatgctaagacannnnnntttcctcaccatgaccctctggtcatagagactcc

SEQ ID NO: 158149 - DNA, 574 bp, Cannabis sativa
agttaaccttttaccggcgaccaatatcaacatccagcttccatactttatgtaagttcctcgtaccttgtacactatttcactgtttgttcatatagcatgctttactgttcatttatgttttctgggttggatgttgaactttctgggaatttttgtttgagtttctgcacaacgcgttagattcctcctcttttgcatttagatcacttcttttcatcatgtttttgttgaggaatcatcttcgtcccgcgtaatgacactttagagtttagagcagacttcgtcttctcgattttacccattttttccttttctctccttactttttcgtaatgtcaccatctgtgggattcttgcacctgactcttgtcaagggaaaacttttggggctttcttttttggcaagtgtccggagggggcctctttctagcggttaggggatccccattccctttttgaaatagggtttggtttggggcgtgactgctggatttttcaatctttttcagaaccaaaaatgtcttcttcagcatccggttctaagtcatcaaagaagggagagaagcgtgtg

SEQ ID NO: 158150 - DNA, 647 bp, Cannabis sativa
gagagagagagagagagaaccaaagttcaattagtaagtgattgaacaaaaatgtgtgagttatcatttttaaaattattgatatttaaaaaagaagtaactaataaagaaaaaagaaaaattgtgtcctttttttttaaaaaaaaaaaactgattgaatttggattgattttttttttttttttcattcatatctatcaataatcgtatcacaaaaaatacaattatttgcataactttttttttaaaaaaaatctatatgattactttagaaaagaatacatacactttggtaaaaaatcatacatttttcaaaagaccatgcttgtcaaagttttttccttcacattaaaaaatataatttggttgaagcaaaaaatagaaaatataattagatagatctttataagcaaagaatgggaatgagtagtaatttagtttttatctttataatatatatatatatataaactataataaaatcatcaatcataattaaggttctattaaaattaggtttaagatctttatagttttttgtttttatttttttttaaaaaaattaattgggatacaactatagatataaatattttaaattgtatgagtatttttaatttatgaaaccaattaatatacattataag

SEQ ID NO: 158151 - DNA, 663 bp, Cannabis sativa
catgcgttctcaagcataaccctgaagttactgagatactcccaccgtttcgagaatttccaccagctgaagagtacgcttatcagaacattagcgtatgtcgcaaatggctgggtgtatctcagtatttcaagggacatatagtcgcatatatgaacattagaatactgtgatacatccaccatttgaaggacttaaccaatgttcccacaaaaaaatttacagagtacaaaatcctaaagttctaagtaacagttagaagcgattaagtctttgtgaaacctaaaataaacaaacatgcgagcattcgaagtgttcatccgaacacccgcgtgtattcgaaatataaagtggcgactattcaaacatcttccctaaaagttcacagttatgccaattttaggtcattttccctgagattacccagttccatacctaaaaacatagtcccatacgtatttcttacaaacatgtattcctaaacaccctcaaagatgttaaaacccagaaaatagcattttttctccaaacagaaaacaaaaatgtagtgaacttcgaaactaacctttagttctgataagttgttcctgcgattgctctcgacagcacttgagattgagaaaattccacaaagaaaggcaaaaatctgggcaaactatgaaa

SEQ ID NO: 158152 - DNA, 525 bp, Cannabis sativa
ttggttgaatggttaggttttgtgcaagttggatgtttgagaacttaacctagggctttaattgtgtttttggattttgtttaaattgttgagtcgtttgcttgggattagtttattgtagtatttacaggtattctggagattgtgggtgaatttttgtttgatttgagttatgggggactttttcgggttcccagcgcaaaaccggttgacgggttggtacccaggaaccgggcttctggttgggaaccggtctgccggttgggtctttttccaaaaccctagttttccccctttttgtgttacttagggtattaacatcctatttattgatagggctatccttagtttcaattttaaatccccgataagtgttttagcgtgtctctcgacgagttttaaatattatggttcagggccctgtaatacgtttccactcaggctgaccggcacacttgagcacggaacaaggtaagatagcgtaagaatatatatatgaatgtatatgcttgtgttagtatagtg

SEQ ID NO: 158153 - DNA, 516 bp, Cannabis sativa
acgttgaatttgccattggttggggttaagcctgatgacgtgtcataatctatggcgaaggagaggagaaagtgaaattggaggtttggattgattggtacgtttgagaatgtaacgttgttgaattctgctcctatgtattctgtgaaaaggtttgtgtttggaattggaacagagttagtttgggataagatgataaggaaaattgtaatgagaagtatgtttggattagtattaatattactaattagcttcatattgttttttttttaattgctttgtttggtgtgttgggttttttttgctttctttgttgttttggttttgtattttgatgagtaaaatggtgaaggttggtggtgtttatatagaaaaatttactaccaaatttttttaaaaaaattacaaaattaggtcaagatttttttttattatttttactcattgaactttttttatttacaaaaatatttaggggcttttttatttttgtacttcaaaacagttttttttttt

SEQ ID NO: 158154 - DNA, 773 bp, Cannabis sativa
taaaattctaactccgaagaatcagttaattgtttcgattaaccataccctaaacttctagctaactaaaggaaaatctaaagctaaagactaaaccaagctaagcgtctattcatccccttcttttggatcctcctctgactcttcttctaaattgtcttctgagtcctcccattgttgttccactggttcaggatttgctggtagttgtatttcttcttcaggctcattccgatcttccacgtcagaaccatcctccaagatgtctcttgaaattggctcatagtcaaaattttttgcatcatggtaaatgccaactgttgtctttgggatgttggcaatgtagtagtcatggtattctgcccccaatttatggttgagcaaggttctcacaccctgctcattcattcgcacatccaagacagagaatttgttgaggaatctctcaattgactctttatacttgttatgttctaaaatataaccgattccgttcacttgtctccatattcgatctaggtgagctcttgcttcctcagaccttagtgagtgtgacataactatatatttcttgtgtgccattaataacacacactctctcctcataattatccccatgccatgattaattttatccatatcctctattattttcctaagtttacttctctcgttagatgtcggcaagcgtcttaagcctttaattgccttagctacgtttgaattcattattaactctgcacaactcaaaataaatactagattgaaattaa

SEQ ID NO: 158155 - DNA, 534 bp, Cannabis sativa
  modified_base (398)..(405): a, c, t, g, unknown or other
taaataattaattccatattaataaataatttttcataataaagccctaattatctgttaatttctaaattaaagctaagcggtctttacaaaagtgttactaaatgccaccataaaattttagtttgtaagcagcatgaattcgaacttttttaaaaaaaaaaatgatccaatttattctataaatacattattttatattttacaactacaaaacatacaaattaattattcaaaaactaattatcttattcttttaactaatattaataaaaaaaataatatattattttgatatattattagtaactataatacatgaaaaaaaattaataaattaatatatatgtataacggtcagttttaattttttcagtcggtttattaccaaaaaaaannnnnnnnaaaaaaaccgaccgttcaatggcatttaatcgttagcgattttttcagtttttggtttcgattccaatggtgttcggtaggacggtttgaacaattttttcaattttttggattttatgctcaccccta

SEQ ID NO: 158156 - DNA, 500 bp, Cannabis sativa
  modified_base (30)..(33): a, c, t, g, unknown or other
  modified_base (211)..(212): a, c, t, g, unknown or other
  modified_base (272)..(280): a, c, t, g, unknown or other
tttttacgtggttttgcaattaaaattttnnnntctacgagtcaatcttattcagatttctgattgtttttcaagacctctccggtatgagttttttcgtccccctttttgaacttctttatcactatttataattacatagtggacagttaattacaaatttgactgtaatatgtctacaacagtcatccctaaaatcatgggatttgannacatatcacgtagtgtaaatgcggtttatgatttaaaaatcatatagttgtgattttccnnnnnnnnntgggtcaaaatgatcgtgttttaaatcacgtctttaattattatttttggagttgtctcgacagaagcttggttccagtgatctcaatagcgagctggagtcattcttctttctgaggtcgacgatgcatgtctggtgtcgatcgcgattcttatttactaagaattcttcgaaactcatttgaatgttagcttcgaacttgccagggttgtgagcctcg

SEQ ID NO: 158157 - DNA, 586 bp, Cannabis sativa
  modified_base (475)..(483): a, c, t, g, unknown or other
caaattatgttaagtataagtttaagggaaaaattatagggtaatgtaagcatattaattcaaatttcccttttctaatacttatttttccctttttttcaatttttaaaatttttttagtatgtaactaatgactaacactaaattaatacctactaaatacaataaatcattaaaaatcaatagccaatgacatatagtatttaaaacaataattactacctatatagtaattatattaaaaaaaacgtaatatacatattaatataccaacattttcatatttgtttagttttttttaaattatttccatcaaataaaactcaaccaagtcattaacaacaaaaattttaacaattatgttaataaatttgaccaacaaaaactgtaacctacaagtaataaattatactaggccgaagttatgtgcaattacacgtaaggacatacataaaaatcaatatatatatatatnnnnnnnnntatatatataaaggaatgcacaagcaagtttatgtggcattctataactcttttattctatttttctaattttttgaagctttcatattttgtccaagaaaaa

SEQ ID NO: 158158 - DNA, 540 bp, Cannabis sativa
tatttggactacggcgatttaattgtctggttaagcttatcctgctccacgtacgcgggagatttcttaccatgtatcatttctttctttgttacaattgttgttccaataattttttattgtggagaatattagatagagaaatataattgtaagaaaacattaattgaattataaaagacttttatatattattttaaaaaattaaaataaaaaatgttttgttatcatatttatttaatattaattatacataaaaaaataattatttattaaaaatatatattaattagtaaatattaaattttatagattttttttcaattttgtccaaaaaaaaattaataatattacaaaaatacttctagctgactaaataaataaatatacagtccaaataaaaaaaaaacaatatacaaataccccttacacatacattcaacttaggatctatgcttcctgagcaactatcgcgcaaccacgtagcaacccagcgcaaccgaaacaaaaatttaaccagaaagagaactaccattaatt

SEQ ID NO: 158159 - DNA, 710 bp, Cannabis sativa
cagccgaagactttgagatgctttgctgatggcttacgtccgctccaagcttcgatcggtgtctcattctctacgactttggttggacatcggttgagcaagtagactgcagtgcttactgcttctacccaaaatcgttttgggagacctttctctagcagcatggctcttgctgcctccataacagtcctggttttcctttcaaatacgttgttttgttctggtgcgtatccaacagtgagttggtgctccatgccttcatcttcacagaacttgttgaattcattagaagtgtattctttgcctctatcacttctaattgtcttgatgtagtgacgactttgtttttcaacacgagatttgaattttttgaaaatatcgaagacttgcgacttttgttgcatgaaataaacccatgtcattctagtaaagtcatcaatgaagagaatgaagtacctgttttggtcatttgatggagtgcgcattgccccgcatacatcagtatggactagctccagtggctttttggctctccaagttttgccggatgggaaaggttgtcgatgttgtttcccgagcatgcaccctgctgactgtgctgatctccttaaatgctgggaggtctcgcatcatattcttctgcttgaggatctttagcccatggaagttaaagtgaccgaaccttctatgccatagccatgattcatctg

SEQ ID NO: 158160 - DNA, 583 bp, Cannabis sativa
  modified_base (38)..(64): a, c, t, g, unknown or other
tattgtcatgttatttatcaatagggaaacttttagtnnnnnnnnnnnnnnnnnnnnnnnnnnnttagcgtgtcactcatcagttttacgaataatgtgatttatgggtctgtaattcctcgagcagctattccactcaggttgggcggcacacctgaattcggaaacgagataagattagtataatggttgcatatgtttatacatattatttgccatgagaataggcaaatctatagccatcagattagcatatcagggcatcggtgaggtgtacatagagttgcactgagatgccaacaaatatatgcaaggctatcagatagtatgagttatctgctaccacatcagtacgactagagtactgagtataggttggattcgcagttagtcataatttgtcaagaacgttcctgactcagttagggttatggttgggtgtatcggcgcatgattataatacgggttattattatgttattaattatgtttttcttactgagtctgtcgactcacagatattgtttgcatgtgtaggtaagggcaaggctaaggttgagcgaccgtgagagcgagcggataa

SEQ ID NO: 158161 - DNA, 607 bp, Cannabis sativa
atagtgcccatatctggttcaaaacgcaatctttggtatatcttcttcccgtattctgagttgatgatagccagatcgcaggtcaatcttcgaaaatatcatctttacccaaagttgatcaaacaaatcgtcaattctgggtaacggatacttgttcctgatcgtcattttgtttagttcccgatactcaatacacattctgagggaaccatccttcctcttcacaaacagaatcggagctcccagggcgatacactgggtcgagtaaacccaatatcaagcatcccctgaacttgtaacttaagctccttgagttctgctggagccattctatatggagctttagaaacaggttcgactccaggtgccagatcaattacaaagtcaatttctcgttgtgatggtaatcttggcaactacttgggaaatacatcgagaaagtctttaaccactctgactacctcaggcccaaatgtttcaggtctgctggagtccatcactactactaaaaatcctacacatccactatgtagtagatccctagcccttaacatagaaataaccgagattcgagacccctgaactgatccaacatatacaaatggat

SEQ ID NO: 158162 - DNA, 570 bp, Cannabis sativa
atgttaagcgtacgaacttggtttttgtcgatgggttggccaaaagtgtgagaacttctgcactctcacctggtgtttatgtaggggagggcatttttcctgtaatgcccattttgttttcccagtaatgaacttattgttccttcaaaaaaaaaaaagtaaggagtgtgagagatataatatatctatatgtaggtttttgttaggatatttaataatttatatgggtttagaaagaaaaaaaaaatatctactttttttattttgttaaattgaaaaaatataaatatgtttttttaaggaattcagtatagacgaatatattgcgtatacgattttttttttcttttaactttatttaagtatataaatatagatgtgattttttttaattaattagtgaattaatagttataaattgaataaaaaataagaaaaaagagaaaattaaggagagaacatataaagttatttagagtgattgtagactgccacatcaccgcctcatacttctcctttatatattgtagactgtcacatcaccgcctcatacttctgctttatatatat

SEQ ID NO: 158163 - DNA, 554 bp, Cannabis sativa
aattctcctccatcagactcaaaggcctagttgtcgaaaagatcgttcatctaaaagatagaagatcctttcaacgtgttgtgcatgtaatttaaggaggagtgtcctcacacggataataatcttaaatcgaaaaggatactaagaacattgcgagtattattcatgttctaagtaaagacctacatgcatgtgcaagcattcaatgtgatctagttgaaagatgcaaatattcgaggtttgtactgggagagatgcgagtattcagtccttaagtaaaaattttccaattttttttttaaattcgtactgggagagatgcaaatattaagtatttagtactcaatagtaggagtctggttaaattcgtacataagagtacattaaacctcttactattggttctcagggacatcttgttgttacatattgtcttagtctgaaacgaaaaagtttctactagactaggtcatcaacatagcattctagtattaacattaatgtaaaatacttgcttaagaataagtaatcattaaagataccataaaatattt

SEQ ID NO: 158164 - DNA, 876 bp, Cannabis sativa
  modified_base (823)..(828): a, c, t, g, unknown or other
gtcagtgactgctcaacattgatgcatatggaaacaatccacgagattgagaagatctcttcaaggaaatattattcttagaattatttttcttgacgagtatcaaacgagactagattggagccaaaagtttcagctccgacaagttcttaacagtgaacgaatggtaaggaaatcttcaaaaatctcagagcttggggcctgaaactcggcgaaggccatatgggctttaagtctagaggatgacggccagagggggtccatcatggtgggatgaggaagaccaaagatatatatataaagagagagtgcaaaacccttcaggcttttggtgtccaggtactataagcaccgtgatgtggtcgatttggaccaccaccaattagaggtagtccatcatagccttgcaacaccgtgagatgaaaagaaaagagaatgagagactttaggagagcaagcgagtcggggctagggttttttggggtgtggggttcaaatttagggttactttcaccggaataaggccggcaatggtcaattggcctgggcagagggcagttgaacttttgtgtttagaaagttattttgttttttgtgttaaagtgttttcatgcagggggagtattttctatactctttagtttttgtttctaacacttgatatagattttctccaaataaaatattttgtcaatcaaagtgccaaaggaggagattgttaatgtaaaaaccgcttagtttaaatttggaaactagctattaattaaggtttgattatgaaattagttattaattctcaattattaatttatgatgatttatnnnnnntcagaatgcattttatatgtcatatatagaaatttcatatttttgcat

SEQ ID NO: 158165 - DNA, 1402 bp, Cannabis sativa
  modified_base (428)..(429): a, c, t, g, unknown or other
  modified_base (1331)..(1331): a, c, t, g, unknown or other
atgaagctaaacccgaaaaaatgttcctttggagtctcctcgagaaaatttttgggattcatagttgacgcgaggggcattgaggcaaatcctaaaaaaatgaaggcattaatagatatgacatccccgacaaagcctaaggaagtacaggccctgacaagaagaatggcggcacttaacgaattcattttgaggtcaactgataagtgtgtaccgttcttcaacatattgcgaggcaacaaaaagttcgagtggacaaaagaatgcaaggagacctttcagaacataaaaaggcatctcgcaatgcccacagttttggcaaaaccaataactggagagagtttatttttgtatttagccatctcggaagatgggattagtgtagctatagtgtgagaagagggtaagcaccagcaacctatttactnngtaagtaaaaggttactaggggcataatccaggtatctccctttataaaaactctcgttatgcctagtccacacatctcgcaaactacgaccatactcccaagctcaccccataaaagtgttaaccaatcaacccttgagacaagttttatcaaagccagatgattctggaagattgataaagtggtcgattaaattggggcagctcgacataacataccatcccgaacatccatcaagggtcaagctttagttgacttcttgataaaaggtataaccccagaagaaatcccatctgatcagcgagatgcggaaacctagaagttatatgtggatggtgcatccaacgagcaaggttcgggtgtaggggtgatattaatatcgccagaaggctttaagtttcactatgctatgagattccaatttgaagcatctaataacaaggctgagtatgaagccttgatcgccagcttaaagacagcagaggccttgaaagtaaaaaatctcatctgccatagtgattcgcagctgatcgtaaatcaagtccttggggaataccaggccaaaggcttgaaaatggcaaagtatttagagaaagttcggaagaacttggaaagattcaattactttaaaatcgaaaaaatttcgagagaacagaactccaacgccaatgccttagcaaaactggcctcgtagaatgatctggacgaactaaatctggttccggtagaaatgttgagcgagccaagtatatgtgaaacagaagacgttgagaggatagatagctctccaacatggatgacgcctattgttaactatttactcaacgggcaacttccaaatgacaaaaacgaggcgcgaaaacttttatatatagcgcctcgttacacaatgatcgaaggnaaactatatagaagagggtattcaatgcccctacttcggtgtgttcttcccgcaaaagcaaacgaaatcat

SEQ ID NO: 158166 - DNA, 526 bp, Cannabis sativa
aggtgttcaaaataatttaattataggaaatattatgaaggagaatataattgtagggatatgtgtgaactgtgtttggctgtgtagggtaatatgtaatcatattcctattaattaaattacattgtttgttacatgaatcttatatattattttgaaaaattaaaataaaaatatttttttattatatctatttaatgttaattataaaaataaaataattattcattaaggaaatatatttatcaattggtaaatataaaattctactgtatttttttaattaaaatgaatatttttatatattttatcactatgtgatttatttttgttcattatatcatttatgtacaccatctgcataaaatttatatataataaatatatatatgttattgctaacgttaattagaatttttttctctcaaactttgacatgttccaaatcatgcctcgtgaatttttttagttgttaaaaatttcccctgaactattaagattgatagatttaaggacttttgtctaa

SEQ ID NO: 158167 - DNA, 520 bp, Cannabis sativa
  modified_base (26)..(31): a, c, t, g, unknown or other
  modified_base (192)..(195): a, c, t, g, unknown or other
atgaaatttctcaaacatttcaaatnnnnnngcataaggtaaaatctagagtaatcgtctaaagaacttaacgataacccatatccacccctgaaaagtacatccatatatagatgatcctactttcaagtggatataggcatattgactctttgcagagaatgatcttgtcaaaccactatgaacaagatnnnnatgccatagatatataagaatgtgattgtggtcttttgatgacttatgtctagttacaataaagagtttttagaatagtccaagtggatactggtcacagaatactaaactcaaattccatacattaacatatagtttggatccattgacagaaaatggatattaataacttgtgaaagttgaactatattgtattcaagaaacagaaatatagaatttctttttggaatcttaaatttaaagtcaaagacttaaatttatactaaatatacatgagtaattattctttcttggaccacttctactaatctaactcttagtctaa

SEQ ID NO: 158168 - DNA, 598 bp, Cannabis sativa
taaaacatggccatccatcatagatcttctttactcccaatggaatgagaagaagatgtaaggatgtgttgggtattggctctcaggaaggggtcattaaatatttgggtttacctctgtttagatcatgacaaaaggatgcggatttcaatttcacccttgatagacttacatcaaaattgcagggatggaaagcaaagatgcttttcaagtcagggcgtgcgaccctgattaaatctattggactatcgctaccgatttacgccatgcaaaccaccaaactttctgatcgaatggttaaaaggatagatggtcttgtcaggaatttttggtggggttttgagaaaggaaaccatggcctgcatctaagagcttgggataaactccgtcttctaaagtctcttagaggtcttgatttttggaaaacgaaagaaatgaacctgaccttcctggctaaatggggatggaagattctaaatggttgccaatctttatgctgcagagtactggaggccaaatatcttagaggaaaagattttctaaactgcaaatataaaaattctgactcgtggttctggaagaatgtggtcaaagctaa

SEQ ID NO: 158169 - DNA, 553 bp, Cannabis sativa
  modified_base (27)..(33): a, c, t, g, unknown or other
aaaatagattacattgaaatggagttnnnnnnngggcataaaacccaacagctactgccgtcatctggttttactctggccaatgatgttgtagtggttcaaggtagaggatatgtcggactaggtggggttattcgttgataagagccttttagtctctaaaattattgatttctccatagttagaggatgttgttacttagtaattttagtatttttcatcattttggaataatctattgaaaaataaatattattaatttaaaaaataatattttatttaaatttggggtttgaaaattagaaaaatcgaattttggggaaaaatctcacaaaatttgggtttttgggtgtaggcagcccagtaggctgcacgtgcagccccaggaagctgcaaatcccagagacgcgcgcgcggaaggagggacatgggcaagaaattttggcgcttgcagggtcttcgtgggcggacagcagggtcacacgggcgtgttcgggcttagtgaccgaggcttcagacaattcctgtctgaaggacgcgcacggatgggct

SEQ ID NO: 158170 - DNA, 555 bp, Cannabis sativa
ccacttggccaacttgtgggcatcacttagcttgtaacgtgccctcttggaccgcacgtaacagccgacaaggtcttaaagaagacctccttggtcagccaggatgtgtacgggatccgagcatgtattttttgaagaactcaaacacgttctccgtgttctttttgactcaaagagccaagcatcacaatgaaggtcaaaatcaaaactttttcatctagaaatcacacattacgtatcctaggactatcatgtggatcgaaataccaaaaggacaacaatctaacttgggaatcaaaagacattcaaagagaagaacaaatttcatgcattcatggcaaaatcagctaaatcaagtgaatagcgggaatagaagcgtacccataacaagaaattgttggtgaagaaggtgggaagcttggatcatcgaaacaacatgaaaatctcgggagaatgatactatgtgggtttggccctctagagagaaggaggagcttcaccaaaagttactttctagtgagagagtgaaaagtgaaaagtgaagagagttttccc

SEQ ID NO: 158171 - DNA, 568 bp, Cannabis sativa
taaagacaagaaagaaaagaaaaagaatatagaagaaaaaggcaaagaaatgcaaacacaaaagcttgtatccttctttttttcttgcacttgggtccccctctctttcctttctctctgtactttctgcaattaaattccctttaaaaatggcagatgccatcatcctcatgaagaaggtgtgtttagatgtgtttttgttgttgggtaaatagggttcaaaaatggcaccctaaaaatagaaacctaatcctttctaattttagcccactaggtttagtcttcttccttccacagcagccagctggcatactttgagtggttggtacataattgctgatgtaaataagtggaatttgtttttaagactttttccacgtcactgcccagaatgctatagcattgctttagcatttccttccagttttcagcttttgttccaacttttcttttgcatcatttctttcttcctaacaagttaattcttctttcccacaacaaacaagcaacatttaattaaaaaaatacaattaaaataataatttttacaagactcaaaagttagctt

SEQ ID NO: 158172 - DNA, 862 bp, Cannabis sativa
  modified_base (728)..(729): a, c, t, g, unknown or other
ttgtcatgtggaagggttccatcctctaggtaccgcattattggtgtcatccagttgtcttgttgagtcagactttttacatcttcattggctttccatgtcgctggccattgcattatcaccacaggaattgtgactccatctttgtttcgaatagatgagctgagattagcaagagcctcagcatggttgttctctagtctcagcacttggttaatggtgaattttgtgaatcttgaaatcttgtctcgaacaatctggaggtaggatgccacttttgaatctttagcctagtatgacccgttgagttggtttaggataagttgagaatcagacacaacttcaatggttttggcattcaactcaatggataggtctagcccagcgatcaacgcctcgtattcagcctcattgttggtaagtttgaagtcacatctgattgcccattggataacatctccttgaggggaggtaaggacgattcctaggccactccccttgctattgcttgatccatctactcctagcatccatgtgaagtttttttctcgtttaagcataataattccttttctgcttgtacctgtccaacacaagaaaagttagcaataaaatctgccaatacgtgtgacttgatggttgtcctcgattaatatgttatgtcgtattcagtgagctcaacaacccacttggacatgcatctagaaagttctggtttgtgtagaatnntacggagtgggtattgggttagcaccactataggatgacactagaaatcgtgcctgagcttgcgccctgctgtgcgctaaagccaatttttccaactgagtgtatcttgtttctgctggaaattattttacca

SEQ ID NO: 158173 - DNA, 657 bp, Cannabis sativa
agagattcacaaggaaaacctcgcggctcatagaccaaggggcagagaataacccagagatatactcagaaccctcaggaaatgcaacctaagggaactgaggaaaacttggagacaccgcctgagatacgtggaacatcggacgagaatcgccaacccactattcagactcataagagtgaaactcgtgcaaaccctcataggaagaaaaaggtgattcagaccttgagaggaagggcaaggtccaaccacaatcatgacaagagtgatctgcgagaacatatgaacctgaagaagcctgatctccgtcaacgactcggttcaaggcaaaaggattcattccatttgcgaatgagcgagttggaggataagttcagagtgcatcaagtcacaaaacccaggagacaaccggggcatgatattgttggaaaacctgatttggaggcctcgggatcaaagaaaaaagacgattctaaaaggctgctcaaggataagaagcccagcaggtatatccctctttatgccaaatataccgagttaatgaaactcgagaaaaaagctacctcgcacatgtacaagaagctgtttttggcaaaccaagacctatgaaacatgcgaggcacaagagggatccaaataagcggtgtgaatatcatg

SEQ ID NO: 158174 - DNA, 806 bp, Cannabis sativa
aatctacatttgcaatccattaaactacatttgcaatccattaaacacatttgcaatccattaaacaaggaaataaccaaactgagttgggatttattaggaaatgacagcattgtatctttagcttttgatccatctcagaatcccatacacatttctacagaattcaattttgtgacagttcaggcatttgatttcaaccattcttttgttcttgaagagtatatttcgaatgtgaagcacttttctttttcttctccaatctcaaatgtctcaactgcactaacttgaatttagtaaaaatgtgtttgggattctgagatggatcaaaagctaaagatataatgttgtcattttcaagtgaatcccaactctgtttggtcaattccttatttaatggattgaaaatgttgattgtttagtcttgagtagggaaacaattcctgcaacaaatgagaccctgacacgatgacaataccacaacatcgtcaaagagaaaatcaaaaattatctatttgaattaaaagccttcttaatcaacaagaatgtatgtgacagttttgatatctttgttttacttgtttaataaagtgacacatgttataaatataactaatgatgaaatcggattttatgtttcaggaaattagaaagataaggttcttaaataatgatttaatttttgaagtgttatacctattacctacaaacacattgtttcaattgaaatgtgtatctaaatcttggaacaacttgatatctgatcgttctcttatccaatctcaattacaaaggacaaaactctc

SEQ ID NO: 158175 - DNA, 567 bp, Cannabis sativa
tataaaagactaaataatgaagaactaatcaatattgatcacaaaattgtgagattatttattattattttagaatgggattttttttcgtgataaaaccatataaatagatataagattaagtatttattaaaatggtaaaatatttagagaatgttaataataataataatgtgagttttaaaaagtaaaatgatactattattattaataagaaattatttgatgatacaaatattattttttttattttagtttaataatatatatttatatataactgtcaaactaaaatgaaaaagaattggtataggtttgcctaaatttgtgctattttaaaagctgaaataagttgatggtatgtatatatttaatatgttaaaataggttacttgttacttatatagaaaaagtaagaagaaaaatattatatatctatctatatatatatgatatgttatttatttagaatgtgagagtatttatatataagattaatatattaattatgaattatataaaaatataaagagagatgaaaagatatgtgaattaacaaatcgttta

SEQ ID NO: 158176 - DNA, 745 bp, Cannabis sativa
  modified_base (321)..(322): a, c, t, g, unknown or other
  modified_base (599)..(605): a, c, t, g, unknown or other
agttggatattttagattttttctataacaacttaaattggatattttttcaaattttattttattatattttaattatttatttgatttcgaatttaatttttgaatattaaataattgaaaatttaattgaagttggaaattttttttaattttaaatttttttaaaaaccaactttaatttgtaatttttattattaaaatatagaataaaataagtgattaaataaaatgcatattttaaataatgagctttaatcaagagaaattcgatttccattgttggttttacatagttattattttagtgagtaatcctcnntaatggaggaatgttcattagcaatttaacgtcgtagaatctcggaagataagtatttttgtaagtatttattttagtatagatcaccccaatggtggcgactattatagggcttacagaagtatgaaacaatggtgggggctcatgaaatatgaatgaccttgactctcgcctaaacgggacaacgtcgattctcttttcgatcgaataaaaggttgctaaaatgattatcattttagatgaattgacaactttattcaatggatgatgctttgannnnnnnctaaacgggacactgtatcagtctgttggaaatcttggaaaataaagtatgttagaattttggtatttttataaatatatgtgattatttgttattttctaaacttgtgtatgaatttattgaaccaaaaccttacttct

SEQ ID NO: 158177 - DNA, 754 bp, Cannabis sativa
  modified_base (311)..(313): a, c, t, g, unknown or other
  modified_base (528)..(528): a, c, t, g, unknown or other
aaataatatctatctagatttttattgactaattaattcattttctaattacaagatattttaattcattaatcatttgaatgaaaaaaaaaagttgatataagatggtccaaaaataatcaataaaagttaattttcaacttaatctatttttcaaaaatttctaaaaatgataaaattaaaatatattttgaaaattattcaaatttaagttgttatgaaattaaaaaaaaaaaaattccaacttaaaataattttccatttaattaaatatcatgaaaataattatatttaagtatcatgatgaaaannnacttagatatttaattttcaattgaattaaatgtattaaatacaagaaataaataattaagtatagatgaaacttaattattaattctaatttaatactagaaaaatatactttatgtagattgatcctaaattaattaataaacaattaattttcaatcaaaaatatttttctatttaatattagaaacaataactagtactagaaataactanctagaatatatttcaattaactatgagtttttctaaaatttaaaaaaaaaatctaatttaagttgttatagaaaaaatctaaaatatccaacttaaatattttttcaaatgaaatttaattaaatatcaaaattaagttgtacccacctaatttaaaaaaaaatatattccattttaagttgatccaaattttttttaaaaaaatatcaacttaaaaaaaaatatc

SEQ ID NO: 158178 - DNA, 660 bp, Cannabis sativa
aaatttataatttcgtatattattcttaaattcctaattaatgtactaatttgaatgtgtaatttttctgtagacaaagtttgtgtacccataagataatcatgcatttgtagactatggtgagtataaaatgtctaaagggtgtgtgactggcgggccaattctaagaaaaaatagattgaaaacattgaggagcttggacaggagaggacggacatgttaccttcggatagagtaactcaagaggtgtggagtgattacattgcttactggaagacagaaaaacaaaaggtacttaatgaaattattaattttaataatactttatgttatattcaataataaataattaattctaacataaatatgttaatttcaggcaagatcggccaaaaatagagaaagtcggggtaatatgaaacttcaaggagaatgaggatcaaatcttattgtagcacatgttgttgatgaggtaactttatatatttatttgtgattgataaatcttattttatttttttggaaaagcaataatcacacacttgttttttcttaaatataggctaatcctgagacaggagaactttcaactgctgtggatatttttcagaagttccaatctagagacaatactcagcgcaatgaatacgtgcaacaagc

SEQ ID NO: 158179 - DNA, 659 bp, Cannabis sativa
tggcatggtagtttaattatttggaggctcagttatctttcgtgtcgttgttgctttgtcttagtttttaattatactcgagggtgagtaaagatctagtttgggggaatttgttaggctaatttaagtctaagtttcgggtcgtatttataggtagttttcactctttgtttctagttttagggctattttacgcttgttttcttttatttcaggtttctacgcttggaatgtataaattggacaaatttcgaaaaaaaaaaagaatctataaaatagagaaaattttgaaagagaataaagctgaaacttaaagcctaaattcgactatgttctgatcagattttggacaaattcaaaacataaaagttttagatcttttttttatctttccaacgcatattgaatcagctcatttggagtcggtattagaaagttatgcccattttactgaaagaggtcgaagcagaaaaaaataaatccttcgtcgcgatggggaaaaacctttgccgcgatggggattggcagagagttttttaaattgtggacaacaaccttcgccgcgacgaagcatcagtggcgggatttttggataatttcgtaatttcacaaattttaaagattagacttggtttaaagagaggggagttcgtgaaaat

SEQ ID NO: 158180 - DNA, 573 bp, Cannabis sativa
tagttttatgagtaagggcattttagtaattgtcaagagacgagtgttaggtggctgcctaaccttgtgacacctagcaaagtgaaattcagcaagggaaattaattttcctaaccttcattcatttagagaaaataagagaaaatacaaaaaaatcagcataacctctcttccttcttctctctttcgaaccagccctaaaccaaagaattggttgctgaatcttggtgttctcaaaaaggaattcaaggggaaagcaatccaaggtaagccctagcatctctttgccttagttcttgaatttaagtttaggttgagtttatgattttgtaatataggggctgtaagggttgggaatgcttagggtttgaattctaaacttaatttgagttggtttgaggtcctagcagctggtattaatggttggaatgggtgttgtgcaagtttaagctttgagttcaaagctttgcactttaatggcataaattgattcattgggtttttctgtgaaatactggttggaaaatattgtctatgcattgtttaggtactctggaaagtttggtagcattt

SEQ ID NO: 158181 - DNA, 760 bp, Cannabis sativa
agaagaagaggttggacccccaaagttcggggactacaacgaggctggcagccagttgatgctgacggttcctcataggaggcaaggtgccttggacaccaggtgggtaagtcctccgtccaagattttggaggcgcgccttcgaactctcgaccaggatgggtacctgggcgagctggactgctacattcccgcccacgacaatcgtgccacaaaccctgataaggggatgtgcgcctggtcgagggctcacagccagcaagggcgctaatgcccttgcagaaatacttcagggatgttgcagacttctttggtctttgtccggcccagattactcctaagggcatcaagtatttatccgccctcattgtcgtctacgcttcctaaggatgggacgctccttcttcccacgaggtcgcctggttctttgacatgaagtctacccccaaacaaggcagttcggggtacttctacttctctcagccagacttcaagtggttgaccggcacgaacgccaaggccatcaacaaaatagggcgttttgttgatgagtagatcatggtgaaggatccaagcattacctggactcgatttcaatagattccgatatatcactgtcctcccctcactcttgctcttagggatagagctcacaaactttcctggttgccgggggagacaggaatattatccagttgacctccagtgataatctggtgtagtacgggctctatcctgaggacttttctcctaagtccgt

SEQ ID NO: 158182 - DNA, 533 bp, Cannabis sativa
tgaagaaagtttatggccattattatcgggggaggtctaggttaaacaaccatagttccttagacgagcataagatggggtttttccatttaagagttcatatgaagttttgtatttaagtaacacagatggtcttcggtttagcaagtagatagcagtttttatcataaaagtctaataaacaagaggtaagtttgattgaaaagcaagagcacgagcagcatttaaaatgtgctggtgttatctctcaacaatggcattttgttgaggtctattgacacaagaagtgttgtgtaatgctcctttacttgcgtaaaaggaggtaaatgtaagttctttagcattgccagtccttatagctttaatgtttttgttataatggacattgacataggtaaagaaatttctgatgtgagttgaagcatcgaattttgttttaagtaagtagatccatgtaaaacgagaatggtcatcgacaattgttaaaaaatacctatatccttcaattgaatcaagggggtaaggaccccaaa

SEQ ID NO: 158183 - DNA, 949 bp, Cannabis sativa
  modified_base (26)..(67): a, c, t, g, unknown or other
ttaatttcattgttttagaaattcannnnnnnnnnnnnnnnnnnnnnnnnnnnnnnnnnnnnnnnnncctggtaaaacatattccaacacgcaattgattgtgaattaagttcgaggcgaatactaggcgaatggtttaaagatggcaaaatatttggagaaagttcagaagaacttggagaagtttgattatttcaagattgaaaaaattctaagagaacacaacttaaatgtcgatgccctggcaaaattggcctcgcaaaatgagcttgatgatttaaatcttgtactagtggaaatgttaagtgaaccaagtatatgtgaaaaggaggaagttgagctgatagatgcctcgcctacatggatgacacccatacttagatatctgttcaaggaacttcctacagaaaaaaatgaggcacgcaaactcttatattcaatacctcgctatacaatagccgaaggcaaattatatagaaggggttattcaatgcctctcttacggtgtgtattgccaacagaagcaaacgagataatcaaagatattcacgaaggcttttgtgaagattatgcaagttgacaaagtttatcaaagaagattattcatcaacgatattattggcgaacaataaacaaagatacacatgaatttgtcaagaaatgcgataaatcccagagattttcacatatacctcgcgtaccattaattgaactaagaatgatgaccttgccatacctattcataatatggggaattgacttaattcgggcattacccacagggcaaggaggaggaaagtacgcagtagtagcggtcgatttattcatgaagtggacaaagattgaacctctagttttcataacatgcaaaaaaattcttgattttgtcgtcaagaacataatttgcagatttggaatacccattaaaatagtatctgacaatggaact

SEQ ID NO: 158184 - DNA, 541 bp, Cannabis sativa
gggggctcgcatgcgagcccatggggggcccggcatgcgagtcgttgtgtgtgttctatgagtgtgttttggggggttgtgagagtaaggagagatgtgaatgcatatcgacaaaaaatggcattggaaaattaatcaaaggacaaggcgtgcaagggaagagcgtacaatcatgccttttaaaaactgagagcacgaagttacgagtagcggcgacaacggacctgcaagacctgaggacccgaccaagggtatgctgcaaccactctcctgcaacctactactggggaccatatgcctgcaaccaccctcctgctaccagggaccacctgacaccaaacaagggtatgaggcacaaggccatcttcagcacctgcaacatgcaacgtgaaacgacattttatctccttagggaccactttgtactccaagccataagagcctataaatacccccatctcagatgtgagagggggttggaaaatcatacttgtaaaattatacagagagcaataagaatttactccacttttctctccat

SEQ ID NO: 158185 - DNA, 524 bp, Cannabis sativa
gcttccaacccacctaaaacttgccgaattgagttgagaaaaacaattcccaactgattccttgctggttcgaaagaaaagagagaaggagagaacttggtggtgaaggtaatggctttttggttctttcttgaaggtcaaagactaaactattcatttgactaaaagaaaccattaaaaatataacatttctcagccaagaataaaccaaataagacaaaaagaagtcttgtcaaaagaccttcttacccctccatttaaataaaataattataacatcccaagggtgaaatggtcaaaaaaaaaaaccgaaccccgaaaatgctaacgcctcttatatctaacaattataccctgataatattctatatcaaataaaatatgactctctaaaggcccaacgtcgctttccacagcttctgaacacaatctcaaaaattgggtagttttcataaaatagcataataacatatctaataataaatatatttccaaaatatacatttcataattataaattaatc

SEQ ID NO: 158186 - DNA, 614 bp, Cannabis sativa
ctatttcttttacatataactctgtgtactgatctactataaaggttattttcactagtagaaaatgtgcggacttagtatattgatccattgcaacccaaatagaatcgtacatccctgttgttctaggtaacccaaccacaaaatccatggtgacatcttccctcttccagtcaggaagagtcagaggctgcaacaaccttacaggtctctaatgtttagccttaatctgctgacaagtcaagcaacgggatacaaattttaccatatctttcttcattccgcaccaccagtagaaaggttttaaatcctgatacatcttggtagtgccaggatgcagtgaatatggagtggcatgggcttcctcgagaatctcatttctaagttccacactacttggaacacaaactctggttctatacaacagcatcccattacctgacactgtaaaatctataacttgaccagttaaaacctcttctcggatcttcaccaattttggatcagttaactaagcaactttaattttgtctaatagattagattgcaaggttaaattgttaagttttcctacaacaaactcaatacccgatctgaccatatcatctgctagg

SEQ ID NO: 158187 - DNA, 503 bp, Cannabis sativa
  modified_base (460)..(464): a, c, t, g, unknown or other
acactatgaaaaatcataacgaaatataaatgctaaacaataaagttaactgaaataagtcatcaaaatttgcatagtctccggagttactgccgacaccgggaaagtcaccagagttgctgtcggcgctaaaaaagtcatcgggataggcattatcgccagaaaaatgacaaaaaataccaagaaactggtatcttcaccaagaaactgatttctacatcaagaaactggtttcttcatcaagaaactggtttcttgatgaagaaaccagtttctgggtaattttttcggtaatttttctgacgacaatgccaattttgacgaatttcccagagtttgctgtcgatactgaaaaagtcatcggagtagatgtcggtgtcaaaaaatttgtcagagttgttgccaatgcaaaaaaaagtcgtcagaattggcattgtcgtcagaaaaattaccgaaaaannnnncaagaaactggttttttcatcaagtaactggtttcttca

SEQ ID NO: 158188 - DNA, 572 bp, Cannabis sativa
aaatttgtgggtgtacacgtcgagaaatttgtgcattttgaaacaagtcaaagaccgaacactggaaactactagcacacattggccgaaaggtcccaaatggaagttaaaggggagacagcagaagtatcattctggaccgcccgcactttggctcacaacggatcacaaacggcttttttagaccggtggcactttgggctcacaacggatcacaactggctctgataccatgttagaatttctgataagatgaatgaggttccatctcaaaaccaattggcaatgggataagtagcccattcatcttacatgtggtaatttatttccacacattgcaatgtgggactaactctaatacaccatcctcacgtttggacctgaaaagtgtgggtataacgaacgacctttaagataccacagggccgaacgtgacatttgaaagaatcccacacaaggccaaatgtcgagaaatttgtgggtgtacaagtcgaaaaatttgtgcattttgaaataggtcaaagacctaacactagaaattggcacacattggccgaaaggtcccaaatgga

SEQ ID NO: 158189 - DNA, 593 bp, Cannabis sativa
aaacaaaccaggggaatccccaaaacacccaagaagagaaaccttgggatacaagggatatcccaatggataatcaaacaaatcctaataatgcaaggaatcaagaacatcgacgagatgttccacaaacttcccatggatttgctaaccaagggaatgaatgaactgacatgccagaatcatctcacatgaatgaggatgcgagacagcctcgactagggaactagggaatccctcgccataatgagagaaaccctagaaattaaccaaggtcaagtggacttcctccaagacatcctcaacgtccttctcaagaagatagagaaaatgtacacacgtacttgaatagaggacgtgtttataatctcttccaaaggagaaggccagtgcgagatgaagcaagctcgagcacaggaaaatcaaggtctcaaggacatagtctgtcatgtagacaaacgtgagaaggaagtagatcttgatgttattatgctgaccgagaaagtataagtaactcacaaagttatcaatctgagagttactcggagacaatatctataagcaactatgaacgaaggcagcctgaccttcgcgag

SEQ ID NO: 158190 - DNA, 509 bp, Cannabis sativa
taataaaataaaaattaaaaaaatgataaaaaaaaaaatctcacctgcataggattatttatcccaccctaatggatgggataaataatctcagacagatgaggttagatggattagttatctagacttctaacatgcccaaacactggattggacaaactagtctgtctaatccaatccagtcctacgcaccaaacgggcccataaggaaagttacttgttctcaataaataaataaatgaataaagttattaattaaatatatgatacacccctattaacattaaaaaggatttaaaagaaaataaaaataataataactgccaaaaaataaaattaccctaataagaagaagtattatagatatttttttaagagattttggtgtcagaatttttatcaaaaaataaaaaataaaaagacttggtgacatactttgtttattcagtgacttccattgatgaagttaaaatgttttctttttcattagataattaacgattggagtt

SEQ ID NO: 158191 - DNA, 903 bp, Cannabis sativa
ctttctctttagttttaatccccttcacaactggctggaaaatcttcctctacagcatcattctgaatcttcttgtcactcggcttcctgttgtccttcttaacaatccattcaggttgattttcttcttttttcctgcattcagttgtttcatgtcccatagctttacagtgcttacaaacagttggcttccattcataatcaatggataccgaaacagtagacccgaactcatcctcagtttctatgagatttgggaaatcctgatggattaaaacctcaataagaactcttagataactcagcttgtctctttcccttgtaacatcatcaaccattaatggatttccaacttgcacgattatcttgaataaagatttctgaccccaatacttcaattctaaatctgtgaggtgaacctagactggaaccgaacgtatatcctccttcttgaagtttatgttagggtcccaaggcttcaaaatcacaggccttttattgaagaaagtataccccccattcactacttcattcctttcctctatactatgaaatctaattaagaaaattccataggataacatacctactttgtcgatcttatctttccaaatgtgccgagcaaaaccatcaagcacagatagcagtgggttggctccgagaacatagcatactaaggacgatttccaaaaagaaacctcatcctcaatatcctcatgtgtaatcttgactttggatttgctctttgatccatcgaaagcaggtcccagattctttatgatgcctcccgttcgaagaacaggaatgggagtcgattttccagctgcaacttctttcgaacatctgtgattcgcttcaatgaatgatgagaaatcatgtcgaatttcctcttgcctcagaatt

SEQ ID NO: 158192 - DNA, 520 bp, Cannabis sativa
catccttcggaaccatatcacatcccggatctgatgaaataggatgaattgagacggtattttgtaaatacgtaattatcttgaatatattaactatttatttattttccgattgtctggaagggacaaaaaaatatcttgttctttcttcaacaaattctgatctctaatggatctctcagtaggattcgaactcagataaagttttgaccatgtgtcatagaaaaaagaaaataaaagatacaagaagtgagcttaaatttaaattgtaatattttgtaagggaagaacactcttgttatataacaacatttaatataacatagtataataatcacaatacctactagtatagtagggattatgtattttacctatcaatagggatagtaatttataacccttgatttaatccaatgggtcaaattaacttttaaaaattacaccataattaatatattttttatttataattaatcttgaatattattaattgtaggttcaactaacaaattccaaa

SEQ ID NO: 158193 - DNA, 642 bp, Cannabis sativa
tatacgtggtttgactaaattgaattgcataatataaattcatattagcatctattagatcaattttgatttaaatatattatttctcatattttggaaactaaatattttaatatatcaagaatattactagttatatattttgacaaaaaaaaaaaaaccagaagaaaattgagtttgtgtttgcttccattttataaaatactattttctgtaaaaaaaaattacatatttacatttaaagatttttttatatatatttttaaattattctataaaaatattaacacgaaaataacaagaatactacataaaaataacataaaaattaaataaaaaatataaaaaaaataacaaaaaattaataataaatcaacaataaatcagtaaaagtacaacataaatatatatatatcaaaagactatatttttcgtaaattaaatcataaaaaatataaataaatatttaaaattttatacaatcctattttatatatcattttattatttttatatatttatgaaacattctctttgttttaatgtggattttttttttttttttgagataaaaactgttgtattgatataaaatcattatacataacagaattgagaaaggaaatatactccaaccaaatt

SEQ ID NO: 158194 - DNA, 587 bp, Cannabis sativa
ccaatgcaacccatctcaagacgaaatgaattttctccagcatcgtatacacccccagaagcagcaagaaaacaccggaagggtgatgctctacctggtggagatgatgatgaggaagaggagcatgcagaagcaggtgcaagtgagatggttccgcctcttctccagattgaactgccactagactcccaaactcagggcacatatgatagattggactacatcatcaggtagaatcaatatatcatccaatttaaccaagcccaagctgtttactataactcctatcttcagcagccacatgaatttgcttaaaggcaagttcaggacttgaattttactttctctatgtataggatgaacaggtaagttccttttctctctctttagtatcatattggggacattgtgtcactttagtttgggggaggggggtgaacttaaatttttatttttttttagtttaaaattttttaagtcttttattttttttttttaatttttagtgtttctttatttttgagttaattttcttaatatgagtcaatttgaaagtaggtagatagcataatttgaaaagtttattt

SEQ ID NO: 158195 - DNA, 943 bp, Cannabis sativa
atgggcagagttgtttctggtataatgatgtcattcgaattgacaaatgctccagcggcctttatggatctcatgaatagattattcaagaatttcatcgatatctgcatcatagtgtttatcgatgacatccttgtgtactcttagtcagaagaggagcatgagcatcatcttcgaatggtattgtagtgactcaaggatcataagttgtatgcaaagttcaaaaagtgtgaattctggttgtcagaggtatcttttcttggacatattgtcgggaaggatggaattatggttgacccgagtaagattgaatcagtgaagaattggccaaggccaaagtctgtgatggaagtttgaatttttctcagtctggtagggtattatcaacgtttggtcgaaggattttctaagatttctatgccactaaccgagttaaccaaaaagaattagcaattcgtatggtcagaaaaatgtgaagcaagtttctaggagttgacacaacgattgataatggcactagtgttagctttgccatcatatctagaaaaatttgttgtttactgtgatgcatccagacagggtctgggatgtgctctgatgcaagctgacaaggttatagcttatgctacccgtcaactgaaagattatgagcaacactacccaacgcatgatttagagcttgctgctgtagtattttctctaaaaatatggcaacactatcttcatggtgcgagatttacgctgatcataagagtcttaagtactttttcacccagaaagatttaaacatgaggcagaaaagatggctggaattagttaaagattacgattgtgagattttgtatcaccccaggaaagccaatgttgtggctgatacactgagtagaagaggtgtcaggcaggttttcattactgttatgatagctcctcaactggcctcaga

SEQ ID NO: 158196 - DNA, 558 bp, Cannabis sativa
aagttcatatttagggtgtttaagtggtgtttataaattattatgtaaatgaaaaagtttaatatttattataaaagttttagtttgacacatttttcaagaaaaatctttgattagcaaagatagcattgtaataataaaaaaaagcattgtagcttgccttaacattagggcgttacaatttcggtatcagagccgccaggttgtctatcgaagcttgttggggttgcagatctgttgtgagatcagtggggagttgtttcttggtgtgttttatgtggctactgcagtggggttttgagaaagagtgttggttctggttcattatcattgttgagtgggtggacgatgaactgggtttgctgggcaccaatttgtgcgggggtgtttcattttttattgttctgatttttattattatgtttaactaggtaatatagccgcttttcgtgcgactaagttaaaatttttattaatatgataaataattatttaaaataataattctgatatataataataaaattatattacctaattttatattattaattatta

SEQ ID NO: 158197 - DNA, 736 bp, Cannabis sativa
agggaatgctatttggaatgatgcatattcttccttaatctaattaaccttatatatcaaattctagtgaaattattataagacactaatacttaacaatttaatgcaggcacatctgggagaccataaacgatttgagaaaatttttcaagttttacgacccagaggttctcgcaatgaatggttaaaaacgatgaagagaagagtcagtcttttgacaatacggcaagacgattggctgtttggttatcatcgatgaataacaaccaccaaatattatttattccttggaatatcgggtaaacactatttaattttttagtggtaattgttcatttctatatatatattataacttgaaattatttttatgctatcttacttatatcacaatataattttctagtacgcattggatgctagaggtcgttgcgccaaggaaaattattaccctatacgtgaccaccaagttcccaaacaaattactcaaatgttgggaaggtaataacttaataattatttatgtaataagttatttaattaactaatgaattgaaatgctaatataatttttcaagcagagcatatgcatatatagggacatcaaataagtatcttggcctgtgaccaagaatttctctagcaaattgtccaagacaacctaaaaactaagaatgtggtttttatgttttgaaatacatgactgacatcgtcgcacgtgcaaaccctaaccgtt

SEQ ID NO: 158198 - DNA, 529 bp, Cannabis sativa
aatcacatagatagtaatgtcttgcagttaatttttgaccagtctctcctcttgtcaagttaggtttctttctttctcattttaattatgaactatgaagcaatttttgtaagtatacatacattcaaccaacacaaacgtgaaagtattaattacaatacttaaattttgtgaatatatagtcaatatcatttttttctttcggaaatattatattattattttacaggctatacatgaaatataatcttaataatctctttcagatatttaaaaaaaaaaaaatcaacattttataatttatgattaaagtgaaaaatatgtaaattaatctctttcagaaacaagccttcacaataaaataaaaatatatatactataacctaaatatacatttttttttaattattaaaaacattacgtgtattaatcacaaaaagattcgtgactaaaggtattaatcacaaaaattacagttttttgtgattaaaagtatttttagtcacaatacttgttgtgactaaaacta

SEQ ID NO: 158199 - DNA, 764 bp, Cannabis sativa
  modified_base (367)..(368): a, c, t, g, unknown or other
ctgagtggaacgatcagctcggcgaattacaggctcctaaaccgtaacaatcacaacaccgataagtgacacgctaaatcacaattaggacaaaggttttaaaaccactcttaacctactgcaacttaatacaaaaataccccaaactagcagagaacaaattgcctgaaaacccgaaactagcatgaaacgacaagttgagaaaaaccagtttcacaccctactgcaaacaacaaatccccaaccaaaacatttccaaactaaaccaaactttccagaccttctaattagaccctaataaacattcttaaagcaacaaaacaaagcttcatgcataaaattaaaatccaccattaaagctccaagnnttgagttcaaaactcaaacttgattaaacaacactaccatgcattcaaaccagctcaaatcttcctagatatgcataaaataatctcagaaaacaacagcaagccacaaaaataagtgcatcaacagattcttcattttctttgaaaaacatagttttgagtaaaaatttcatatcttgataaaaccaacgaatcaccaacacaatcatgcttgaatcaacatttcaaatcatgttctaactccagaaatcaacaacagcatagagcagcaagaaccactacaaaactaagcatgcaaccaaatcttacttgatttttcaagaaactaaagaggacaagagtaagaacaatacctaaagcttgaattgcacgcaaaaatcagcttgaaaaaccaaa

SEQ ID NO: 158200 - DNA, 694 bp, Cannabis sativa
tgttgtttttcgtgttgttttatgtttgttttagcagtgtttttgttgttttgttttaggattgggaatccaagtacacccaatctcaatactaccatctagagtagtgacatctggttattactctgtaattggagatatcaaaaaagttctaactaaaacccaactagaacttttctcaaaaactgtgtttggatattttctccgaattccagagtacattatccattaccaacttcttcatggtttgctgttgagggaggttcacagcctaatgaattggagttttgggtatgtgtccaaggcaaatataggcaaatatcttaggtttagtattgaggagttttcgctaattattgggttagattgtccgattgattctgatttttatcagttaaagaaagatgataatacattggttaaacattgcttaaagggttacaaaaaaattaccaagggtcatattcaaactacctttattgctaacaatctcaagagtaatgacgatcttccagtcaagttggctgtgttatattttgtgcagtgttacttgttgggtggtcccccgggtaaagctatttcaatagaggaaatagatgtagttgatagtggtcggtacaatgaatttggttggggtaagcactgttttgatatgactattcaatctttaaagggtaagattgactctggtctt

SEQ ID NO: 158201 - DNA, 643 bp, Cannabis sativa
ggagataagagtgagatcaaatgccttagacaaaatatcgaggaaagaaataaaccacaggtacttatcgcagccatggcgttgctgatatcttgaacctggtagacggagttcaaggaggcacaagcagcgtaccgttagggcgggaactgagttagatgggagacatacttgctggtcatctccgaggcaaaaggagccaaggtgggtccaaggaaacggttgaaccagtccgtcagcgggtctatgttcaggtcccacggatttcggaaggcctcctcgttgagagtattttgttgctcctctcgtaagaccctcttcaaggcctccacctcagcatgccccctgctatactcgtcgagggcgtaattgtatttggctatccggagattctgcctctcctcgtccccggggatcggagtcaacactatgccgtggggcacagtgtattcctccacctcagagggaatctcggagtcatggctaggggccggagtgtccaccctgcagggccgcttagaaggctcctcctccaccatctttcccgttcgtttacgctcgagggcggccgactcctcttcttcaccttcttcaacttcctcaagaacctcctcctcgtccaccaagacaatagtgcccgaag

SEQ ID NO: 158202 - DNA, 675 bp, Cannabis sativa
  modified_base (569)..(571): a, c, t, g, unknown or other
  modified_base (640)..(640): a, c, t, g, unknown or other
ttatttaaaataaactaacatattcaaaacatattaaagaagaagggttgtaatggggtctgctgctcgaaggggcaggttatatgaacacttttaatgcgaacgcaccgtttcgttaaacattaatgcgccggtaaaagtaatcccacctaccaccactttccacgcgggattttttccccccaaattttcacgtgggcggtcaagattctcaccaaaaatttgctagcttttaccggcgtaattttgcgccggcaaaagccttacagaagtggaaatgtattcgcaccatttggtggttcattgttgatctttcaccggcgcatatgtaataatacgccggtattgagtaccttttgctggcacaaaattgcgccggtaaaagttattgttgaatcgaattggaacttcagcattttatttattctgacaacttttgccggcgtaattgaccaattgcgccggtaaaactaggttttcttgtagtgtatactaagatcaatatcggtcccagtccaatgtatactctacacatcccatacaacggaaagaacataacacttatccannntgtaagtaagctttatcgctgactctcacatcagtgtaaatccagtgtactgatgaatcatgggacatnaacttttgaagtatataatcacaattaccttccac

SEQ ID NO: 158203 - DNA, 549 bp, Cannabis sativa
cataccctcgccttgtaccaactcgacaaactctttccgctttgcactgcggaccgcctcattataatacttagcgttaaacaaatcccgaaattcctcccaagtcattcaaacaacatccttggtgagggataccatctcccaccacaccaagacatcttcttggaattgaaatgtggcacacgccaccctgtcattcccgaccactcccttgtaattcaatattctttcaataacagtcagccactgttcagccttaagtacatcagggcctcccagaaacactaaaggtgcctgcttcctatatctctcatataaaggctccaaacggtcaccagcaacttgttgctctgctggcaccgtaggaaccgcaacaggcggttccaggggaagctcaacaggagcgccccgttgcctgagtctccgaatctcatcttcttgttgtgctattctggcttgcatctcgacaaatctttgctcccaatcaaccggagcctgaggtggttcctcttgaccacctctcggaacacgatcgcggcctctaccgcg

SEQ ID NO: 158204 - DNA, 716 bp, Cannabis sativa
  modified_base (113)..(115): a, c, t, g, unknown or other
ttaatttcgttgcacccaatgtaacgtgtctcaaactttatatgtgttttaattacattattttagaaattaatatttaggatgctaaataatatacatggtagtaaatctannncctggtaaaacataatccaacaattggaatcagagccatagtaatgatttactttcatgaaatatgaatttaaaatgatgtttgtgttgatttggatggtttcatgatggtttatgtgcctatttgatgattgtatggaaatcgtaatgtatattgtaaaatgttatttgtatcattctggatatattttcactggaaagtagacaaaaagttaatgaatttaagttttcacaaaacttaatttggatttcttatgtattagttatgattttttgaatttggatgaaaatatctgaaatttgatgcacacttgtgcgccccctgatcagaggcatcactcggacagcacgcctctttagacaagggctgaccgaggattctcaaacaaggccctgtctgaaggcctactccttacggaagttcctcggccaacactggttgcatgcagccttcagcatcgcccatttcacttcatccgcacgcgtaggggtatgcaattttcaattaaaaatctaattatccgaataaaattaatttttattaattttttaattaattaatattagttttagatattaatgccctttgaatttgaaaattt

SEQ ID NO: 158205 - DNA, 661 bp, Cannabis sativa
  modified_base (442)..(457): a, c, t, g, unknown or other
ataattcaaacctaagccctagttgaaatattataaaatgaacatgatgctctcatctcatccaacactttcaacctgcaaaatctagcttctaactttgttagacaactagttgatgagagacaccttctatacagttttcgaacgctccttcatagttcttcataatcgaccatagtgattgagtgtcatgcccacacatagcaatcaagtactcaatcatagtgcggaagacggtggtaaccaaactcgaaggagagaaggagatccaggttcagatcttgataatgctctacaacaaaaaggaatcaaaggctagagatttgaacggaaggagtcatatcattcttctgcaatcaatgtaaggttttctaaactcttatgtgttttatttcattgtattagagatatatctatgtaggatgttaatgaaacatacttnnnnnnnnnnnnnnnncctagtaaaatattcccaacatctagtatcagagtcatggtaatgattcactttcatgaaatatggatttaaaatgacgaatgtgttgatttggatgtgtttatattggtttatgtattatttgatgattgaatgtgaattacgaattttttccatgaaaataattttattttcattctgaatataatttatttggattccttg

SEQ ID NO: 158206 - DNA, 506 bp, Cannabis sativa
ctatcaattgatacctatctgtggtggcaaatcataggtatcaaaagccaagaatgttacccctattattatagtctgccaattccactgtaaaacaatgatcgattagttgaaaaatggtaatttaagtagtataaagcttaaaaaaaaaagaatcataatatttttattcaagtagtataacattaccattaaaagaatctcattatgcaacttcaaattcaaactacaacaataccattagtgtaactcaaagaaacatcactaaaaaaatagagcttggagattaaaaatatcaatgcttaatccacgttgttacctctagctgagtgcagagtagacgacgtcattacctccagcaaatgcgaacaataaccaaagagaaaaatggcagcggaggaagcgatgatgggcgaggcttggtggtgaactgcctgagaagaatcgaagagggaggagagagcttgtcgattggttggtggtctgatatgggttctcgtttcccc

SEQ ID NO: 158207 - DNA, 735 bp, Cannabis sativa
caccataaccaccacaccaccacctttacagtcacatacacaaaaaataaaaatcagattatatttttcctaaattaaagaaaaatctttattgttttctttaattctcattacactccctgcaaaatcaaagacctcaaatttcatcttttgaaaaaatcgaaacaagagcttgaaataattccatacaaaggtattatctaaattagatttgaagattttgattattttttaaggctctcaattttttttaccttgatttacacaatgagttgtcttactttaatcaatggaagattgctcacaaaaattttgcaaacacaattggttctagtccttgtgtttgtgtggagcattggtccgtatccagtattggtatgattaaaattaatataaatgcctctgtcacttctagggttttttatttcgggattggggggctggctcgtgatcatcatggagctgtcccttatcattggtccaaacaattgcctggtcgtgtctctccgctttcggcgaaggtaatagggttgaaggaagctttgagctggatcaaataacgcggcctagatagagattgaaaaactgagtttttacaaatgtcaataatatatatgagaatataaaactatatacgtcagtagaagcagaatgtaattctgttactgcagaaaccagttttgcagcgacaaaatagaacagacagaatataaaaaataattgcagaaaattaaa

SEQ ID NO: 158208 - DNA, 540 bp, Cannabis sativa
gttactctcattaattcagtcctccttgcaatcaacacttactggtctcaaattgtcatcttacctaaagatgttatccaaaagattaatcaaatatgtctgaatttgttacgaaaattacgctacgcaagtacacgtatcaagtagtactcacacaagtgaggttgaacccacagaaattaaaattgaaattgattaccacaaaactagatttatgtttttatttagttgaaatatagtctttgagagaaaattataaagattgacggaaaaattaaagaaaaaaattattatgcaactgttatgaaacattaaaaatcataacagtattttcatgtacgtaattctatctatatgtctcttcgtagtttaatatgaataaattcaccattagaaatttagaaaacaacgaaaatatactaggataaacatcttactatagaattgatgtaattttttgagattatacttgagttgaattatttgggaactccagttcaactttttgagatctgtattttatggatctgaaaattgaag

SEQ ID NO: 158209 - DNA, 500 bp, Cannabis sativa
tagggacaaattttactttgtttctttaaagatgaaaattggattaaaaaattcatttgcagatcataaaagaaagaaaatgtacaagaaatttattgggatgagtaaaatcttgacgaatgactatttgcaatgaaattatcactttcaaggtagtcaaattgttgcaataaatctgactcaattaatgtattatatatattatttgtagtgtaaatagttaaatttaaatcatagataaatatttaaatttggtatttgatttttgtcaagtatatttaaattaatttttaaataaaaatttaatgacataaaccgattaaggactataccatgtgactattgacttgacacttatctaaaaaaattttaaaaatcactacaagaaatgtcacttttgccaggcgctggtaaaatagaatttacctatgatgtgttgacaaaaggggattggcaaatcaatattggtattagaacttttgccggcataaaatgaaaag

SEQ ID NO: 158210 - DNA, 639 bp, Cannabis sativa
  modified_base (249)..(250): a, c, t, g, unknown or other
tcacattccttttatcttgacacgcgtcctccaaccgaattttgggtataacaattgtcccttaaaaagtttatttttagtaaaaatagttttttaacaattatagagggcatttacgtcaaaatcttttcttgaaaaaatgcatccgttgattctggcggttgtacgatttcgagggtcattatgaatcgtctcttcataatttgcacttctcccaacgttggatttttcaatacttagctttcttgnnactggactttgtgtataaaagggcggctcaagcttgtcattttttataaacctctggctctttagtgagatctattttcagaatggatcatctctttcctgccaaaatgtcccttcagaattaagaatttcatcctcccaaactcataacacccagacacacaggatctttcatttgtttccaaggacttctaatctctattggtgctggaaacaatggattataaggctgtggaccttccgacaaatccaatctaggggagccccgtagcccaccatgggcaatcctcacaagtgatcatagatcctgtgggtgatttaaaagatcctgtgggttattgcatgtcaatctcaaaatccaatcaaaaaccgatccaatccaattacatt

SEQ ID NO: 158211 - DNA, 621 bp, Cannabis sativa
aatcaaaagcaatcaagtgtagccatcaaacgtggtgagagaaaatcggatttcgaaccattaattgcgtcagagcatttattggccgaaaattgaaaagacgcctagtcagcctcacatcgagtcgtgaacagatgcacctgacacgtgtcacccatccaaacgcaaagacagcttggatgaagtctacacgcaacttcgaaagtcccgtacagacttgggggcaaatgttatccaaatttttgcactctgacgtggcatcacactatggtgacacgtggaatcaactctgggtacctgctcgcaagacacaggctgaacagggcacctcatacatttgttcgaatgaagtcccctagaccgagcagtataaaatggtggcttaagcttgccatattccacaaacttttggttttttggtgagatccatcttgagattggattgtcattctcttgctaagatgtcccatctgagttcagaaatttacccctccaaattcataacaccggaatgcaccaaccacttttcttctctatacgttcccaaaaaacttcaaacctcaatttaaattagaaacaaaagattccatggctgaggagcttctgatcaatccaaactaa

SEQ ID NO: 158212 - DNA, 512 bp, Cannabis sativa
gattgatatgactaattacttctatatagaaatgtatatttgtcttgctattttttaataattaagataataaatacagtatgaagttagttgtgcaatcgcgtgatcattataattatatagtgcattgtacaatcattataatcaatgaaaatcaaatttaataatgattattttttgtatttttttattttagaaattcatatattaagtattttttttattaaatgagtatataaatatattagataaatatatatacagttgatttgagaactcaaaatattaaaaaaaaaatataactaattgggcaatatcgagtgataaattagccatgtacgaattaaaataaatataagaatactttatttataatttagaagtacactaattatgtattttttttaacctatgtgggattttaattacaaagaaaacaaaagttactaagaagccatatttctcaatatttacaaaataaaatataacgatacactgagtctaattgtaat

SEQ ID NO: 158213 - DNA, 575 bp, Cannabis sativa
  modified_base (48)..(54): a, c, t, g, unknown or other
atattctgttaaaccaagaatgttaaaccaagaaatgccgttagatannnnnnnttaatatataaagatatataaatcaacagctcttcccttgaaggagtactcttcaagaagcttgcagtatcgagcaagaaagaacacgtggaacataaaattcaagtcttgcaatgccacaatataactatgttaaaaataacattgatcaacacaaactgttttttcacgaaacacaatccactaactttcactagagttacataaatttccattttgcttgggtggaaaaatatctaacagcaaggagtttgtacaagagaattgacaataaaccttttccatagtaaaatgttaaagaataaacaaatacccattttgtgaaagtacaagaaattcatgatgaggcgccagaattgatactgcttgacaactagtttaggattcaaatacaaattgtaaggaaaaattatctgcaaattatttccctatgtatgaactatgaggctatgcttaggattcagatacaaaattattttttaattaatatatatatatatataaaatgtaataaaaaataa

SEQ ID NO: 158214 - DNA, 586 bp, Cannabis sativa
gaaaaaaaaaaaaaaaggaaaagtggtgaaaagtggtattcgagagtatttatagtcccaacgcacgatccttgtaagttctaaatctacgtacaagataaatcctccaaaaaagtatagagttgatctaaggggaatgctccaaatagcatttaatgcactatttggatttgaggcaaaaactgcataataatatacccctcgaagcccacatagaagtatataactagcaaaatgtttgaatttccacacattcttcatcaattgaatggataccgcatgttaacgcagattttcgttaactaaatttgagcctcacaatattgatttcacacagttgaaattaaagctaccaaaataaagaatatgaacacagggtttttatgtggttttgcagttaaaattctgcatagtccatgagtcaatcttatttagattttttagtatttttcagggcctctttcatatgagttttttcgtcccttttttttttgtacttgtctaccactatttataattacatagtgggcagttaattacaaagttgaccgaaataattttgcagcaatcatccctaaaatcgtgg

SEQ ID NO: 158215 - DNA, 591 bp, Cannabis sativa
  modified_base (194)..(200): a, c, t, g, unknown or other
attcttaaaattttatatatgtaaatctttttttttggcaaagttagatgtcaaaatatttttttactttatggtaagatctatttgcattcataatcaattttcttaccttgtttattcggtttttattgctcttttttatgttgggaaagatgcatttttcagctgaacttttcttgtatggaaacttcttnnnnnnnaagcaattctcttatggaaagttagtttttaaaggaaactttaattattgcatttttccttattaaattcgattgtgtcttgatacaatcagaatatacaaactgtttatggcaggaatcaagacccaatacaagatcgtactgtttatggcaagaatcaagacccaatacaagaggtgatggtgggtcccgtcgcccaggaggggtataggcctcgtgctatggggtgggaagcggccgagcttcactccaccttaacttgccctcaccaactggagaacattgttgtggtggcctgcatcaagcctgcgacttccgggacgtaccaccggccgccccgtgacacgaagacgcccaatcacaattacggaggcttcggtgcttggagcca

SEQ ID NO: 158216 - DNA, 649 bp, Cannabis sativa
  modified_base (276)..(279): a, c, t, g, unknown or other
ggctctaccaacacgagtacagggttggtaatttagtgtatttggtacagtggtcgtacttcccttaagaacgttcttatccaagtggtgggcataattattgagctcagggcggcttaaccacaaagtcgacatcgcattacttatatatatgttttgcatatcttactgagtctgttgactcattagtttgctaccttgtgtaggtaagggaaaagcaaagctggaggaacagtgagatggagctcggtagtgattgtacatatcgcggcagtnnnncctggagggtttcgatcttttattattttgagtctgtattttgtagttgcctgttggcgtgttttaaaaagaaaatattatatgcatatactagtaaaatacttttaaattatattttgatactcgggatcccgacccatataagtatgaagttataaaatgtgtcaaattatcttttgagtttaaatatttttaaatacgggcgttacagttttgtatcagagccaccaggttgtccagtgaagactgttaagatatgtacaatcaaggccagtgtcgagctcaactcacagttccgtaagctttatttcttttgcaaactgttttaagatatgttgcatatataattaaatagatgttataaaaccct

SEQ ID NO: 158217 - DNA, 580 bp, Cannabis sativa
tggtaatatttatagtatatgtaatatttatagtatatatgcgccctatagtatatatgcgccctgtggtatatatgcgccctgtgaagatatgcgccctgtgaagtttatgcgccctgtgaagtttggagtgatttggataagtttttgtaatgtttcgatgagtgtgaaaattggaattttcaagtttcatagtttttagaaattcctaggagatcagaaatcgtatttttatcataacttttaacttgggtgtctgttttggacattctatgtaccatttcaaagcttgtaacaagctctacaatatggtgtatgttttagagccaagatataagtttattttagtgtatgtataccgtggggtttggtagaaaatcctagattctcttatgtgaatattaaatagtattttgggataaacacttattaggttaccattgttgtgacaaagggtcgagatcatcgggggtagttctccacttgggttagtcaaaatgtataaacctagattaaaagtaagaaaagtatattgtactgcataatacgttgtatgtaatacaattagtattgttatgaa

SEQ ID NO: 158218 - DNA, 549 bp, Cannabis sativa
ttcaaaccctagggtttcctaaagtgttctttctacaacgaagttacattcaaagcgtaatcatgcaaaggaaaagcataaagggaactagaaacttaatcaaatattcgaatgtccgggttcaagcaagcaagcaatcgtctgtaggcactttggcaactctgaagctagaaaattttctcttttcgctctaaaagtttacttaacaacgaagggtgatgaaatgaggtaatgtgccagtactccaagtatttataggcaaaagggtaactgtacgtaaaggaaccttagacgcctcggctttccgccttaaaagcaaatatgggaaatcaaaagtaattgagtgcaaccgtcagccgtggagagagaaatttggattttcaaaatattaattttcagagcattaattagccgaaaaccgaagggactcccaggcagcttcacaacgagtctcgaacggtcatgctcgacacgtgtccccatacaaaggcagagccagctcgaaaaaagtctacacgcaaccttggaggtcccgtacagacatggggg

SEQ ID NO: 158219 - DNA, 514 bp, Cannabis sativa
atctccaagagaagttcgtgggcgatgaatttatatcaaaggtcaacaagacccctactgaagagctggtgcctcgttctgcggagttggcttcgcagtttattgccatgttttcaagggcctttgtcactggatctaaggaagtcgaacttgtgaagagacagaatgttcagcttcaggaggacatcaagaagctgaaacaagatgcaacttccaaagacaaagagcacgaggaacttcgcaaggccaagaagcaagtcgagctcgaagccaagagcgctcagatgaaggtcgaggagatgtctcgcgacttggaggtcgagaaggagaatgggaagaagtagtatgaccaggcggtctccgactacatttacaccactctttccaaaactccagactttgacttctcaattcttggggcagaagctgcggagatggctgaggcttttcgagccatgtcgcctacgctgactcaaggcggtggagggaatcttttgttggaaatattttacca

SEQ ID NO: 158220 - DNA, 904 bp, Cannabis sativa
  modified_base (174)..(182): a, c, t, g, unknown or other
gatttggatgatttcatgatgattcatgtgcctatttgatgattgtatggaaatcgcaatgtatgttgtaatttattttttgtttcattctggaaatatttttactggaaagtagacagaaacttaataaatttaggcatatacagaactcaatttgaattttttatgaattannnnnnnnnttttgaatttggatgaaaatatttgaaactgatgcacacacatgcgcgcgcacgaggggattcactcaacattcacgcagtttcatacaagcctgaccgaggaaagtcgaacacgagctgtctaaaaccgtgtcacgccgaatttcctcggccattgaggctgcttgtctcggtcgaagcccacttccgtgagcgtaggggtatacaatgcataccccctttgcctcaaacttgtttttgtcatattttttgattcaaaaatcatttttcattgaaacaaaattcaaatttcggtagaatttgtgtagaatctaaattttcaattaaaaatctaattatcagaataaaattaatttttgattaattgaaattagttttagatattagtagcattagaatttgaaaatttaatttttccataaaaatagccttacggttaattttaaaagtttgattattttatttattttaattataagattagatattacttattttattattaaaatttgaacattcttattttgatattaaaatattaataattttttgaaataatctagtttaaatttcaaaaatttgctaaccatattagtttttcaaaaatttgttatttttgatttttgtttattaaattaaattataagatttgaaaaatgttagttttataattttattttattatatattttttttaattaaattaatttttggcaaaataa

SEQ ID NO: 158221 - DNA, 615 bp, Cannabis sativa
  modified_base (31)..(59): a, c, t, g, unknown or other
tgcctagagtgaacaagatgttcacgagcannnnnnnnnnnnnnnnnnnnnnnnnnnnngattgtccctggttcagcgagctcctgaaccattctttatatattcgcggaagacaacgggccaagctctgcagttccgacaattgaggtctccgcttctaagatcgaggttgggatgaagctatcctcctgatcttggtcaccgtcgaaagcatggcctccaaagccaagcatctggttgtccgacaggtcgctcatctgaaagatagaagatcttttcagtgtgttgaatgtgcgaaaacaatacaagcgacctcacccgcataaaaagtttaaattttccttggaaggctagttcgaattctctcgaaaacccaaccaaccccccaaggcataaatcgcatgtgtgcgactagaagaatatctcaaaaaatggcaagaagttacccagtgacccaaggggcatgcgttttcgagcatgaccatggagatactgggaaatacccaccgtttcaagaaatctaaccaatcacaacatgcgaacatatcacgcgtatccaactagtgatatatctcaagaaacatctgaggaatctcctatatctcaaggggcatg

SEQ ID NO: 158222 - DNA, 604 bp, Cannabis sativa
aatacacaataatataatgtccaccgaagaatgctttccaactatatatgctactttaattatcactctaaaatttaaattaatgtcttattgttaatcacaacaccaacttatagtatcctattattttaaaagtgtgactactgaccttatttataattaacaccctatagaagcaactcatgatgaaaatgaaagttcaagaaagcgaatgttatatatagtgcaaattaatgacatttcttaattaattatgcagccagctaaaacagattaaaagactaatccactatcttctataaataataaattatggaagttaaagacatgaagttaatgtggaaaagtggtagataatatccgtaaacatacatcacactcaaactttcttggtcttcttgatagcattacaagaattaccagtaagcaaattaagagaggactgagactcttttacacacacagctttaccaagtgaagttacagaaataacacaattagttacaagtgtttttttggtaacagattgttcttagaaatttattgaggtcacaattgtatatataaaatgtgtgttgtcttcaaataaataagtcaaatttat

SEQ ID NO: 158223 - DNA, 652 bp, Cannabis sativa
  modified_base (451)..(451): a, c, t, g, unknown or other
gtagacgagaatgagaatcaagattattcttattttttgattttgagctgcttcaaccattgtttcatacttcgtaaatttatcgttacgatgtcaaatgcttcaacgaataaccatccataagggggacgaagcgtctcgaggttatattgaaaacaattaaccatgtaggatcaacaatggagatcgaatattcttataactaaagctcattattttaaagtgttgtattttcatttgatacttattttaacatatatttattaaaattacaaatttagataaatctaaatataaattttaatttaatatttataaaattatactataggaagatttgaaagataaaatttatttttcattcttagtattaatgtttccattaaatattatgaaaattacttaatttcagttggtccaaattaattaaattaattttcaactcaaattnaattttctataaatatatatgatagaattcgaaatccaatgtattaaagcaataaattttcgaaattacacttaaaataaaataaaataaactttgaaaaaataatataatttatgttgctctaaaattaaataagttaattttcaacataaatataatttttctatttaattaaatattttaagaaaaatatcaaatatt

SEQ ID NO: 158224 - DNA, 569 bp, Cannabis sativa
tcatattttttttaatgttttataatttgattgattagataatgtcatatttagtggcaattactttttatgccatatttatcataaccttaataatttttctcatatttttggataatgttgtggtgatgagtttgatcctttatttcttcatttttgtggtaattttacaatttaaattattttacacatatttaattttctcggtggcccatatgtatagtatctcaaagtacaaactattaaaatgagaaaaaaaaaatatatgataataaaaaattaatgaaatgttatttgaaatccttcattttgtggttattttacaatttaaatagttatacacatatttaattttctcagtggtacatatatttagtatttcaaggtataaactattaaaatgaaaaaaaaaaaatatacatatgataataaaaaattaatgaaatattacttggaaatctttcattttgtggttagtttacaatttaaatggttttacacatatttaattttcttagtggcccatatgtatagtatctcaaggtacaaactattaaaatgaaaaaaaa

SEQ ID NO: 158225 - DNA, 1101 bp, Cannabis sativa
aaaatatactaaacttaatctaaaattaatactaaaaataacctaacactaggtcgagaataacctttttcaattcttcgattggttttagcaggtttctttcatcttgaactcggggatcaagatcttcgtctttcttctcgttttttccttccaagatcgtcatcaactgatgaccggcctttctatgctgtaactctatgcgatagcaatcgcgagccagcatctagtcgccacgcaccactcccacgccatctagcatttggaatttcaaggataggtgcttgatcaaattgactgcccctagtccgatcagtgttggacgaccgaacaatatgttgtaagccgagggtaggtcactaagaagtcttgcataaccgtagcagataaaagcgcctcgcctaatgttaatgcgagcttgattatgccaaggctggcaatactgtctccggtgaatccacaaaggttcaccatgcaaggccttaatttggccttttcgagccccattttctttagggtctccttataaaggatatttaccgagctcccattgtctattaacactctcttgatccttgaattcctcatagggtcgggtttgccgaaggctaccttctgctcatgtgcgaggtaaatattctttcgagtttcattaagctcggtaaaaatagtatacgctagcacgtatttgtcatgcttcttttgtttctttctatccttcgacggttccttaattctttcttttcttttcggaccagaagcccccgagttatcaattctcgtggaagcagttcctattaaaacattgctgggtttacctaccaagcttgttttaataagttcatttcctttcgggcttcttccttccaaacaaacacctaagccctcttgttgaactcaatgatgcttcttaccagacatccttgtaaatcatcccacaactcgcccctgtggttaatggatcagtggagattcccgcctgaaaagctgtaagttgcgtgctgtcatccaaatttttagccctagcggcagccgtgataaaatgactaagtatgccttaagtgttttgccaggcttctgcttcatattggttagcgaggc

SEQ ID NO: 158226 - DNA, 795 bp, Cannabis sativa
  modified_base (582)..(583): a, c, t, g, unknown or other
tatatataattataattactaatattactattattatgtgtaaatataaatttgtggtattagagtcgttatataattttcttttataattgaatatatatattattttgaaagaatttgtaattgaatatttaattatgtatactatcacaattatatatattaattaataataataggtaatacatatacaataataaaatatgttattaaattctttttaaaatttataataattctttttcaataattcttaacagttacaaatttttaaatatggatatattttatttaaatattaaataaatataaatttaataactaataaaatgacaaaatagaatttaaaaaaatattacaactatatatagtgaatttttttgaaaaattattatctttgttttgactttttgaagggattattatatcattgttggcttatgttttgttttatttatttttggtaattaattgtatttttacttattcggttaatacaaatataaatataataggtgttgtatttaattattattctattagtataaattatttttaatgacctttggtttttataatatnnattgatattaattggacacataatttctctttcttacaaacttaattgagttattattgttattattactaatttataaattactatgattatgatgtaattgaatgaaaaagtaatttaaaaactaaataaaagtgaaaaatggagataacaaagaattagaaagaaacttcatataagatgccacctagaatgctttgtgcattccttta

SEQ ID NO: 158227 - DNA, 576 bp, Cannabis sativa
gttcgagtactcgtcattctaggttgaatactcgcacttattcatcatattattattataattattattgttattatttattttggtgttgtgaaattccttctataacatttggcgtcgtggtcgcggttgactacttcaccaagtgggctgaggcaaaggcacttgcaactattacagtagccaaactacgcgagcttgtctataactccataatctgtcaatttggcatcccttacaaactcatctcggacaacgcaaagcaattcgattgtaaggaaatgcgacaattgtgcgatgagttgggaattaaaaaggtattttcagcagtcgcctacccacagagcaatgggcagacagaagccgtcaacaagataatcaaacataccatcaaaggaaaactcgaagagcgtaagggggtatggccagaagaacttttgcaagttttatggtcatataacacaaccctgcgatccacaactggtgaaactcctttctcgctctcctatggatgtgaagctatggtaccagtcgagtttggggcaggttccttgcaaagagatgttttcaacattg

SEQ ID NO: 158228 - DNA, 562 bp, Cannabis sativa
ttattattattattatagaatctttacaacctacaacactttaaaatttataatttaccaaacattcagttcagtttttttctacagttttcctatagctgcttttccttacaacacagctacaactgcttttcctcacagcacagttgtgccaaactggccctcaatcaaattttaaagtagagaaatacactttttattttcttatttttcttttattatattattttagtttatttattttagtgacaaaaaatgagtgaattagagtgtagtttttgtactgtttattctcaatattgatattgattattttgtgcttcatctccatatctcatttataaaattatttttcatcttctattttttttttctttcaaatttaatagtatcttttatgtaaattcagtcatgtttttcttatgtaagttagactattaattattttggtatatttattatattatatgtcatttctgctaatagaagtactttgtcgatttatgatatataatagggatattggcagctaaaccacccgaactttacggtttgtaacact

SEQ ID NO: 158229 - DNA, 501 bp, Cannabis sativa
acacacatatataaaatgaaatttctgtcaatctctttctttcaataatacctgtacagatcgtgagaactttgaagattttagcagattataaagcttcaacaatcagtagaaattaatttggaaggctccaataataattgtaaattaatggcagcaaacaaagttttttttttctttaaaactattgcaaagatgtttcatttttgatatataaattgtgtaattgaatgggtgcttatgtgaataggtatcttcccaatagttatgttgttttgtaaattttttgaaaataggttgtgtatgtgtaatatttttcaatttggtcttttgaagatagcacttttttttttgtttaatttttatttttttaaattttgtaaataaaattggtttacttaatgaattgaataggtgtctgttaaagataacttttctgtagtatattctgttaaatttttggtatattctgttaagtgcacaacaaaaactgttagatag

SEQ ID NO: 158230 - DNA, 609 bp, Cannabis sativa
  modified_base (92)..(103): a, c, t, g, unknown or other
taaaaagtattactgtgcctaacaccttatttggagttatattattattgatgtaataattaaatatcaagtcttatataatttaaaaaaannnnnnnnnnnnaatatcgctaaccaatcgtagaactggcgccgcctataaaaggtgttggacaccaataacaatgctctaatattaaaggagtgtaatcattagtcaaattaattaggaactctctaacatattgacctatatatttatatatgtagctcgtaggctgttttctaagtgtcaaagcactaactgataatgtcccatgctccgtccacaaaaacaccacacaaacatatattataaggcaaattgctcattaatattttttcagaaggttgacaaactatatatatgcatccatcatacctaacttggaaatatctttactaatagccactaaattctttttggaaattggggtatacttttttaattaaaactagtgggagacacacgtgtccgcgtgtgtcctgcggacacgtgcatcaaattcaatgttgatttatatataaattttaataattttaaaaatttataagtttaattttttttttttataataaataaaagacact

SEQ ID NO: 158231 - DNA, 530 bp, Cannabis sativa
  modified_base (57)..(64): a, c, t, g, unknown or other
aagggggagatagttgtaaagaccgcttagcttaaatttggaaattagcaaataatnnnnnnnnaattatgaaaattatttattaactctaaattattaatttttagtgatttattttaattcggaatgcattttatatgtcatatatagaaatttcataattttgcatgttcagtgcctgacaacattagaacgcggtgtatggcttagtagaatcacatcttagtattttagtatagcggggctgtatagttagaccttgggaatgtcaggattagttgggaatttagaatttcccaaaatatcccttactgattttagaatgattttgtgaggacaagggcattttagtctttttgcccatagtgtattttgtccttttgtgaggtttttagtttatttttaaatccggttttttattactattagtagctaatttaatgcaaataaaaccaattttataattttcattttacaaaaaattaagaaaagaagcaaaaatcacatttctctcaaagctctctctttct

SEQ ID NO: 158232 - DNA, 780 bp, Cannabis sativa
  modified_base (50)..(53): a, c, t, g, unknown or other
gtggtattcagttcaattccctgttgttcgacctcacctgtgtgagtttnnnncttgattacgtgcacttgcgtattattcataaattttgtaacaagtttctggcgctgttgccgaggaattgtttaaaaattgatattacaaaaaaataagattaaattccactttggttaaattttcttgcttattgctaatctgtttcttttagattgtcttatttcaggcattgggggtgcatgcgacgtcaaggacaaagtataatactgacggttgatcttgaaattgagaaggcctgtagaagaaacagaagaaacaagaggcacgaaagagtttcagcaactgctgaaatagaagaaatcatggctgagaatgctaatggcggtaacaatagaggcaacaatggtagtaatggaggtgctgttgaagatcaagcaaatgaccacagtctgagagactacattctcctaactgttacgggggtttagtcttgtacaagaccacccgccgtggatgcaaacaactttgagataaagccatccatactcgtaatggtgcaatcctcagttcagttcggtggacccccatctgaagaccctaatctgcacttgtcaaacttcatggagttatgtcagaccttcaaagtaaatggagtcagtgatgatgcaatccgtttgagatttttttcattctcgctgagagagcgagccaagagttggttgatctccttgccaccgaattctatagcaacatggactaacttggcaacaaagtttctgtcta

SEQ ID NO: 158233 - DNA, 654 bp, Cannabis sativa
  modified_base (626)..(626): a, c, t, g, unknown or other
tgtgaaaaacatgtcagtattatagatgcttgcaattagaagccattcaacatagaaaaaacatgaaagcaagtaaaaagcaattagaagccatgcttgcaaatttttttttgtgtggtgtactcatttggtaatatatttattattatgtatttttaaaaaaataattaattcaagatagatatttttatagaaaatttattaaaataatatagtaaaatattaatttataaatttatgctttaataaaatattaaaaaaataagaaaattaagggaaaaaaatagtttcggagaaattttagaccgtcacgtcactgtctcatacttctcatttatatacatataagtaaatctactgtggggcttagtgtctttacctcatgatatagggaaataaattaagtcaatcaaagtttaaagaaaatagatggtatagaacttttgcttttgcatgtgtagaagattattatattaattatattatataataatattattgtattattattttttattttctgtaaaaattataaatatattaacagttggacttttaggctttggtttcaacattaatatagtgcatagatgtaatcttatattttttttggctaattagtaatntttctccctgaactttgacatgtagtaa

SEQ ID NO: 158234 - DNA, 536 bp, Cannabis sativa
aatatgatatatacacatatatatatgccacatatacatatatatttttctctctatatatattaacatataaaactttcttatctcaacacaagaaaatttgttaatacatatattactattattaaatttaaatagtaaaatacaaaataaaccatcatgctcacacatatatgaatggctttcacacaatattgcttatctttaaattctcacaatcttgattcatcctctcttctattgaaaagggataaacttttgattgttagagattttatgtatcaatagaagataaatcaagataaattacaattcaattgtaaaaataatacaatgactaaaataagagattgattatataaatattacaatagatatatacaatatatatacactatatattatatatataaaaaaggtagaatagataaattacaacatatcactactacaaatatgggctttagaggcggtttttaaggcctttcaacgtcggttttggtgaaattcgctaccgacgctgattcgagtgacgc

SEQ ID NO: 158235 - DNA, 544 bp, Cannabis sativa
tatatcacaagtgtgtatcacctttgtaagtgttgttattttgtgacagattattttaatagaatgtctagtcatgtttggagttttagtctgttatatatgcacttgcgtactgttatgttggagtgagtctgttatgacttatcgttaggtgttagttagtaccaggtggactgttttattgggtataaatagtcagtttcattctgtaaacagatttatctattaaatcgatattgttagttagttcagtttcatcgtgggtattagtgtggtatcttgctgttcttattgttgtttctacaggtctaattgtatagcttgaagatggtcatctatggcggaaagatcagagcctgaagttactgagttcaaactgaagggagttcagtgtcaacttcgtcatcaaatctgaagggatttcaggttgaagaagtgtcgaagacgaactcagttgctgcacaagggattgtgcagttgcaatcaagatttttgattgctgtttgtaattcattactaattgctgtaaagtttgtattaaatt

SEQ ID NO: 158236 - DNA, 518 bp, Cannabis sativa
  modified_base (136)..(147): a, c, t, g, unknown or other
aattaaaacgatgatttgtgttgatttggacggtttcatgttggtttatgtgttttttgatgaatgtatgtgttgtacgaaatttttcagtgaaaaatattttttttttctgtctgaaaatattttatttggattnnnnnnnnnnnnttaagcaactttcgtttttacggaactcaatttcgataaaaaatgagagagatatggtgttttgaaaaatcaggagcatatggtcgagcaccatgcgcgagcaccttcggacaaggtgatccgtgcgcggaaatcagacaacctttgtctgaagcgcacggtcagcctccttcagacaagggagacgcgggcgtgacaccctgcaaatggcgtttcctgaggctggtccgccgagatttctcggctgctgaccttgctgcatccctgctccgcgggcgtaatggaaaatttgcagcctttggaggctgcacgtgcagcctcctgggcagccacctccaaaacccgaatttcatgggattttttccaaaaat

SEQ ID NO: 158237 - DNA, 516 bp, Cannabis sativa
cgtttataaacaggttgacacgacacgactcatgtaacctgtttataagtatattttgtttaaacatgatggcttcaacttggaaaagaccatgatcaaattggatatggccatcaagcatatttagtggtggattgaaagacttggctacatatattgattgggaaggagaaacttacagtcaacttattagttaaattagtcctccaatggggtttggtttacttataaaataagatactcattatgatgcatattgtagagaattaacaactataaacaaggcgcacgtacaagaagatgttaaaaatacaaaaatgtcttctattgatattgacttttattttgttaaatattggagatttcatcgtgactttagatatgttatgatatatggtggcctggttctagataatttctgtacattgtactaccaccaaactatctttttcaggataaaaaataaataaatgtgtctatttgtgcttttgatagacttgaatataaatatagttg

SEQ ID NO: 158238 - DNA, 556 bp, Cannabis sativa
tatctattcttggtgaatagagcactctatgtaatcaagagtgcaattctgaatctatagtggagtcaggaggaatttataagatagagaatttactcgataaattcttgaattacttattgggagcttggttacataggcccatggtctccgcactaactgggataatattgttttgtagtctcagttaattgatttatttaatcaaataggattctaaataatgactgtcttatttatgaattttactaaggaatggcataattaagaagaaaagagaaataaagatttatttgttagttaagacactttgtgggactaattaataaatatatttaaattgtattttatttgataattattaataattattaaaataaaattagtttttaaataattataagagataaatggtaaaataagaaaagacacattgtttcattaaaaaaaataaagtggcataagtctaactctaaagcccatatgcaattcggccctaagagttgattcagcccaagtctttattttaagtccatctcatctaaacttaacccta

SEQ ID NO: 158239 - DNA, 696 bp, Cannabis sativa
tatttgctatgtcatttatgtacaccattcgcataaaatttatatataatgaatatacatatgttgtagctaataacataaaaataactcagttgaaaaaaaccgatctcacaaactaaatatatatcgtaatattttgtttatatataataaatgataatattattggtatttaatataatggaaaataataatttaatcctactattttttaaagtatcaacattactattttcaagagtagttatattactaggggaataatattcaaaggctaaactttcaaaacatattttacattaccattcctttattagcattaactcattccaaacaccccgttatattgtaatgagattatatatatatatgcttttttgaattagtggacgaatgaatgcgcttttgaatatatacagtataataagtgctattatattcttatatatattatatataatatagtactactatttatatagtccattacatgcatatggtagtctatttttatagatattatttatatggacacctgtcaagattttcatttgaacatttcaaagaaagcaaagccaatatttctttgaacttatccacactttcaataatccactcttctatatatatatactaggttatgtgccaagccacgtagtgttagttttatttaatattttagttttttattttaat

SEQ ID NO: 158240 - DNA, 876 bp, Cannabis sativa
  modified_base (466)..(470): a, c, t, g, unknown or other
tgcgactttcgactactttcaaattagccaaatcccctgtgaagcaaatatgcacgccgacgctttggtcggcttggggtcctcttcccacctccacattacgaggaaaatactatttaactttattccagaacctagtatttcagcagaggaagaaatcaagtgcgctgaaatcccggcggatacggacgaagactggagacgaccaatccttgaatacttgaaggatgataaattgccaacggaccccaagcaggcgagaaaaatcatagtaagggcatcaagatacactatacttcggaaccaattatataaaagatcttaccacgggccgtacttaaagtacataacgaagcaggagggtaagctaatattagcagaggtacatgaaggagaatgtgggagccacttcggcggacgagtgaccgcccaaagagtacagaggcaagggtactactggcccacnnnnnaggaggattcttcaactcactcacgaacgtgcgaaaagtgtcagaagcatgctccgtccatcctagccccccagcagaactgaccaccgtccaaagcccgtggccattcatgaaatgggggatggatatagtaggccccttgccaacagcaccagctcagaaaaaattcatgttggccctcaccgactatttctcaaaatggattgaagacgactcattcgctcaaataaaagacagagaagtagaagggtttgtctggaaaaacataatatgcaggttcggactgccccaggagattgtagcggataatggttcctagttcgtcagcagcaagttcagaagtttctgcgaacgatggaaaattaaactcatattctccacgccccgctatccgcagagcaatggg

SEQ ID NO: 158241 - DNA, 795 bp, Cannabis sativa
ctcacagaattaccgagaagatggtgatgggacacactcctttctcactagcatttggctcggaagtaatgctgcctacataagtgaacatatagactcacagaagagagtttaataatcaagaagagaccatgaacttctaaaattgtcattggacctacttgatgaaaaatgtgttgagtcccaaatcaccaacgcagcatatcaacaccgagttacaagatatttcaacaaaagaatcaagaaaagactattcaatgttggagacttggcgctaaggcgagtatttgaaaatacgagagatgcatatgcaaaagttttcaacccgaactgggagggtccatatgtcatcaaggcagtagttggaattggagtttacaaattggctcgacttaatagctcgctaataaagaactactggaacatggaacatttgtgaccctactaccaataaataaatgatgtaactcacattactgatgtacaattttaacttcaatcacgaataaagagaatccttcttatcatttaagtaattacaaagtttctcttttaaaattacttaaggggcatttatgtatgattaaccagaattcatctggaaatacatggtataatacaaacccaccatttcaaaaataaaaaaaaattaaatataaatataaaggttctcaactaaacctcttttacgaaagaggggtcaaactattaaaacttcctgaccaaacatttttgacgagagaggggtcgaactgttatagcatcctgatcaaacctttttgacgaagaagggat

SEQ ID NO: 158242 - DNA, 510 bp, Cannabis sativa
catggaagtatttattatttttgttccctgagtgaagccaatatttttttgatctttgtttctagtacaattcttgttgggcaaggatctcaaaataattggttttttcattcacaaaattttcaacatcagcaacattagttgaatttttgagcttcacaaggagttgtttgcttctaaaaattcgagactcgaaattgcctgtaagattgcgtccccaagcagtcaactgtttaccacataaatgatttcttagaaagaaaatttcccaagaaaattttcccgataatatgatgctgccgatttgaatgtcagacttcagagacaatttgagcacaaaatggctccctattccatgcattttcataccgaaatagcaccatatcagctccacacaccaaggtttcaggttcaagaaagataggagagtggttagaagaggaaaaagccaagttagtaagagatacctcattgaacatatccaaccaactttgagtgaccatggctctg

SEQ ID NO: 158243 - DNA, 593 bp, Cannabis sativa
ctttgactattcttatttttcttaatgagtttgattgtgtcttgataagatcagattaaatacactatttttggcaggtatcaagaccaaatacatgatcggacacgtttttagtaagtttccttttctgatctggtttgctccagcaaatcctatctctaatgctgcaaaacaagattttcatttagaaaagtttgtacaactgtagatttgactttgtggctgtctatagaatttctatattctataaatagaacctagagagcagccattcgaatcatctcttctagctttcattttttttgcattttctcattagtgaagagagagtactttttgtgagatcctagttgttcatctaggttctactattttaatatctgttcttatactggtcttagggttagttagaacattttgattgaacaagagaaaggtcttcgggagaagacgtgtgcaagccttacttcaggagaaagtaagcactcacacctcaaagacgaagggagttcgctatttgaagatggtcatgaaatcagattcagtgcattacaaaggattgcggcaataatttagagggagtctaaacttgt

SEQ ID NO: 158244 - DNA, 534 bp, Cannabis sativa
  modified_base (240)..(241): a, c, t, g, unknown or other
  modified_base (296)..(296): a, c, t, g, unknown or other
tcttccgtgtcagtgatgctaggttcttcgaggaactggataggatccaaattcgctctatcacttacattactactcgcaagccgagctaatgcggcaccagtcattttttcttcccttggaatttgtctgagagcgtagcttttgaattgtgcgagcaaatcgtgtattttgctcaaatatgctatcatcttttctccccgagcctcatattctccaaatacgtgatttactaccacnngtgaatcactgcagatttcaatatgttcgaccttcatctcccgggctagttttantccagcgatgaaagcttcatattcggcctcgttattggatgctttaaatccaaacttgactgtagcatgcaggtgtttccccctaggtgtgacaagggcgattcctgtgccggacagttgatctatagccgactcgtccacatgtaatttccaagtcagcttgtcttcactattacttggctgtagtatttgtactggctcgaggttgccttcggatatgctttcttccttgcctgtg

SEQ ID NO: 158245 - DNA, 611 bp, Cannabis sativa
tgcaagccagaattaatgaacaagatgaagagattcgacgcctgagacaacagggtgctcctgcaatccctgctctagaaatgcaagtaactcatgcccctgctgtgtacgctggaccagtcgctgtagtgatggaaccactgtatgaaaggttccacaagcaggcaccaccaatcttcctgggacgtcccgatgttatgaaagccaagcagtggctaacagttattactagaattctaaactttatgagcgtcaccagcaatgatagagtcgcctgtgccacattccagttccaagaagacgctctagtatggtgggacataatggtgtctgtaacgtcctaatgttaaggcacgctacagtgacttttcaattgcagtgctatctttgccaatcaaagaactttcttgaaaattgtgtcaaattaaaacttttatattacatattaaactttacataatcttttacaagtttcgggatcccgtttctaaatatttatacaaaatacacaaattacaaaaccaggtcgcacagcgactacaaaataacaaccccagatctcctgagaccaaacactccaggtcgcgccgccatgacatgtacaacctcat

SEQ ID NO: 158246 - DNA, 580 bp, Cannabis sativa
agggtgctcctgcagtgccggtgcagaagttcctgtggcacctgcccctgttgctcaggccaaaatagtagtagcgggaaatagaatggaatgcttgtatgaaaggttccgaaagcaggcacctccggtttttctgggagtcaaacatcatgaaagccgagcagtggctaacgatgatcacaagaatattgaactttatgggtgtcaccggtaatgacagggtggtgtgtgccacctttcagtttcaagaggatgccttagtgtggtgggacatggtatccaagattcaagacgtcacaactatgacctgggaaaggtttcaggagctcttcaacacgaaatactataatgaggccgttagaagtgccaagagaaaatagttcacacacctgacccagagagaaaatatgagtgtgacggaatacactacccagtttgatcggttggcgaggctagcctcaggaatcgtgcctaccgatttcactgatttcagtaagaaggaaaaatatcttgatggacttaatgtaaagatcaagcatgatctaatgatcactacagacgacaagaccacctatgctga

SEQ ID NO: 158247 - DNA, 516 bp, Cannabis sativa
tcgaaagcatccttggactggtttagaaagagcagctataacattaccatgatggtcccttactatcgctccacaccccagaatttttaagtctgtgtttacagcaacatcaacatttaatttgagaccacaatctggtggtggtgtctagggaaaagccttgaaactacgatctgaatgttggtggtctgcatgtacagcagtagaagtgctagctctttgatctgtagggggcatactcggatgaacatgtacagtttgttgctgaattggtgcagcagcagtggctgtactggtgcaggaaaagtgagaccggtttttagatctactccgagcatatttctccaagtgcgtgcttgcaaaagtggcaatggtgagacttgatctttggacacccccatgagttaccttattgcgctcatgccaaatagcccacatggtacatataatcaattcaaagtcatgttttgagtgaattgaagacaagtgaatgagataatcaccattgtgcatatt

SEQ ID NO: 158248 - DNA, 656 bp, Cannabis sativa
caaaactactttttgtgctaaatatagcacaatttttacatctcccattagagatgatcttagggccaatttagcacagtttttgcaaaagctaaaagctgcttctcaaaaaagttgtgacaaaaatgtgtttggtaagaagttaataaaaaacaacttattgaaaaatttatgaaaaaactacaactaaaagataatgctcgtagaactcaacttttggaaaaagtttttttttgattaaaacactataataaattattttttactaaaaatttatttaattatttattacatattacaaaaaaaaaaatatatatatattttttgaaggaaaaaatatgaaagtaaataatatttaaatttcaaattttttattttgttattaaaaatgttttatatttatttttatatttttattattaacaaacaatatcaatctatgttacttataaattacaattttttttacaattgacaaaaatataatttaataatattaaaaattatttttattaaatgactaataatttatactatagaaaaaaattattaaaaatacataaaaaataaaaattttatataacatattttatatatatatatttgtgattttaatgaaatagattaaaatattattattattataatagaatctt

SEQ ID NO: 158249 - DNA, 650 bp, Cannabis sativa
attacatacactatattatagtctaacagttggtatcagagctgtttttatctctgccttgattttggttgagtttcatatatatacacttatatagactgttcatatatacatatatttgttttcgttcggttggtgtatatatatatatatactcatattcatatattcccaaatatatatatgtatattttcacagtatatacatatatatatatatctttattcatactgttcatatatatattatatactcatacacgtacagtatatatatatttttcatcggtatatttacatatatgtatatatgtttatatatatatattgtacattatatatatgttttatcacataattatattcataatattcatttttatttatgcgatatatacatgcatatatatatataacataaatttgatcggtgtaaatttaattttttttgttttttattttatcggtgtttatttcgaattctatatatattgctatattcgtatagtattatagatcgatctaagcattgaaaatcttttgaaacttcgtgttattaaagtatatattttttcatgttttcgtgcataaaatctatgtggatctctttattatttgatttagaacattttacatttgaaaacacgcaa

SEQ ID NO: 158250 - DNA, 512 bp, Cannabis sativa
gatcaaaattacacatgattaatattgtagcaatccacaaacgacgacaacatcaaatcaggctattaagtattaaataaatgggataattatactatatactaaaatttttaatttttttacttttatacagtgggcggaatatttttcaaaaatactgtgtaagttttatactgagtactgtgttaagttttcacttttgttttattgttattttttagttgttccattgttgtttttagttgttctgttttgtgttttactgttttttgtaaaaacacagtatttttgaaaaaaattccataatagtaattttgtaaaagttaacttaaatttcagtatttttttttatatattttcctaaataaattgtagaatttttaattagtatatactatttcttttaaatattaatttaaattgttttcaaaaaaaaaaaaaaaaatattaatttaaatatagcaataaaaaattacctaaataatgagtttttatttttttttgaagaaaga

SEQ ID NO: 158251 - DNA, 633 bp, Cannabis sativa
  modified_base (160)..(169): a, c, t, g, unknown or other
atcgagactggagtgcggttctaggtcccgaccctggttctatgtccctagtgtggttccatgttttggtctgagttcaggttcgtgttcggttcatgagtccagttttgggttgggatccgggactggctcccaattcgggtctaggtctgatttggannnnnnnnnntggtccggttacggttctggatttaggtccaatttcagttatgattccaagtccaagtcctcgttccagtcctggtcaacttctagttttggttccaattttgggtcacagagtaggtgttcgggtcctgttttgggtttgggactgggttcaggttcgggtgtgggttcagatccttgtcagggttcgggtgtagggctgggtcccaaatctagataccgactacgggtttcgtaaaagccctgtgtccagatccggatcccaatctcgggtcccagtcaggttccatttctggtgccgcgtcacgagctgggttctatgttcaagttcgggtctaggtcgggtactaggtcctgaccctagttttttttcccaggtctctatcctgattgtaggtccaggtcccggttattgtgtgggtttgtgtcccggtcttggttcgggttcgagtcctagtctcgttt

SEQ ID NO: 158252 - DNA, 1019 bp, Cannabis sativa
ggctctcccagtccagcagaaattttatatttttatgaactcgtttctatccctaaaaagggaaataaactcaaggacagcttttacggtctccgggcccaccctttgaatgagggcccggttccttttaattattagaagcatgtgaaggaataccgtcaccgcttcttcttctcctccaggttccaggccgtggatcatccggagcttctcacggagtgagttaggatccccccttatatgcggaccgaacctactcaactttttctccaacgggccaagatcttcgccacgtatgacaagaaggcccttgatgtcggggagttggtcacaatggagcactgtcagaaggccaagctgatcctagggcatcagtcggtggatgactccaacctttccaaagtcgtctgcgcgaatgtgagggctccgggcgcagagaagatattccgggacgacatcatcgccacggcggaagataagtaccagaagtacctcttcaagagggaataggaggtggcttatattaaggcccaggcgaccgccggaagggcccttcgtattggggcgccggtggagcgaaggacccccagaccaaagcctgtggtcccagtaccgaatacgggggctcttgatgccagcactttgggttctggtaagtcccctttaacgatacattatgttccttccgtctgtgagtatgctagccttaggcctatagggttcgatgaacatctccataggctagtaatacgaagagcgtatggtgaatggtccagtcagaaaggggacggcccgctgtctagacttgtttaggatgccttccactcggtgggggaatcacgccaaggagtattatttctcccacttaggcaattatttaggccggtcccagatggtttctggacctccgatgcccattcctttggagccttcatcctatatgtcttgtacttggttccatccctcggacagctatctcggggatgatgaagccagtgctatgatccgggactttgcta

SEQ ID NO: 158253 - DNA, 533 bp, Cannabis sativa
tatatagatattttatataagaaaattttaattcaaatttaaaatatttaaattattgtaaatattgtaaatatttaatatacttagaatattgcattaactttgtagattacatttctcgcctactcattataatatttcttttacaacctcaactaccataatcacgcaaaagttattttggaaaaaaaaatcattcaaaggtttttttttttgtaaaatttatatatatctattctatataaaatgtgagtatgtaacagaatttttagtttagcaatatttttttatttccttcattaactttagtagaatattttattacttaacagaatatttttttatcaattttataatattattatatatttaaaaataaaaattatatagacattttatataagaaaattttaattcaaattttaaatacttacaatattgtaaatatttaaaatacttagaatattgcattaactttgtagattacatttctcacctaatcattataatatttcttttacaaccgcaactac

SEQ ID NO: 158254 - DNA, 507 bp, Cannabis sativa
ataaaaaaaagaatcgttaaaccaagaattgccgttaaataggcacttttaatatataaagatatatataattttttttttaaaatggctgcatcagtattttataactgactgtatatatatatatatatatatattattaatgttttatacatattttagcgctgtgtaatatatatattacagtataattaggtaattgtatattttggattaaataataaaattcaaattttggtgttggtttatatctaatatttgagtaaattaattgaaataatatgtcgctaaagtgacctcttttgtgtagattaatttatttaaatattagaatggttgtgtgtttgtaattaatgcatatattgacttacccaaaggtaagtgaatattttgcttaattttaaatatacatgtggcaataaatatgtgacaattataaggtattttgtgtgagcaatacgttagtccaaagattgacctattgtttgacacagttttattatcaat

SEQ ID NO: 158255 - DNA, 530 bp, Cannabis sativa
aaagaagccatgatcgaagatcctatattagccctgcctgatgtatgcaagccttttgaagtacagactgatgcgtcagattatggtttaggaggggtactcatgtaggagggccaccccgtgggatttgagagccgcaagctttccgaagcagaaaggcggtacactgcgcaagagaaagaactcctggcagttattcattgtttacggacatggagacattacttgtaagggtcgaggtttgtggtaaagacggacaatcatactgttagtcatttcctcacgcaaccaaaactgactcccaagcaggccagatggcaggaattcttggcagaattcgacttctactttgagcacaaggccagacatctcaatcaggtagctgatgcccttagtcgtaaagtagagttggcggcactgaaagtcttagcgggcatgtcaactagccaagtgggtacaccaatcaaggagcgcatcaaggagaacctggagaaggacctagttgtaaagaacattatgactctcgcaag

SEQ ID NO: 158256 - DNA, 802 bp, Cannabis sativa
tggacccaaacctagacctgggacccaaaactgaaacttgaaccagaacgtgaccaggaccctagaacaggaccgggaccgtgaccaggacctggacctagaccgcgatcgacacaaaaccagaacccaacctcgaaactcaggctcggacccagtcccagacccaaactaggactaagactcaaacctgaacccgaacccgaactcaggactcgatcccagacccaaaccaagcccctgacataaactaggattcagacctggacatggacacgaaccagacccggactcaaataccgacccatacccagactggcatcgtaacacgggaactggacccagacgtagacccagacccaaacctgggacccagatccaggacccaaacctggacacggaatcagacctagacccagaccgagatcagaaaaacgcgtcctcggactcgaactaagactcagaccttgacccaacctggacccagacccgaacctggaaccgaacccagacacagaatcagaactagaactatgactaggaccaaaagctaagacaagaaccgaacccaaacaataacccgaacttagactgagaccttgactaggactaggacctgagacctgggacccgaacctggacccagacccagatcgggacctagacctgacctggtcctaaaccctcgtcaggacctaaggcccgcaacccagaccaggatcgaaaccctgacaaggacctgaacctggaccaagactgggaccgagacctggacccgaatcaagaccgagacctggactaaaac

SEQ ID NO: 158257 - DNA, 538 bp, Cannabis sativa
ttagggttccatatggtctcccctctaaaattcgcgattccctttcattaaaatagagttttcagccaaaaaaacgagaaaagacgaggttatccttgacctgtacaaagtcggtgctacggcggccaatatcctcactgcggcggttatagaaaagtgcaaaaacgggctttctgtagtcccccgctgcagcggccaaaagccccgccgcggccactggaccaaattttttctacttcgacctcttttagaatgggaataactttgttatacaaactccaaatgagctgattcaaaatgcgttggaaagataaaaaaaagatctataacttttatgttttgactttgtccaaaatataaacaaaacatagtcgaattgaggcttgaagtttcagctttattctctttcaaaattttctctattttatagatcattgtttttcgaaatttgtccaatttacaccttccaagtatcgaaacctgaagccaaagaaaaaaaagcataattctattaaaaaataatattaaagaagaaaaa

SEQ ID NO: 158258 - DNA, 669 bp, Cannabis sativa
ttcttgattataaaactctcgtctgtgagtcgatatgttcacttcaataggtagcattgcttccaagccaaatgctagtgagaagtgagtgtgtcccgttgctatcttctcggtagttctgtgagcccaaagtacttgtggtagctcatcgacccacctgcctttggcagcatataacttcttcttgatagtatccttgaaggttttattaacaacttccacttgtccattcgcctcaggtctagatactaacgagaagctcttaattattttgttcctttcgcagaactcagtgaacatgtcgccatcaaactggattctgttatcagatactatcttcatggaaattctaaacctacagacaatgttcttgacaacaaagtcgaggattttctagtaggttatggaaacaagaggctcagcctcagtccatttagtgaagaagtcaacggctaccactgcgtacttggctcctcctcgccctgtgtgtaatgccccaattaggtcaattcccatacatttaatgggtagggcaagggcatcatccttagttccgttggtggtactcaagttatatgtgaaaacctttgacacttatcacactttttgacaaactcatgggtgtccttattgatcgttggccaataatatccttgtctaatgatcttt

SEQ ID NO: 158259 - DNA, 652 bp, Cannabis sativa
gaaaatactgaacaataatatctttcaatccattatcccaagtagcccataacccatcagctttttgtagttgatgaatgttgttggttcttttccttgaactagccatggcatgaaaaaacttggaatttttatcaccaatatgaagccaaaattgctttgatcgttgcttccaatataattcttgttgggcaaggatctcaaaataattattttgctcttgacaaaaatcatgtatagagttgggatcggttttaccttttagagcaaaaagattggccttgctttttttgattttctgcttaaagttgcatgtgagactccttccccaatcggctaacaagaggctgcattgctttatttttcctaaaatgaagcatgggaaaagtcctcccaataagattgaacaatttggctatagagaggctcacgtgtccatgcattttcaaacttaaaatgatacacaaaattggttatagcagtcggctcaggctgaaggtatatgggcgtatgatcggaagaagaaacatcacaattggttaaaacagcttgtgggaaagaatcaagccaaagctgagacacaagtgctttatccaacctgatttcaacccagttagccgtgcctttccctctttcccaagtgtaagggtgg

SEQ ID NO: 158260 - DNA, 507 bp, Cannabis sativa
gaagtaccccgacctaccttgctttggggtggagttcaaatcaaagaaccaggcaacttcgtgaggacaaggagtaccccactcctgggaagcgtagaggacgaagagggcagagagatacttaatacctttagaagtgaattgggccgggcaaaggccgaagaagtctgccacattcttgaagtattgatgcaaaggcatcaatgccccttggtggccatgggcacccaaccaggcacacatccccttttcagggtttgtggcacgattcttgtgcgcgggaatgcaacaatccagttcgcccaagtatccaccctggtcgagagttcgaaggcatgcctcagtaaccctggacagagggcttacccacctggcacccaaggcagcctgccttctatgaggaaccgcggcagtaacttcctcagtgacgtagtccacacccttaaccaggacgtctccgtcagcatcgactggctccccagcctcattgtactccccgtagtttgg

SEQ ID NO: 158261 - DNA, 609 bp, Cannabis sativa
  modified_base (26)..(48): a, c, t, g, unknown or other
  modified_base (93)..(115): a, c, t, g, unknown or other
ttctccaaatgcaagtaaactatgtnnnnnnnnnnnnnnnnnnnnnnncccagtgttctgataaatctagaatctttattcacatagtcatgnnnnnnnnnnnnnnnnnnnnnnncacaataaacatgatcaagtatatttaaattgtctccccttagaagataataatttaaattgtctgaaagaaaagagactgtaaataaaaaagaaaaaaaatagttgtaaatggtgaaattggttggactgctcggcctattcaatacgaggaggaagacgagggccccggtgctcttcgagcaaagcatcaagcctcctcttcttctcccggaacttagcaaggtcttcctcgggtttgggataaaagtcaagcttgatgctctgaccgtttgagtgtcaggccatatagacgccgtcatcaaagcgcttgacgcaatgcttccagacaactggggtcaggagctcatctcttttggcctttttcaaggcccgatcttttaaatcccttagctccttcacgtccacagtcaggttggccgtcgactgcaagtccgcctgatgcaactcctctaaggactttaacttagtagccatttcgtccatagcctccct

SEQ ID NO: 158262 - DNA, 660 bp, Cannabis sativa
tttatgcctttattttgaaagcagttgagacttttgataaacaaatgctatgtattttcttttgcttcctctggatggtgtggtcacagagaaataattacttgcatcatcatagatgcttgtccccaatgttcatatttgatcatgcagttcttatttgcaggattttgagtctgccaatcttaaagcagcaggtttatgtaatgtgcaacggacttcaatcaggccctcttagctacaagattaatactgatgctgcactcgatcccaatcggaaaaagcatagtcttggtgtagtggtgacagatgctcaagatcaggtggtagctggcgttattgctccgttgacaggaactgtgcctcctgatgttgcagaagccaaagctcttcttctagctttagaatgggctcaaagtgttcatctccctgttgatattgtggaatctgactgcaagggtttagtggataaagttaatgggtcttttagtaactattctgttttgagtgattttgtaactcggattagacacttgctatcggtcagtcctacctgtactcttcattttgtgcctcgtgagttcaataaattggctcacaattgtgctagggcagggttaggattagatggtgagtattgttggaatggctgtttgccttcct

SEQ ID NO: 158263 - DNA, 717 bp, Cannabis sativa
accacccccatgaaattcaatattcgctcaatcaccgtgagccactcctcagccttcatcacatctggacctcccagaaacagtggaggtgctttcttacggaaccttttgtataacagctccatacgattgccaacaataggttgttctgctggcaccgctggagctacaatggcctaagcttgttgtggaggcacgacaggaagaccctgctgccttaatctggaaatttctatttgatcttgcatctgcgcaaacctctgctcccaatccggaggagcttgtggtggatttacaggacgaccaccctaaactctgccacgaccatggctgtgaccacggggattctggggaattttatttccctaaccgccttcggtctcaaccatattaccctgacttcttgtatttcactgggcatctattttataggacttagcctgcgaacccataagccaggttagtcagacagtaatcataaaacttaataccgcgcttatggattttgaggcaacacacttaaataaacaaccgtaatgtaatatgcttcctaacatgctttaataatcacatataatactaaacaagtacgggcttattgaaccatgaaccaggctttctctgatgaagattctacatgtcttggcaagcttcggttcaaacttggcatctctgatactgaaattgtaacgccttaatgctaaggcacgctacagt

SEQ ID NO: 158264 - DNA, 541 bp, Cannabis sativa
tttttagaaatttaattttttaggcattgattaaggtgttgtgggttgtaaattattttgatgtaatattaaggtgttataaattattttgaagtaatgtaaaattaattttcaatttataaatttaggtttctttcaatttcaattgaagaatttagtttgatgataaaagcttagagcactcacatcagcttatgtactctatcttctaaaatagctcaccaaaactcttttttttttattattttatcttaaactttcacattacatcatacatcaatttttttattttttttatacattcatttaaatatccctatatatataaagtacataataataaaatattattaaaatattgtttaaaaaataaatagtatttctctacatgtagagaaagtattataacattctttaaaatttgagctaaaataacttaatagaactagtgttgttcaaaaaaattaacaaaccgtccaaaccaaaccgaataaactgacaaaaaatataatccgaataactttacgaaaaaatcaaatcg

SEQ ID NO: 158265 - DNA, 708 bp, Cannabis sativa
  modified_base (659)..(674): a, c, t, g, unknown or other
ctggaagatcaaggtgtgagttttttcatcccgttccaaggatacaacatacgaaaaaaatcaaggataccctagtaggcttcaagaagtaaatgttattttcatatatttactttcaatttaatatatatacatatggtgatcttgggaatatggtacaattataataaaaaataactcttctgctgcgtacttgatttagtaccataaaatcaacgatttgtatcatagcaattccattatatatattaaatattgtgtgggttttatgtatttatatatatgtgtgtgatatacactgtgaatggatggtaatgatattgtgaatgtatttgttgatataaatcattaattttttagtaaaattatatgtaggctttgctcttattttttaaaaaataatataagacattaaagggtatagaaatttttttatgtaaatttatttttatgtaaaaacactacaagaattttccatattaccggcggagacatccgtcggtattaattacataaactgccagtattaattattaccagcggaatccgctggtattaattggtcgctattcatgagtattaccggccaaaatagacttccgtaggtaataatattaatatcggtggattaatagcggtggggtccgctggtattaatnnnnnnnnnnnnnnnngctgacacattaatatcggcggaccacatttagt

SEQ ID NO: 158266 - DNA, 532 bp, Cannabis sativa
gtgatgatgaggtcaaagatgcagatttccagatgcaccccgataagtctccaggccctgatggtatgaatcctaaattttttcaaaaatattggtctattgttggtaacgatgtgatcaatacagttcgagtcttctttcgtaatgagtacatgccgactgggatgaacgacaccaacattgttctcattcctaagaagaagaaacctgataggatgagtgaactgcgtcctatatccctttgtaatgttattgctaaggtcattactaaagttttggctaatagaatgaagggattattatctgaggttatatctttgaatcaaagtgctttcatccctggaagattaattacagataatatcatggttagttttgaagtcttgcactatttgaaaaggaagcaagttggcaaggatggctacatggcgctgaaactggatttaagtaaggcttatgacagagttgattggcactttttatgtgctatgttgagacgaatgggctttgctgataaatgggttcgccttat

SEQ ID NO: 158267 - DNA, 626 bp, Cannabis sativa
  modified_base (27)..(63): a, c, t, g, unknown or other
gttaacataaatcacttcaaaattctnnnnnnnnnnnnnnnnnnnnnnnnnnnnnnnnnnnnnagggcacaaaacccaacacaaagcccctctccaaagcaactggtattggaggaagttagttgaactcaagaatgagctcaaaaactaaattgatcctgctatctttatcaataataaatatatgattgctgcaggttacaaaatgtacaatcaggctgaaaaccattaccattggagcaaacatgcttggaatagactcaatattcccaagcattattttgtggtgtggattgctttgctgaatagacttaaaacaaaggataggttgctcaaatatcatattgtatcagatgatagatgtttgtcctgtcatggaattctgaaaatgttgagcacttgttctttgaatgctctttttcacaggaatgcatacatcttttagagcagtggtttggttagaagatggccctcactccactacaggggctacttcggaaattggacagattaagggacgcaaatttcgaaagagagtgattatagctggtatagcagcattggtgtacaatatttagctgaccagaaatgatgtattgtggaatgagggggctgctagtgtccaa

SEQ ID NO: 158268 - DNA, 764 bp, Cannabis sativa
agggtgtgaaacaagatttaatcggcttgatcgaaatgaagatgcaccttctgtctctcgctatctctcatttttaattctcaatctcatcctttgactagcggaactatcaagcctcttgatcatattagtcgtaaaaaattgagtggtacattcttcaaaattcttctgaaattcaagcttatttagagtaagtttgttacattcctataaattattttattaaatttttagttttttgtctctcttttcgtctatcgtaccttgacattatcatacttcacagtgaacatttggagaagatcaggcataaatatcctaatggtaaccacgatgttttgcataggcaaactttccgtccgtggtttcataagaaggtatgatgacaatattttaaagttttaattcaaaaatctatattcctctcatattaatacattttatgtgtttagatatatgagttgcacaagcttggaactttacaaaatggtgatgagttactcgctctagcttcaggctccgattacttagcaaccttttacgaaggttgtgtagtgaatggtgttcggtttattgcgtctaaaagagataaaacccgaaagacacaaaatagtggtgttactgttgctggaattgaagggtttaattactacgggacacttgaagatgtaatcactatatcttatactggtgcatatacagtgacattgtttgaatgtaaatggtataacactaatcctataagaaagaagacaatcactgaa

SEQ ID NO: 158269 - DNA, 554 bp, Cannabis sativa
ggatatcttcaggctatgcttgaaagaatgggcttcgatggcattgtgtgggcactgtctcgtacacgatctctcatggggaaaaagagttgggctctattgttgcacaaagggggttgcgccagggtgatcttttatcgccatatttgtttattctctgtgtcgagggtttctctagtttgttgcgcagttatgagcagagtggattaattacacggtgtaaattttctagaagagctcctactatttcacatacgttatttgcagatgatagttacatctattataaagtaacataggaggaagctcataattttaaagagttactgtatacgtatgagattgcttctagccaaaagatcaatttttcaaagttgtcagtgttctacagtcacagcactagtacctcttaaagggatatcatttgtgagttgttagaaatttatgaggctgatgagaataggtcgtatttgggacttccatattcggtgggaaagaataaaaatgttatccttggttttcttaaagataaaataaaaaagaaaattcaagga

SEQ ID NO: 158270 - DNA, 636 bp, Cannabis sativa
ttccattgaggtacatggaagtttgacaatggaggatacccatttcggatttaccatttttggtatattattttgtgttttttaaattatatgggtattgtaaaataatagagggttgaaaatggaacaaaacccgtcaaacgacgtcggatttggtggtcaaaggtggtatatccgaccgggtcacgaaccgggtcgcgccgatccggcttgcagacccgcggatccgtgtgtgggttttttgggtgaaagggacgacagaaaacgacatgtcgtttgccactgtcgggcaaaaacgacatttggttcagcccccaccgagcaaacatgatgagtcgttttattgggccttttggatgtcgttcgtggcaaacgacatgtcgttttccaaaaacgacatgtcgtacatacagaatctcagccctttgcagcgaaaaacgacgggtcgtttatgacccagctgcatgtcattttcaccaaacgacatgtcgtttttcataaacgacacgtcgtacgttagttaaaaaaaaggaaggagcatgggggcacgtgcaaggtcaaattttggaccatttttcaccaatttgtttcatttttagcattctatcattcccacatcttaattttatgcataat

SEQ ID NO: 158271 - DNA, 568 bp, Cannabis sativa
tgtaccctctgggatcacttgtgaggatcggccatagcaggctatagggttcccctagtttggattggtaagaagctcctcagccctggaatcgatcgtttccgactctggttgaggcttaaagtctgcaggaacaaatagaaaatggttggtgcatctggatataatgagtctggaaggataaacttctaagctcagaagagacattttggcaggaagggagtaatccattctgaaaatggatttcactaaagagctagaaggtttgtgaaaaatgacaagcttgagccccccttttatacacgaagttcagtgacaaaaaagccaaggattgagaaatctaacggctgggaatcgtgcagaatatgaataggcgattcataatgatcttcaaaaccatacaaccgccagaatcaaaggaggtgtcctttccaagaaaggattttggcaaaaatgccctccataattattaaaaagctcttttttttagataaaaaaaaagaaagaactttttgaggggcaattgttatacccgaaattcggctggaggacaatagtcaaggtaaag

SEQ ID NO: 158272 - DNA, 562 bp, Cannabis sativa
  modified_base (318)..(327): a, c, t, g, unknown or other
acccagacctagacctgggacccaaaattagaacttaacaaaaatcggagaaccaggaccctagaacaagactacgactatgaccaggacccggacacagacttagaacggaactcaagcccggacacggtcgtgtacccagacccgaactgagacccggacctggacctaaatttaggacccgttcccaaacacagaattggacctagatagggaactggatacgaacctggactcggaccaagaccaagactgggaacgaaatggtggacctagatctagaccgagatcctaacctagacccaaacttggacccgnnnnnnnnnnccgaacttggacctagacccgaacctagacacagatcggggtccagaccaggacacatacccggacacagactcggaccccaactcaaactcacacgtagaatcagagccaaagctagacctggacacggacccaaactcgaacccatagaaaaattagaagaagggacttagacccaaaactgaatccagactcagatcggtattggaacttaggactcggacccaacctagac

SEQ ID NO: 158273 - DNA, 668 bp, Cannabis sativa
  modified_base (29)..(32): a, c, t, g, unknown or other
attattaagtaaatctgattatatgaaannnnttttatttagggcataaaacgcaacaaggggtatctttgttggggcatattgttggaaaagatgaaattattattgacccgagtaagattgaatcagtgaagaattggctgaggccaaaatctgtgacagaagttcgaagttttctcggtttagcaagatattatcaacattttgtcgaaggattctctaagatttctatgccactaaccgagtgaaccaaaaagaatcagtgatttatatggtcagaaaaatgtgaagtaagtttctaggagttgaaacaacgattggtaaccgcaccagtgttagctttgccatcagatcgagaaaagtttattgtttactgtgatgcatctagacaaggtctgggatgtgttctgatgcaagcagacaaagttatagcctatgcctcccgtcaattgaaagattatgagcagcgctacccaacacatgactttgagcttgatgctgtagtatttgctctaaaaatatggcgacactatctttattgtgaaaaatgcaagctttacactaaccataagagtgtcaagtactttttcacccagaaagatctaaataggaggcagagaaggtggctggaactggttaaggattacaattgtgagattttatatcac

SEQ ID NO: 158274 - DNA, 662 bp, Cannabis sativa
  modified_base (58)..(79): a, c, t, g, unknown or other
ggaaggagttattatattccgctagacctaatgtatggtttcctaaactttatatgtnnnnnnnnnnnnnnnnnnnnnntcatattaagatgttaatgaaacatacatggtagtaaatctagattctgctaaagtattatcaacatttacatgggcactcagtcgctagctccgtacaacaagcccgtgcccatgaagaaagatgtcagcaagagagacatgacaaagttttgtcgtttccacgcagactacgaccacgacactaacgaatgcaacaacctgaagcaggaaattgaattcctgataaggaaaaacaacccacacttacagaagtatgtcaagaccgatcagaattagaggaacgacaataaccaagacttgctacctccaccgatagatggacatctaaaactcactattgggggcccacacatagctggagattcgggcaaagctcgggagaggtatgcccgaatggcgcaacacaagcaagaggaagttatcctggctgtagaagaaaggaagccaaaattccacgagtaggagggcctaccataaccttcagcgacaaaggtgctgtcaaaatcaggtttccacaaaacgacccgttggttgtagaggtccaaattgctaataagatggtggctagaaccatgattgat

SEQ ID NO: 158275 - DNA, 538 bp, Cannabis sativa
gtaccatggtaacttagtgacggcatagagatgttcatcagggaagtcatctcgaattgcagggccatcagcagaatcagaaaattcaaggcgagataggtggtccgttaccacattttcaactcctttcttgtccttgatggtcaagtcaaattcttgtaatagaaggatccacctaattaagcgtgccttagcatcctttttggaaaggaggtacttaagggcagaatggtcggtgaagaccgtgataggggaaccgatcagataggaacgaaacttatcaagtgcaaatactacggcaagtaactctttctcagttgtagaatagttcatttgagcactattaagagttctacttgcatagtatacgacgaagggcttcccttcccttcgctgaccaaggatggctcctattgcataattgcttgcatcacacgtgatctcgaatggcaagttccaatcaggtggttgaatgataggggcagaagtgagtttggtgacaagtgtttggaaggattcctcacactcgggtgtccag

SEQ ID NO: 158276 - DNA, 912 bp, Cannabis sativa
  modified_base (272)..(273): a, c, t, g, unknown or other
aaataattaattttcaacttaaatctaattttctataaatatatatatatatatctaattaaatttgaaattgaatatatttaaaaatatatttttgaattctatgaaaataaaataaaataaaactataaaaattattctaatttataacaatctaaaattaactaagaaaaattaatttttaacataattgaattttgtctatttaattaaatctcttaagaaaaatatataatatttaagtgtcttgaacaaatcaacttaaatattanntttttatttaattaaatatatctaaaaaataccataagtctacttaaaaaataaccatctagatatttcacaaactaattattgcttttctaattaaaatataatatattttattctaattgcttgaactaatcattattgaaaatattacttgatttaagttgatataaaattaattaacaaattaattttcaacttaatctaattttaaaattgaaaattttcaaaatatctacatttgaaataaatttatttcgaaatttacataaaaaatgattattaaaataaaatatattctgaaaattattttaatttaagttgatctgaaatttaaaaatttctagcttaaatataatattctatttaattaaatttattaaaatagaaacaaataattaagtatcttgaataaaattaatttaattattaattctaatttaatattttagaaaaatattttaatttaagttagtctaaaattaattaataaattaaatttcaacttaaatatattttactatttcattaaatttctttaaatagaaataaataattaagtacctgaatcaaatcaacttaaatatttattctaatttaagttctaagaaaaatatcctaatttaaattggtctaaaatta

SEQ ID NO: 158277 - DNA, 655 bp, Cannabis sativa
  modified_base (27)..(31): a, c, t, g, unknown or other
  modified_base (554)..(555): a, c, t, g, unknown or other
taaatcatgctccccagactttaatannnnncaaatcatgcccctcaaattttaatatgtactaaattatgccctctgagctttcattcatgttaattttttttactaaaattagacaaaagtccttaaatataacaatctcaatagttcaataggaatttttaatggccaaaaaaattcaagaggcataatttagtacatgtcaaaattcggtggaaaaaaatcctaattagccttaaaaaattaaaaacaaaaattaaggcacaagagaacaaaataactttaccaaatctatatctcacactagctcataataaattaattaatagaccatggaatgctaatttaacaagggtagttagatgtgtgcaaaaattaatatcatgtcttacatatatttaaattccaattaactttaaattaaaatatataaaatttgttactaattagttgtgcaaactatcatatgtcgagcagaaatattttaatagggatttttttaagaaaaaattaagtctttacatatatatttattcactacaaaaaatcttacnnttagtcacaacaaaatttataattaaaagtaaaaaatctgtgactaattataaaatatcattcttatgttgtgactaaaaagtccgtggctaaatgtatt

SEQ ID NO: 158278 - DNA, 527 bp, Cannabis sativa
agggtgattgagaggattgagagggattgagttagagattgagagagattgatagagggtttgagagaatcggagagggtgagagaatgggctgagaggtttttttttttcagagaatgcaaaaataaaaatggggaagaagggggggcttcgtgcagctctggttcatatatacacttttaccggcgcaattggatgcgccggtaaaagttcttttaaaaatttgacttaagtcaaaacgcgcgtttcatttacaccttttaccggcgcacttgtgcgccggtaaaagtatccccacttgccacgtcaaaatccacgcgtttcatttacaacttttaccggcgcaatggtgcgccggtaaaagtatccccacctaccaaggaaatccacgcgagaagttttcctctcttttttagggacttttaccggggcatatatctgccggtaaaagtgtacaagcgccagaataaatgaaatgaaaggcggcaaacttttcgcgcctattggcgcttcatttcatccctttt

SEQ ID NO: 158279 - DNA, 604 bp, Cannabis sativa
tgggaattctgaaactgttgagcacttgttctttgaatgctctttttcacaggaatgcatacatcttttagagcagtggtttggttggaagatgaccctcactacactacaggggctgcttcggaaattggacagagttaagggaagcaaattttgaaagagagtgattatggctggtatagcagcattggtgtacaatatttggctgactagaaatgatgtattgtgaaatgagggggctgctagtgtccaaaacatttttcagcaaacaaagtggcaagttaagaatataaatttttttgttatgccaaaaaatgtaaagaaagaagaagttgaatggtttgagaagttgtaagtaatagtggaaattgtatataatcatataacatctcttgatggtcattaggtgtaaaaattgtttgtgtggaatgaaagtctgattcataaaaaaatgcctaaaataccctttattatataaaaggtattatatgtttaattcctttaatagaaattatgaaaaatgatacagagtttgatcaaaacctctctactgaatttttgtcaactatttttttattatataaaaggtattatatgttttatt

SEQ ID NO: 158280 - DNA, 620 bp, Cannabis sativa
attcaaggttgggagggtcgtatattgtctcgtgcggggaaggaggtcttgttgaaatttgtagctcaagccttaccaaattatgccatgaatatttttcatttgcctttggaaacttataaggagttagaaagacttatggctaagtttttgtggcattcagattctagtagtgggaagggtataaactggatgaggtgggataggttgtgtcgtcataagcatgcagggggattgggtttgagatgtttgagagtctttaatttagcttttctagggaagcaattttggcgtcttttggttgtgacagttcgttggtcagtagatttgtaaggcaaagtagtatgcacatggtagtttattctcaactgagttgggagataacccaagctttaggcgaagcatcatggaagccaaaagcctgatatactcaggagctcaaagaactattgctaatggggagaatgtctcaattcttgatgacccttggctccctcatcacactaatggcttttttgaaacaaggcatcctgcccttattaataaaactgttagttgtctatttcagatggattctcgggcctgggatgaagatatggtaagagatctctttgtggctc

SEQ ID NO: 158281 - DNA, 539 bp, Cannabis sativa
caagtagagctttaaatgctgtccgttaactttgaaagttgctggactttcaccttttaattccacagctccatagggaaataccttgaccacggtaaatcgtcctgaccaccttgacttcaacttttcgggaaacaacttcaaccttgatttgaatagtaacacttgctgcccaggttgaaactccttccttactaagccttggtcatgccacttcttagttctctccttgtagaattttgcattctcataggcctcattacaaaactcctctagttctttcaattgcagtagtcttttctctcctacagcttttaattccatgttgagagtcttcatggccctgaaagctttatgttctaattccaccggcagatgacaagcctttccaaataccaaccgatatggtgacatggaaatcggtgttttaaaagctgttctatatgcccacaatgcgtcatctaactttcttgaccaatctttccttgatctctgcactgttttctctagaatcgtctttatctcccgattagaaattt

SEQ ID NO: 158282 - DNA, 1186 bp, Cannabis sativa
  modified_base (493)..(496): a, c, t, g, unknown or other
tcgctattgagatcactggaaccaagcttctatcgagacaactccaaagacaattattaaagacgtgtttgatacacgatcattttgacccagttaaagcgggaaaatcatagctatataattttcaaatcataaccgcatttacactacgtgatatgtaatcgaaccccgtgattttaggggatgatcattgtaaacatattacaatcaatcttgtaattaactgcctaccatgtcattataaatagtggcaaataatatcaaaaaggggaggaaaaaactccacaagaggagccctgaaaaactatcagaaatctaaataagattgactcgtggactatgtagaattataactgcaaaaccacgtaaaaaaccccgtgttcatatttttattattacgaattttattttttctgtgtgaaatcactattgtgagactcaaatttggttaacgaaaatctgcgttaagagtttggtgctttcattgagagcnnnngtgaaaaagctcagaaaaactctcccttcttttgaagaaaaaccacctccttcatggctaaaaatccagaaaacgttaacaccccacatgaggaaactaatcatcgttctgggaaagagcccatgggcttcagaaggtccaccaacccgcggtcgagacggaccaccggttccaagaggactcaacctgagggtggccctagtacacggactcacgttcctagaaagcccaacccgacgttggtcctagtacacgcacaacacgctcgaggagaactcagtgtgggagtggctagaaccccgagatgagagatgaagagctcaatcgtgggggtgcccagtctatgggagaaggtacttatgaaacgaaaaaccgccgcctgagacgccgtctagaagaggtgcaacgtcgaaatgctgagttagagcgtgatgcggcctcagccagggtggcacaggggatgaatgttcaaaatcaacctgaacctggagtgagaagaccaccaagcagacctcgtggctcacgaacaaggagacaggaataacccaggcagaacaaaccagggaaaatgagataccccctaataataagaatgaacagccagatgggagacaatcggacactgatgaacgagaaatccctcatggcaatgaggaggaactgttggaaatgttttaccaggatctagat

SEQ ID NO: 158283 - DNA, 595 bp, Cannabis sativa
  modified_base (155)..(156): a, c, t, g, unknown or other
  modified_base (380)..(394): a, c, t, g, unknown or other
gtcgtcttctcaggtgaagtcactggaattaatggtggttctcttttcggttgaattttcatttcgattgcgttcggttgttgcatggttgggcaatggttgcgcgatagttgcccaggaagcatggatcatgggttgaaggtgtgtgtaagtgnnatttgtgtaattttttttatttggtctgtatatttgtttatttggccaggtgaaaatatttttgtaatattattatttttttggttaaaactgaaaaaaaaaactcatatatatatatattctatataaagtgtagctatgtaacagaattggtttaacgatgtttttacgttaactttaatagaatatcctattagttaacagaatattctttattaattttnnnnnnnnnnnnnnnatatttaaaaataaaaattatatacatattttatataaagaaatttaaatttaaatttaaaatacttaaaatgttgaagtgtaataatgaaaaatccttatttttaatcatatttttaaatttattggtttaatttggaattaaaataaaaaaaaaaattatataaatattttctataaagaaatttaaatttaaaatatt

SEQ ID NO: 158284 - DNA, 528 bp, Cannabis sativa
gaatcgtctaatttcgagcaatatcgagagagttatgatcaaaatattatcagtcgacgcagtagaaaactcactgccccttctaatcctaagtagaataggtattttcagcgtttttttaatttttttttatcattttttggctataaaataagtggacttcaatagttttcaagggagcagttcagtagaaaatcaaaagcaatcaaggagtacgaattttagagagcaaaatcaatattgaaggctttctcaatagagttttcaacattcttttcttctctattctaaaattaatatgtgtaaatttgctacaatgaacatgagtagctaaatagttcattagggtctagatagagattgtttgatattaatttatgattttaatatgattcaatgttccctcaatttttatatattttatttcattcgtacttaattacttttaattgcctggccatcaattaattgctttatgattttgatgcgagatctgagaagtgagtgtcaattatgctatagtgaaat

SEQ ID NO: 158285 - DNA, 500 bp, Cannabis sativa
gaggattgttgggtgtacatccaaagtcccacattggctagaaatgggaaggatcttgggtatataaggatgaacactatctccattggaatgagtccttttgggaaggtgcacaaaaacaaatccgtgagggcttagacccaaagcggacaatatcataccaatggagaaatatatggtgttcgacggtccttacaaaaggcacattgactttgagctaattgttgttaaaatgaagtttagagtaataaggtatctatagaacatactaaggataaactctatattttatgtgatccgaatcactaaggatataccacttaaggcttttcaggagcttattgctcatatatggatgtggtattatttaagattgtgttggtttagtgggagtttgtatttcaggtgttctatcaagctgacacatatttatggtttaattctacagataaagtatgaacttaagttttgagtactctgaatattttctttctattaag

SEQ ID NO: 158286 - DNA, 515 bp, Cannabis sativa
ttttaaatatatatataataatattataaaattaataaagaatattatattaattaattgggatattttattaaagttaaataaaaaatcaagaattatattacatagcaacattttatgtagaatgaatatatggattagttaacaagtttctaataattttaaaaagtcaatttgttgaggtggcataatagaatattcaattttatattgaatttaatttaagatttttttttgccataagtaatggtgattctactcaatgaaaaataagctctctttctaatatattgactttatattaccaatataaaatttaaatttgttaatatttttattacatgctcataaattaataccattaattataatttaaggtggaaagttttaacggtaatttaatatttattaaaagcttgtttggaacgtcattttagctcgtattatattaaattagattatacatcatatttttatattatactattgtctctgattttgcccaaaatacgtgg

SEQ ID NO: 158287 - DNA, 861 bp, Cannabis sativa
gtattttgttatagaatactatcactttttgttaaacatggttttcactttttgtcgacattaccatattcaatttatcaacgaaaaaatggacaatccagacagggccatctcaaggtgttgagaggcctagggcgaaatttgaaatgaggcttttttttttacaaaaatttaaataaatattatttaaattttggcacaatatcgattttaactattttatctctatataacaaataattttcttgccacgtaaattaactcgataatgtaatatttaattactaataacatctctattggagtactatatattttggcacttttgttaaaaaaaaaatagtatatcaaaaattatgttaattttttgttactagtttgtatcttgaaatgctactgtactttatatattagagtaatttcattaaaaaaaattatactaaatataatattttctctaatttttgtaccaatttgtaccttaaaatactattgtacattatatattaaagtaatttaataaaaaaatatacaaaatataatatttggtccaaaatattatattcttattttaaataaataaataaaataaaccttacaaatttaaactaattcttcactatttatttgttcttatatgtatgtattatgtaaaacacaaaaaatggactcgacaaagaatcgaaccaagcacctcaacaatctcatcaactttctacttccttatttactatttgtgctacagccttttcatgacttttgttgaactaaaagttatatattatattattttgtgtgtatatatatcaatttaatttttcgggggcctccaaaatggtggggcctggggcctatgccccg

SEQ ID NO: 158288 - DNA, 1153 bp, Cannabis sativa
gagccaaacaattataacctgatcgagcaaaaaaaaaaacaaataaaaaaattctttaacaatatatatatataatatataaatagtagtaaattcttattgagaataaaatccaactaaataaataagtatatttagaaaacctaattatagatgtacaacagtaaaaacttaatcatatttttttttttttggatgtaatgggatttattttattatatatagttaaaaagtgacatttctcataaacccttttatttttaatataaataaaaagtcattcataaatttcttataaactaaaaattctgttatacagggacactttatatagaatagatatatatgtaaatattattatttctcaagataagaaacgaattttaccaattaatactgcatgcatgtttgtttgtttttattcaaatcaaacatgtgtgcaaatgtcgaacgtttcgttaattttatttttatttttgttgttggattgaacagcacacattgaaatttgaagaaggattcgattttatatatgcaatatttatatgcttcacattttgattctttgattaatggtcccaccaagccttttattttaatagcccatctcttaattaattaagtagtttttggaatttagtatatatcttgggaatttctcattcaggaaaagatctattgcgtttttttctttttttatttagtatatttaaggtggttcataatataagaaatacttataaacgtgtacagttacgccactgaaaatgaaaattgtatgggtaattctgtagtagagagtgcttatcgtagatattattaatcatatattatgtatattataactatataattctttactctagaattttatactttagctacatatgttatataataatgcttccatggtataatagtatatatgcggctcagatatgtttaaatacttgaaattaataaagttagctataatatgacagcattaactacaaatgtatttatctaattaattactagaaagttaatctataactactataaaaatgagaatattgttttgggcttccacatattaaattactaaaaagtcctcacttctcacctttaatttattatgttgagattaatcatatacaaaatatgtggtgat

SEQ ID NO: 158289 - DNA, 510 bp, Cannabis sativa
gaatatcaggaagagaatgtgagatactgatagagaagatgactgccacaattaggagttggagttcgaggaacttgtcttttgcagagagaacagttttgataaattttgtcctaatggcgattcaagcatactggagtcaaattcttatcttaccaaagagaataattagaggcactgaagcagttttcatagcttatctttggaaagggcaatcaatgtttcagggagctggagcaatcaattgagacatggtttgcactctaaaatcagcaagggctttaggtatcaaaagagttgaagaatagaacaaaacagctatgtgtaaatatgtttgggcaatcacgaataacaaggagagtttgtggatgaagtgggttcatagtgtgtatttgaaggaaggggattgatggagctacactccttctatacatgctagttggtattggaagaagttggtggctctaaaggatcaagtgaggagtttgatagatacaagagagtttgcag

SEQ ID NO: 158290 - DNA, 944 bp, Cannabis sativa
ctctgcaccaggaagagaagatcttttactgcagaatatcccaatagaagaaggatcgacgagaattaaatggctgattggatggaggaatggattttggccaaagattaaaccctgcagcaataaattaaactcgagaaaagagggattagcagccaaaattaaatgcacattaaaaagataatctttgcctctcaaatcaacacatagagacaaaagaagactgatgatgagagaggagaaaggcatcaacaataaatgcacagaaatgagaaagaagagaaagatttaagacgagaaattaaagcaaaagaaaaaccaaactagaagaagaagccagatgaaaagggagatacccctaggaaggttccagagcaagctggagaagccagatttttgacttgttttaagtttggaagtaattttgatatgggacacactacactgaaaaaaagaacaacaacacaacactacattgcactcaaagtcatctgaatattattagcacgaaaccacctagcatttttttaatattttatttttatttttttagatagaaaattaatattgtttggtttagtcaatttatagaaacatattttaatttctaatggtacagatcaacttgttttaaagtatgacgctacgaaatatcactaaattaattgaccaaaaaatattgtttttattacaaaatacattcaattacagttaaatattttttgacgattatgatttacaatattatttgttaatttatttggtagacgcaaatactaattcgattattttgaagacattgcatgtttactaataagtaatgagaatcaatgataaggtaatcatgcccttttgtttacttacattattaaaattaggaaagggagaacttcccccactaattttgtatagaatgtcattaagggtaatgaattttaattatt

SEQ ID NO: 158291 - DNA, 923 bp, Cannabis sativa
tacatttatatgggattttttatgacatatttttgtaaaaaaaatagaaatctcatatttgtaaaacaataataaatttcgccggaaaagtcactagcgctaaaaatcgtcaaaaaagtcactggtaccggaaaacttagtgtcgtcagaaaagtcgctggaaaagtcaccgtcactggaaaagtcaccgaaaaagtcaccatcactggaaaagtcaccagaagtagatgtctcaaatatgaacaaaaatagagccagttctataacataacgaataaaaaaactcaaacatgttataattgaaatataactggttctgtaacataatgaataaaaataaataacacaaaataactaaacccaattataattaaaatagaaccgattctatgacagtattataatgaataaaaacaaataatacgaaataactcaaatcggttataactaaaatagagtcggttatataacataatgaatgggtatttttggggtaaaaatggtaatatgtgtaattatttggtggattggagcatgttgaatggatttttttgtttgagttattttatttaaatagattttgtgtgtgagtttttatcttagttgctttacggaaccagttttttggtctcaaatttttaactagttgataaatataaccggtttcttatattatatttgaattattgtgtgttattccttgtgtttatttattttgttatggaaccgattctttttatatttatgcctcaatattttttgaaattgattgccatatttttttaaaaaataataatcagttttatgaggtatatttttgtggagctagttttatttttaatttatattttattgttttaggaactgatttcttctttattttttagttgtaatcggtttgagttattgtgtgttacttgttt

SEQ ID NO: 158292 - DNA, 818 bp, Cannabis sativa
  modified_base (131)..(144): a, c, t, g, unknown or other
  modified_base (221)..(233): a, c, t, g, unknown or other
tgtttcctggactacattatacattacagtatgcctttcacaagttttgaatatccattttctgtcaatggattcaaactgtatgtttatgtatagaatatgagtttagttttctgtgaccaggatccacnnnnnnnnnnnnnngaactctttattgtaactagaccaaagtaatcaaaagaccacaaccacattcttatatatctatggcatttgtatcnnnnnnnnnnnnnttctgacaagatcattctctgcaaagagttaaacatgcctacatccacttgaaagtaggatcatctatattggcatatggatgtactttcaggggttgatatgaatttttattatattcttaagatgatcactctagattttaccttatgcaaaaaaatttgaattgtttaagaaatttcatgactttctaacagtggtgaaaaccattaaggtaagtggttaaagatcatgcgaagtgataggggtggagaaatatttggtagatttgcagttcaaagatcattaacttgatttttttaattgtatccacacttacatctctagaaattcaatttgcatattgatgatagtataaggtctataattagttactagcagttgcctaagtccttctagggaaataccctagtgataggaaaatttcaaaatgatgaaatggttgtgtacttagtgtaaaccattactagattcatggatgacctgatcgtgatcttaaggaaagccaaaactgttaaccaaggtttgcatgtttgatagctattctaagtgattaggggtgcaccatcccatagtcattagataag

SEQ ID NO: 158293 - DNA, 591 bp, Cannabis sativa
ttggagaagtgctaaacaaaccgcaatttcagactctccatgcaggcagaatacatagctgctgcagaggctgccaaagaacttgcctggcttagaaacttcttcacgggactcggtgtcgtccctggaatggaaaaacgactggtttttctttgtgataacactagaggcgtagccaacagtaaggagcctcgaagccacaagagaagaaaggatatatgtaacgccctaaataattatgcacgttacccaagatacttatgaaaccgtaatcccctaattgggtttactattaaaatttgcgcgaaaattaaactttaattataaacagaattaaaataaaacttgtaataatttaaactttacagtctaaaagttacagaagttgggatcacaaaaacatttacaaaatattattaccagtccttttctttcagctggcctaaacggcaaaacagagtctcaaaaaaaaataacactgttacaccccaacccgattggtctgatatggctcggacatgtacattcttcgtccaactcctgcactcatgactgatcagcaacagtcttaccctttcctccatagtagag

SEQ ID NO: 158294 - DNA, 513 bp, Cannabis sativa
atgtgccaacgctttgtggtcacagttaaagcaacgccgtataagtgattaaaaaggcttggatgaagaacaatcacatcatggaagaaatttttgaaggaattccttcaacaacatcagactatgagtgattatgttatgcatatgatacactatttttactacaagcgtacagtgttgttacagcaaaattttattactttaaagattgtcgaacctacagggattgattattaaattttactaattattatactctttaattttatacattaattagataaccaaaagtaaattataattaagaatcaaggaacaaagtaaatagaaaaataaatagacaagcaacgatttttaatcagaaagtaagaacctagtgcattaatttccctatttcaaactatgaatatcaatttactgattatctcgatttatcttataatttgtagtttcacgaatcctaatataatctattaacctctctcgagcgatgatagtgttgggttttatgcc

SEQ ID NO: 158295 - DNA, 555 bp, Cannabis sativa
tataaaattatttttacttttttcaattttttaatttggaatcaaaatttaaaaaaattcactttcaattttttttttaaacaatttttttttcttaatcaattagactctgatactaacttggaccttgggactcgaaccccgaacctaaaccccaacccaggcccagacctaaaggtgaaccccatccccggacctggaccctagaccctggaccttggacccaaacccaacctaaacccaaagacttgaaccctaggcccaaacctcagacccagaccttgacccagatctggacccgaactcggtccttgacctcaatcccaaacccagacccgaccccagacgtggccccaaactcgaccccgacccctaacctagacccgaactcgacttaaataaaatcaacaaatgaaaatgagaataaaatttacaaaacacactttgtcttctgtttttaaaattgaaaaataaaattagttatagaatatttttttattttcaaaaataaaaattttactttcatttttgtgattcaaaatttaaaaaaaaaaa

SEQ ID NO: 158296 - DNA, 548 bp, Cannabis sativa
  modified_base (39)..(42): a, c, t, g, unknown or other
cgttttagaagttcaatattaggttgttaaatcaacatnnnngtgagtagatctaagatcctagataaatataattccaacagctatataatacttgaactttgttccttagtaatttgtgtaggtcagttatatgtgtgtttcttgtgttttttcttattgacaagtattattttaattagtgcgtgcaccttattcaaatttcttttatcaataactaaattaatatttgatagctatccaatgcagcattctttttttcatcttgcagcaattgtttgtaaggaatggcaataactactccttcaccttgccctttcttagatagggaacaaataaggttttagtttgtctcaatgtgtttatatgcaaatacaactcccccaatcaccgttagttgtttcatatgttaagcttttagtacttctataaagataacagtcaatgtcattaattcttttcttcaagagattgaattgattgaactgttcatttcatgcattattttaattttcttttatatgtatataaactttatttccaagttg

SEQ ID NO: 158297 - DNA, 542 bp, Cannabis sativa
attagggattttgaaatcaataaacatacctggtgttaacatctaaatcaatccagaaatgtgcatgtcgaagttgaagatttaccacaccacaccattcaaatccattcgaaatagacatatactcttaacagaacaaaaataatcatactaaatgtagatagaggttgtggtggagtcacccaaactcatcatcaccaacgtaatgtgaagacgaggtgtagttacagagaaataaaaggagagaagaagaggaagagaataaagtttatgggaggtgacttggttgaattaatcaacaaaacggtgacattatttatataaaagaaaaaggaagaataatacgaccagtcaacaaaatggcaatattggtaatatgtattttaaaaaaggtaaatttgttatcaactatcacactaataaaccatatttataatagtaagataatgttaattataattttttaacattaataataattattattgttggaatttattttatcaggatcttagatctactcataagtatgttgtttaaca

SEQ ID NO: 158298 - DNA, 774 bp, Cannabis sativa
gtccccacagcaacaaatccttctatacaagcgtagttggatcaacttaaggacacgattcaaggcatagcaagtctaaagccctcatatcttgaactagattagtcaaggggatcatcattctcggcatacataaaattccttgcccctccccaaatttaagatgtcggtatggaagatgtatactaagtgagaagacccattggctcacatcaaatacttcgagatgctactcaatctccagaaggttactggtgatgtgcgatgtcgcatattccccgccactttatcagaaatagctcaacaatgaaacttcaaactcaccccaagaagattcaactcttgggctgagttttctcgagaattctacccacaattcttgtattcaagacttgtaccattgtagctaaaagaccttttcaaagtcaatcaacatcaaggagaatctttgaaggattacgtctataggttcatggcctaggctaccaaagtgaaaggtcttacagaagaaggctaatatacgaccatacttagggcatactcccattgagtaacttctaggaagacatctagaggatctctaccaacaacatgaaggagttccttgatagagctgaaggcattatcaagcttgaaaaagccatacgacaggcccaaacggggtatgtcaacaacaggaagtcacaagacattctgtagtctcatgacctaccaagtgcacaggcagacaccaataaatctgccaggacctctagtggcaaaaacactagtaac

SEQ ID NO: 158299 - DNA, 933 bp, Cannabis sativa
ctcagagatcataaactttatgcagagttcaaaaagtgtgagtttcggctgtcgcaggtatcttttctggggcaaattgttcgtaaagacgggattatggtagacccagggaagatttaagtagtgaagaactggcctagaccaaaaacagtcactgaagttcgaagctctcttggtttagcgggttactatcagcgttatgtggaaggtttttctaagattgcaatgttgttatctgagttaactagaaagaaccagcaatttatatggtcagataagtgtgagaaaagtttccaagagctgaagtaacgactgattacagctcctgttttagccttgccatcggatcaagagaagtttgtggtgtattgcaatgcatcaaggcaaggtttgtgctgtgtgctaatgcaggcagataaagttatagcttacgcttctcgacaattgaaagattatgagcagtgttacccaattcatgatctggaacttgcagcagtggtgtttgccttaaaaattcggcgacactacttatatggtgaacggtgtgagatctatactgaccacaaaagtctcaaatactttttcactcagaaggatttgaacatgagacaaaggagatggttagagctagtgaaggactatgactgtgaaatcttgtatcatcctggaaaagcaaatgttgtggcagatgccttaagtcgaaaaagaccagatcaaatttccaatatggtgatgatttctcctcagttagcttcagagaagtttagggcaaatattgaatttataattgagggattatataatctgacgcttcagtcagacttattgggaagaattaaggtggcacagttggaagatcctgaaatattaaagattcgagaagatgtcttagcaggcaaagctaaggacttttcaatctctgatagtggaatg

SEQ ID NO: 158300 - DNA, 812 bp, Cannabis sativa
  modified_base (212)..(216): a, c, t, g, unknown or other
ttttaaatcttgtattttacaaaatttatcaattaaactctttgttttattaaataataaaatgaattttatattttttaaaatgctataaataggaccctaagctaattttttgtcaaaataaaatttaataataatccaatctaaaagtgttatggcaaaattttgtatattttctgtatttgttcatgttaggaattgtcttcaagttnnnnntattaaaaaaaaaagctgtcaaaaattaagcttagggtcttatttttaccatttttgaaaatagttcatattgtcatttaagaaaatagatagtccaattaataatttttgtaaaacatagggtttaaaatggtatttattattattattattattattattattatattttcatttgagaaaaattattattgttattattattagaagaaaaatatttaggattttttgaaaaaattataatctatgtattagtgtctcttcaattttttaacctgttaaaacagtccttcctgaattatttagactgttgtaatttggttattttttttttttttatgattttattatatggcaaacagaaagattaaacacacatcaacgtcatattaacattgcatgtataattaatttgaaaaaaaaaataatttaaaagtttttaatttaattttacataattttttaatcactaattaattttaaatttaatcatctttaaaagtatatattctttatattttaattttaaattatacaagtggtgctcaattgtctaaactgccacattatcattatgtttgtcacatgtgacaaaa

SEQ ID NO: 158301 - DNA, 514 bp, Cannabis sativa
tatttagggcataaaaccccacactatatcccctagtctaaatcttagtgagtgtcactaaaacttagactttggagcggcttgactaagtacatcaaattcagctgaccgtaacattattgagtaacttttatatttagttacgattgaacgtaattctgaagacttgagtttatagatgaataggtgggttgggcgtagcccttatcacttaatttgtaagtgaatacttgggttgagtgtaattcctgtcacttaatttataagagaatagttggattgagcgtagctcatatcacttattttataagtgaatagttgggttgagcgtagctcctatcacttattttataagtggatagttgggttgagcgtagctcatatcacttattttataagtaaaaacttgggttgagcgtagctcctattacttactttgtaagtgaatagttgggttgagcgtggctcatatcacttattttataagtgaatagttgggttgagcgtagctcct

SEQ ID NO: 158302 - DNA, 994 bp, Cannabis sativa
agcttgtatatcacattgacattatcattgcctaattagataatcgataattacgaaacctgtcatgtcatgtggtacattacttttcttacttttgatctacatttatgcacgtcggccaacccaagtggagaaacttccccaatgatcttggtcctatatcacaacaacggtaaaccaataagtgtttatcccaaaacactgcttaatatttgcaaaggacaacctagggttttctaccaaaccctgtggtataaatacactgaaacaaaacttatattttatctctaaatatacatcatactgtagagcttgtcaccagcttcgaaacggtatatagaacgtccaaaacggacacctgagtgaaaagttatgacaaaaatacgatttttggtctctttggaatttcaagaaatggctgaccttttttggcccaaaaatcctaaattttgtactctccgaagcactaccaaaacctatccaaatcattccaaacttcacatgacacatatatactatatatacaataattcttacgtaacagaaattaaaatcgagcccgtaaacggaaaatgacattaaagctcgaacctaagctttaaaaagttcaaaacttgatttctaactcaaaatcacctcaaattcaacaagtaaaaattgaaattagtaccatagctaccaaagaacaatttcatgaagtcagaatctccatacctactctaatgcacaaagacaccatataaaaccaattattttcaacttaaaacgaaaccaatcattaccttaagttttccctcttcaatgatttactatcccactactatcggagctagaattactaggtttcaggctgaaaattaaagaaaatatattaaaggggaggagggttttatcgcaccaaaaaagagaatttcatttggtcttctacttatgttttaaaacatatataaacttaactgataagttaaaaatttatcagttatatttatatata

SEQ ID NO: 158303 - DNA, 541 bp, Cannabis sativa
aggaatacactgtgcctcacggcagagtgttgactccggttcttgctgatgaggagaggcagaatctctgggtggccaaacataattacgccctcaacgagtacagtcgggggcatgccgaggtggaggccctgagaaagatccttcgggaggagcagcaaaatactctccgggaggaagccttccgaaatccgtgggacttgaatatggatccgttgacgaattggttaaccgttttgttgggcccatcttagctccgtttgcctcggagatgactagccagttcgtctcccacctgacgcaattcccccctaagaggtatgcttcctgcgcctctcggaactccatctaccaagttcaggacatcatctctgtcatggctgcggtgagtacttgttatctatttttctccttgatattttatctacggcaccttgtctcactcttacttctttttccagattaccgccgagaccgatcgcctctccaagaccctaattgaccatggttacgtcatgtccgaatttgggggcatagatga

SEQ ID NO: 158304 - DNA, 503 bp, Cannabis sativa
agtacaggccaagtcaacacctaagcaaatggagatcacggtactcaaatgggcatcaagttacagaccaactccctctcaggagctggcctaccacccttggccggtcagccttgggattgcaccatggctggctagcatggcctccacaggggcctagccgggcaagaggtcctctgtagggtttcctgtgcacttttacatgtggacaacaagttatgggctgcgagttgggccctaaagaccggttcaataatatctagattcaatgacactttaatcttttgtaattatctaacaatctatgaaaatatctaggatttaaactgtaatctaaggtttaaggtttcagacctcctacctcctatatactatataaaagcattaaccctagcctagaaacctaagttaaatatgagcctgaaacctgcctccaagctctaagtctaagtctgaaaaaattctctcttcctcacttactctctcacacgcctacactagca

SEQ ID NO: 158305 - DNA, 680 bp, Cannabis sativa
agttctctccattccctctctcctctcttgctcaacctccctttgctcagagccagacggaacgactctgaacttcactaccttgaaaacccctagatctatatctctgcctctctttctctctcccttgggatccttctctttgtttctctctgtgcaaactgacatagatttggctaaggtcttggcggagatttgggcatcgacgggagtcatgggatttatcgtaagaaattttgaatctgaagaaatataaataattttagggaaatttaaagttttattttgtaattttgagatatgagtgcagttgatttggttttattctatattagatgtatatttttaccggattttatttctcaccattaagattctttttatgaattttggtatataaatctgaattttgttagtgtattctgttttattttgctgagtaatgaaattttggattctgctttggtgtttgttcctggggtgtgcgactggagattgtttcctgggatccgtttggtttcggggttgtcattgtgtttggtgtgcgatcagcccaagaagataacgctggagtatatttatcataaatattaggggtgtacatcaaaccgctcaaaccgctcaaaccgcccgcaccgcaccgcaccgcaaaaaaaatgcggtttgaaattcttcgcggt

SEQ ID NO: 158306 - DNA, 705 bp, Cannabis sativa
  modified_base (272)..(279): a, c, t, g, unknown or other
gaagattttgtgaagttgactcatggaaaagtgtctgtggccgagtatactctggaattcgatcggttatccaagtttgctggtgatctggtgcccacaaatttcaccagaaaacaaaagtattttcgaggactgaatgctacaatcagacgggacttgaaaattaccacatcacatgacactctatacaagagaatggtagacttggccttaattgctgaggaggtcgagcagcaagtaattaaaaagcaggctgcaagggatgccgtcannnnnnnnaatcctcctgctagtggtaatatcagtaaggggaccgacagtggaaaccctgagcacaaacggaaggctgaggcttccagagcatctggaggaaatagaaagtttcggggaaatagaggtggccgtcagggtcgctgatcctcattctggtcgtatctcgagtgtcctaaatgcaagaagcatcatcctggtgaatgtcgagccaaggcatgtttccagtgtggcgtagtgggccactttatcagggactgtccccaagctaagagagaagagcctaagatgaatgttgctcagaacccggggcgacttttcattataattcagacagatgctgatgctagtccgtcagttgtgacaggtcagttatctattaatggttgtgcttatactgtgttatttgattcgggagctactcattcatatgta

SEQ ID NO: 158307 - DNA, 513 bp, Cannabis sativa
tttataagagagaggcgtaaatgttaaaaatgaagagggtgtatttattattttttttttaaaaaaataatattaaagagataaataggaaaaaatgaataaatatattaaaattctatgtacacaaaatgagaacttagagataagggtgtttataaaatgttcaatttaatttacgatccaattggatttatatatttaacaagtgctcttaccgaggatattagatgttgattcatacttaatccatacttatttatatactaggttgatgttacgtgcaatgcacgtataattaattttttttttaattaagttcaattaagtgcattacatgtatgttttatttttttttaattaggtaatgtattttttttttttaatttttgaaataggattcgagattttgatctttaattttttatttttagctattgctacattgatgtattatttgaatgtaattataaatacgtattttttaaattttttaattaggtaatatatatatat

SEQ ID NO: 158308 - DNA, 614 bp, Cannabis sativa
tggagaaaatcaaaaggtgcagcgatgttttacttacttggggcaaagactactctggaaactttcaagaaagattgaccaaatgtaaagcgaagttgagaaaatggaagaaggaccgtgaccccttggcggtgcaaaaatacaaggaagctgaggttgattttaataatgtgttattgcaaaaggaaattttttggaaacaacggagtaagcaactttggttgcgagaaggcgatcgaaattccaaatatttccatgcgatggcttcgtcttggcggcgtaataattccattcagaagctttggtctacttctggggtttgggaaacttgggatggtggcctcccgagcttgattactagttattttgtagacctgtttactcccggggttgttgagggagttgatcatgttgctacggtttcaggaagggtgtctgaggctcaaaattccatgttacttgagccactatctgatgaggaaatcaagaaagctttattccaaatgcacctagataagtctccgggacctgacggcatgactccgggtttttttcaaaaattatggccggttgtgggtggtgatgtgcggatgcttgttcggtcattctttgct

SEQ ID NO: 158309 - DNA, 584 bp, Cannabis sativa
tttagcctaccatatctatccttaacactcaataacatttattattacattaatattattctaaaattactctaagtatttaagggttatcaaaatatatatatataaaaatactcttataaaagtaggttaaaaaaagcataccttataccaaaaatcatatacttgacttccaataaagtcattctgataaaatcctaacaaccaagtttaagagaaacttaaatcaaataattttatcctaattctactaaaatttcggcagcataactaatgaatgttctcaaaaaattcaaacatattaataataacaaaagacaattcaaaacaatataaaataatcacaataacatttagcaatatgaaaatttaccactcatctgaccgcagtacatgtattcgcagaacctacttccctacagatgaatatttaagatattcaaactcatctaacatacatattattccacctatcgatctaaccgcagtacaatatattgcaaaacctatttcactacgaatgaatatttaagatattcaaactatattaagcattcataattaattaataataaaagttaata

SEQ ID NO: 158310 - DNA, 756 bp, Cannabis sativa
  modified_base (701)..(710): a, c, t, g, unknown or other
atcattcctagaaagcaattgactcgcggaagttggacctggaaggctttcttattcttctgggaagggtcttcaagatagctagtcctcctccggaaaggagttccagatggctacctgttcctcctagaaggcagtctcggatagtcaactctaattggctcttttctatccgggaaggttctttaagaagtgccttgaaccgtgactccggaagccctcatactcactcccggatgcactcctttaggatattgatcctaaggcctataaatactgcctacactagtcatttcaggggtgcgccgttcagtttgagattgggaaataaagagagaaaagattgagaggtacagagaaaagagagagatttggtttggattttgtaagaagaatcttctgtaaatgaagaagattcttgggtaagagtgttcagatttattttaccaggatctagatttactaacatgtatgttttattaacaccctaaatacgaattctctaaaataataaaattaaacacataagaatttagaaaaccttacattgatggaagcagaataatatgactccttctgctcggatctctaactcttgttcctttctgtagaagaataatgacaagatttgagcctagatcacattctctccttcgggttggttaccaccatcttttgcactatgattgagtacttgactnnnnnnnnnngggcatgacactctatcactatgactcgagtatgaagaacaatgaa

SEQ ID NO: 158311 - DNA, 792 bp, Cannabis sativa
  modified_base (169)..(169): a, c, t, g, unknown or other
  modified_base (718)..(720): a, c, t, g, unknown or other
aggaattgcccttgtcatgcctggggggcaacacctgcatgctgcagtcaagttcggattcaaagcatctaacaatgaagccgagtatgaagctctaattaccgggctaaaggtagcccaggaaatgaaagccagacacactgagatctgcagtgattcacagctggtngtaaatcatgtatccggagaatacgaagctcgggagaaaaaatgatagcatatatgagtaaaatacatgatctgctcgcacaattcaaaagctgcggtctcagacaaattcttagagaagaaaatacaactgcagacgcgttagctcgattggcaagcaacaatgtaagtgataaggcaaacttggttcctatccagttccttgaagagccaagcatcaccggcacggaagaaatcaaaattattgatacatccccaaactggatgacaccaatagcaacctacctcaactttgggaaactcccagataaccgaaatgaagcttagaaaatgagaaggaaagctgcacggtacatcatattagagggaattatgtacagaagaggattcttgatgccattgctcagatgtgtcactcaagaagaagctgcaagactcctatctgaagttcacggcggattctgtggaaatcatgccgccggccaaagcttatccaagaaaattataaggcaacgttacttctgacctacgatgattgaagattcaaaannntatgttaagaagtgtgacaaatgccagagattttcaaagataccacgagctccacccaacgagttaacacag

SEQ ID NO: 158312 - DNA, 655 bp, Cannabis sativa
taggtgggtttggtcgatctaattttggtagaggcactaggaataaagaaagctttaggctggttgaagacctagaacttttcctttgtcaaaatagtgtcacatagtttagtgattgctaagtctattcgaaattatttaaacttgtacctttcttctggtgttgttgttgttgaggaatgaggattgtaagtagggtgtacatcaatcagtttggtcgggttatagtatatttttagtaacccaatatgaatgtcgggttgtaaatatctaattgtaaccagtctaatgaagaaaaaaaattgtatacccccaatgatttccgtcaatttggttgggttaacccgtttaaaccgatatttatttttttattattttattattattttaggtgttcaaataattgatttgagaaaataaatgtacagcatacaccttttaagattaaaatggctatagtttgaattaatgttaaaaaaaataaaaataaattgaataaacattaaagtattaaacaacattttttaaaaaatagaatttaaaaaatatactcgttcaacttcaatattcaaatgtaaaatcaaaattattaactataaattctaaatttcaaattaaacactatataatttttaaaaaaaaacactataaaata

SEQ ID NO: 158313 - DNA, 674 bp, Cannabis sativa
ggtaaaattggatagaaaaatagtgtgagtatattttgcatgatgtaaaatatgctagcatatttttagtggataaattaattttaagcatataatatcaaatttccctttggaaaataacgttcttgttatgaaatattattgggaaatttgttaaaatacacttaaaaatctagactattcttttaatataccacctttaaataaatactctaaatattctccaaacaccttaaaaccctaaaattacccttacaattcaaaagctctcttctcccactctctctgtctaacttccccccctctcactctctgttattcccatccagccccaaacctttcaagccctgactgttcacgagctccgaccgaccaagacgacccacgaccgagaagacccatgacgactcacgacgacccacgagaagcacccaagacaacccacgaccaccacatttttttttctggtttctgacccatctagcgcttgttttctgtatttttttttctggtttttgacgatgtcgcgaaacatcgcgaaatcttgaaacatccctaaatatctctaattcacaacaatgcttgttttctgcatttttttttatttttgacgatgtcgcgaaatattgctagatgtcgcgaaacatcgtgaaatcatgaaaacatctctaaat

SEQ ID NO: 158314 - DNA, 749 bp, Cannabis sativa
tcccacatttgcgactctaactcctaagtcacttcttcaatcttgttgtttctccacaacactttaactaagggaatagtcttgttccacaatactttctctttctatccaagctctgaacaggttgttcctcatacgataagattgtctgaagctcgatgtcctcataactcagaatatgggtcgaaccagacacatattttctaagctttgaaatatggaacacattgtgaactctagacaaagcagggggtaaagctagccgataggctacttgacctaccctctccaggatctcaaagggaccaataaagctaaggcttaattttcttttctttctaaatctccaaatccccttcattggtgacacttgaaggaagaaaaagtctccatcctggaactcaatatccctaggcttcaaatcagcgtagcttttctgcctactttttgaggtaagcatacgagattgaatcttctcaataacctcactggttcttgggactgctttaggtcaaagataccttcgttcactgacttcatcccagtgaataggtggccgacacttccttccatacaacattcgtatggttccatttcaatagtactctgataactattgttatacgaaaactcaatcaaaggaaggtacttgtactaagaaccttagaaatccaatacacatgtctgtagcatatcctccagtatctgaatagtcctctcaaactggccatcagtttgaggatggaagg

SEQ ID NO: 158315 - DNA, 550 bp, Cannabis sativa
  modified_base (358)..(358): a, c, t, g, unknown or other
tcgtatactagtggacaacggaagttcagtaaatcttttgaacttccaagcctttaagcaaatggggttgcatgagaaggatctgcgacctgtaacgttgagtatatactgttttactggcgacgtcattgcactgaaagggatgattaaactcttgattaccttgggaactgcccccgtagcagccaagtcaatggctaacttcacggtaatcgaccaatattcggcatacaatgccgtgattggtcgaccaattttgaaggagatggagatcgtaacctcgatctatcatctcacaataaagttccctactcccgctggggtaggctctgtgcgaggagtccagtcagactcgcgngaatgctacaatgcagcagtcaagctcgcggagaagaagtcaataaatgtcatctatttattagaggcaccacctcctcgccaagaggtccttaggatcaaataggtgccacacacagatggaccagatctggatccaaggatcctcgatcatgccgcagcggcccaagccgcggaagacactattgaggta

SEQ ID NO: 158316 - DNA, 550 bp, Cannabis sativa
aaaccctggcatgtaaatcatcgtagtctctgcagtgaactttgaaaagaccctcatattcgtacagataagctcgggccataacgttgtcgatattgtcaaagtagagatatactaactgattaagggccctctgttcatcgaaattgtacatgagaggtggatcatttagggaaacaaactcttgagcataattttgtggtcgaccctcatcctcatgagcatattgttgtggaacatacgcctgatgagccacctctccttcttcctcatcctcatcctcattctgctcttattggccaatatttttcttctatttaagggatttgattttggcttttaatttctcagtctccctctatttttgagccacaacatcaataacttctcttttcttcctaccaaatagtttagatgcgttggcaaggaacctataaatcaataaataaaattagatataatttattttgtataactaaggaaaaaacaactttcaaccactagcatacccagcagccctgacacgtccaggatgctctggtgtcccaag

SEQ ID NO: 158317 - DNA, 954 bp, Cannabis sativa
  modified_base (671)..(672): a, c, t, g, unknown or other
gtcttttgacctttaaattacatatgataaaagattgaatttttggataaatgaaaaggaaattctggttgtgtttctctcttggccgacccctgtctctctctctcaaacccttttatttttcaattttgatttttgaagaaattgcttggaattggccttgaattgaagctttgagtttgatttttcaatttaacacatttatgaacatttttttgaatgacaatttttttccagcaacttctgtgaagtttttttcttaatgattttaattttttttttgttatttttcttatgaatgatttttttatgtataattttttctacaatttgtgagacccgatttattcactaaattaaaatttgtgagagccgataataaaatgtaccaacaacattatgccactatttatagtgtttaattagcacctctcttagtattttccttatcatctccaatagatggtgtacaatttgagctaaaaaaatgagtcaaatatttggcttaaattttataatagtgcttcaatgtatttaggataaaattaactcttttttgatagaaatgtgtaagaaagtcaacaacacattaaatttttactaaaattatataaaaaattctattaaatatataaataaaaggctaattagtaattttttcccccgaactnngacatgtactaaattatgccccttgaacttttttggccgttaaaaattccccatgaactattaagattgttaaatttaaggacttttatctaattttagtacaaaaaattctaacatagatgaaagttcaggaagcatgatttaatacatataaaagtttgaggggcatgatttggtagatatcaaagtccggggagcatgatttattacttgaaaaagtaaaattgaataaaattagacaaaagtccttatatttaacaatctcaatagttcagggggaat

SEQ ID NO: 158318 - DNA, 722 bp, Cannabis sativa
attcctcaagcttaccgcctgctttcagtcttgttcattttttatgctgcacgaagctggggctcgcccattccggcaaaaattttgtatttttatgaacttgtttccatccctaaaaagggagataaacttaaagacggtttttacagccttcgggcccatcctttgaatgagggtccggtcccttacaaccagcagaagcacgtgaatgaatatcgtcaccgttttttcttctcctccggtttccaggccatggaccatccagagcttctcacggagtggtttaggatcccctcttacatgcggaccgaacctactcaaatatttcttcaacgggccaagaccttcgccacgtacgacaagaaggcccttgatgtcggggagttggtcatgacagagcactgtcggaaggccaagctgatcttggggcaccagtcggtggatgaatacaatctctccaaagtcatcttcccgaacgtgagagctccggccgcagagaaggtgttctgggatgacatcattgccttggcggaggacaagtaccagaagtacctcttcaagagggaataggagctggcttacatcaaggcccaggagaccgtcggaagggcctttcatattggagctccgttggagcggaggacccctagacccaagcccgtggtcccagtaccaaatactggggctcccgatgccagcactttgggttccggtaagtcccc

SEQ ID NO: 158319 - DNA, 636 bp, Cannabis sativa
aaattaaaaacatgaccatgaataacacttttattattttattttatttatatatattttttattttatttatatattaatttttgatccgtatttatatatactgcattagattgtgcatattgtgagagtcactaatccgcgcttggcgcggttttttcacaataattataatctttgtactgaatgagcgatgtaatataaaatatagtattgtattgaaatataaataagagatgaatttttttaaataatgtattgcaatagcaaagtccaaatttattaaataagtgaacatattatagtctgaaacataatttataattattagaacatatctatactttgactcttttctccttttattttcaacacttatttatatataaaattacaaaacaaattaataattagaaattcaaataaaatttgataaaattaaaaaatgtgtaaataaataatatctatcactcacataatatatgaaatatatatatcttaaaagtttaacattcacaatagtctcatatcatagaagtaaaatatatatttaaggtgtcttattattctaataaatatcatatattaataaatcaatatagttttaattatttaaataaaattaaaataaagaat

SEQ ID NO: 158320 - DNA, 587 bp, Cannabis sativa
aaaaaaaaaaaaaaaattatacgacttgattgattaaagttgtgtcctcatctaagtctctttttggtaagtaattttgtcttctcgtcaataacttttattacttatttaatgatcaatcataattatataattgttgaaagtgagacacaattatgttggcttttgtgtggtgtagatgaccaacttttttttttttttctttatttggtaaggaagtataattttatagctcacaattaaaaactaaatacacacaaataataggcaataagcctcctatatgtgtaaggtatgaaccccatttttctttatcatcatttaccctcactacaaaaagttaatacctttagtgacaattttttagccacaacatatttttttttttgctaaaaataacttatagtcataacaaaaaattatttgtgattaaaatataatatttaaatacatttatttgtccctaaaaacacatttaatcgcagcaaattgtaacttttgtaactgatacatttagctacggaccttttagttactataagtagagcctcgcgattaggcatgtcaaaaagatccatttagttaga

SEQ ID NO: 158321 - DNA, 781 bp, Cannabis sativa
  modified_base (495)..(497): a, c, t, g, unknown or other
gcaagttcggtatagttaacgaagcgtggtccacctttccttttcggcgaggactccttctttggaggagatttggccaacttcggactttgctgtctctgtgggctacgtcttcttgagcttcgacctcgggaatttgtccctcggggactgcgagaccttgatcgcggcactggtgacttacgcttatccttgcctttttccaactctgctagagaattctcaattctcttacgaggttcggccataacgaagaattcgactagtgattctggtcttcgagcttgtaactccttccaaaaattggttctcggcaaaacacctgttatcaacatacaaacaagcgaagactcgggagccttctcgacttttattacttcagcattaaatcgtttaaaatagtcttgcaaagactcaccggattcttgtttgatgttggccagagttgtaaagggaggcctataagccatcgtggcctgaaagtgcgtgaggaannngtcgacaaaggtttcccatgtcgatatcgaggcctcacgaaattgggtgaaccaatcgtgggcgttttcctcaagcgttttcgcgagaatgcgacatttcgcgagctgcagtacctaatcaacttccattatagtattaattttttctagataatttatgggattagaggtacctttatattttagggattcggatagtcgaaatcccttaagaagttgagcctgtcgcacttccgcagtaaaaggagaggtcccatgcagcttgtatatgggctttctctgct

SEQ ID NO: 158322 - DNA, 502 bp, Cannabis sativa
  modified_base (211)..(212): a, c, t, g, unknown or other
aggttgttagagaatatttgaaaagatatttaaaatctaataaatgtcctaaatatcctaaattctaacttaaattcaaatatctaacttgttttcaaattttcagtttatttaaataatttaaattaattaaatattaataagataatataatataatatcttgaatttaaaaattagatattcccaatattatattcttaatcttatannttaataaattaaatataacaaaaataaataatttaagaaaaaatatttgatgtttaggatattgtcatcccaaatttggcactctgacgtggcatcatgaggactttacttagagcatctgttcggatcaatatgctgagcaggatgcctagctggcatatccagaactgaatactcaacgaactgtgcagaatgagcaacacttagcgaattcagcttaacgcatcatgagtcaccaactcaatccctataactcagggatcaacttatgtggatatggcatacacacg

SEQ ID NO: 158323 - DNA, 808 bp, Cannabis sativa
tgtatgattcttctcaagagcctctatcttagtgtccattgcattatcccaaacagggataccatgagcttggtgaaagaactcaggctcaaaatgtctcaaaatggccagaataacagctcgaaatgttgaagatagcttgttgtaaccaatgacctgagacaaaggatgagtagtcacaaaagaaactttagccaacttagacaaattggtagaagcaagatagcaatggtattcattcaagtatgatggtttatgtactgccctgccagatctggtatgagaaaaatcatgagaagaaatatctgctgtaccaggcagatcagaatgcacaacaagtttagtaaaatcagtgtgagataactcaactgaggcaggaatatgtggagactgagatggagtattatcagaagagttagaagaaagaaactcacctgatacagtacctggtgctgttgaacccaagggttctgtaggaacagaagtaatacctggtgcagaaacatgagaataatctgcaatatctgatacaatgtgtggagaagaggcaaaaaaattctcataggcaggtgagatacctccagtagagacaaaaggaaaaatatgctcataaaaataaacatctcgagaaataaaagtgagatttttattcaaatcaagcagtttgtaaccttttacacttggaggatatcccaaaaatatgcaaggggcagacctaggtgagaattttgaccttgtttgactcaaagtggaagcataagctagacacccaaaagcttttaaatggtcataggctggttctttagag

SEQ ID NO: 158324 - DNA, 706 bp, Cannabis sativa
agtgagagtttgagtgccatggtttaatagtgttggctgaaatatattttaactcctttatgatcaaatattacctttttctttcggggcatggattagttttgagtatatcccctttaatgataacgcataaatattttaacataaatatatgtattatacatttaagggactttgcaaacatgactagtgtttggcattttttgaacaaatcataccattcaattttggcttctttttcttttgtcatgtaacatgtttcagatatatatattgtgatactctcatttttcagattggatcctatagggaatcgtttgcattagaggcatgcacccaagctaatgttttagctttagatccacgataggagacaaccaatattatagcaagaatttattttcattgattataccgcttttaatcaaaattagcattaagatttttattttcttctttgattatgccccctatattgaattattttctgaagtctaaaaaatcaaagagaaatataaaaatcatcaataataaatttgacagcataataattttttattttttgtttaagagttttattttcctttttgattatgcactcccatattgacttattttctgaagtctagggaatcaaagagaaacataaaaatctatgaaaaattggacagcataacggcagagagacattaaattctcttatttt

SEQ ID NO: 158325 - DNA, 620 bp, Cannabis sativa
gggttggggtttcggtccgggtctgggtctaggtccgagtcttggtttgggtctggttctgggtgtgtgtctgggtttgggttctggtacgggtctaggttttggtccaggtcctcggtcacgaggcctgggttccaggttctgggttgcaggtcctggcgcaagtctgggtctgggttcgggtttgggtccgggtatcgatccttagtctaggcctgggtccatgtttggttttgcgtctagatcttgttctgggttgaggtccaattcttgttccaaggtcctgatttcggttcttgttctgatttcgggtcccgagtccgagtttggttttggatcctagtctagaaatggttccaggttggggtcttgatacgattcgaaaatccaaacaccgactacgtgttaggtccaaatcgtgggtcgttggtcaagatctggatcccaatcttgggtcccagtctcgttctaatttagatcttgggtcccagtccgtgtctatgttcgtgtgtgtgttcgagttcgggtctgggaccaagcactactacaaattacactattcacgtcggtcaacgctactattcatagtgttgaccgacatgaatagtgtccaaataatt

SEQ ID NO: 158326 - DNA, 666 bp, Cannabis sativa
  modified_base (128)..(131): a, c, t, g, unknown or other
attagcaatttaacgccgtagaatctcataagataagtattattgtaagtgttttattcttagtaacgaccatctgaattgtggctgctaagaataggacttacaaggtgaaacaatggtagaagctnnnnaaataagaatgaccttgactctcaactaaaacaaagcaacgtctaattcttttttcaatcagataaaaggttgctaggatggttaaaattttagataagttgactactctattcaatggatgatatctttgactctcgagtaaaacgaagaactgtatcagtttgatgaaaaccttgaaaataattgaatatgttttattttggtatttttgcaaacatgtttacttacttgttattttctgaacttgtgtatgaatttaagtgaaccaaatgatttatttctgtttatttctgaacttgttctcaatagtcttccacctgagtataatggatttgttgtatcatacatgatcaacaattttaactcctggtaagagcattaagtcacatttgattctgatgaatctgaagttctagaaagccaaattgctgggaattgctttatcaagacaacaatgggttgaatttgttctcaatagtcttccacctgagtataatggatttgttgtatcatacatgatcaacaattttaact

SEQ ID NO: 158327 - DNA, 514 bp, Cannabis sativa
acaaatatacataacacaatagaaatagaaggaaatattagttatcaatgatattaacaaaagttaaacaataccataataatagaaataaaatgtaaacgtgaaacaaaaaatgcaatactaaatcctatcgagaacctgttgagaacccattgataatcagtagacaatcaccaaacatgacaactaaaaaactgattcttaatcctatcaagaacttgtcgacaatatattgataatcaagcaacaataatcaacataaaaacaacaaaataaaattctcactcttatcgaaaacctattaataactcgttgataataacaatttttttttgtaaaacttgaactatcgataacatatcgacaacttctcgataaccagttaataatttatcaataatcaagcgagaataaccaacatgacgacaataaaaagaattctcactcatatcgataatctatcgaaaacctgtcgataatcaatcgataataaacaaattctaagctttttttt

SEQ ID NO: 158328 - DNA, 664 bp, Cannabis sativa
  modified_base (41)..(47): a, c, t, g, unknown or other
aattgaattgattatttggcattttatttgacatgtgatannnnnnnaatttatttggcaatattttagtgtgaaatggcatttatgctcttgaaaatgaatgtgtgtgttatagccctaagggcaaaaaggtcatttgaccatttgtgagttatgttgaatttaatgaattttgagagaaaaggaattatttttctggtattatctctctttcactgaatcctctccctctcttttacccctttccattttcaaagcttaaatttgtgaagaactagttggatttgaagtttggttgatttgaaaggaaaggtgttgggaggcttgaggcttaattgtgcaagtatttgaggtagttttcttgattttaatttatgtttcccttgctaaatattgtggtagaaacatgtttaggtttgttgattttggttatgcatgggttagattgttcatgctacatgttgggtgaattggtgttatcttggattggatttgagtttgacttgttgtatgcttttattgaattgggctgagattattggtagttctaggttggagtttcaggtgtgaaatttagtgtttaattgctggaactggtttgaagagcttgttttgaagttcttgagtttgagcttaggttttgttaatcttaagcatgatattg

SEQ ID NO: 158329 - DNA, 515 bp, Cannabis sativa
gtgaaagaagggatagttctgggacacaagatttcaaaagcaggaattgaggtggataaaagtgtcaacaatagagaatttgccagccctggtttccgtgaaagaagtaaggagtttcttgggtcatgctagattctatcgacaatatattaaggacttctcaaagatctctaaaccattatccagttgacttgttaatggcgtaccttttgagtttgtagatgaatgtttaaaggcattccaagttcttaaagaaaaattgattgcagcaccaatagttacttcaccaaattgggaattgcccttcaaattgatgtgttatgcaagtgactatgcaattggagcggtcttgggtcaaagggttgacagggtgtttcacacaatctactatgctagtaaaacccttaatgatgctcaactaaattatgccacaacggagaaggagatgttggccattgtgtttgcatgtgataagttccgcccctatctagttgggaataaggttgtagtctaca

SEQ ID NO: 158330 - DNA, 963 bp, Cannabis sativa
  modified_base (921)..(925): a, c, t, g, unknown or other
atcaagatgatctgagcccgacactccgctgtttgatgtttgaattcttcacagtcttacacactatgcttgagggctaacttgctatgagtgggcatgcactcaatcactaaggctcgaattttaatggtgaagaatactatagaatttcaaaatagtagagagaaaagaaaaagaagtctcaaaacactagttgtttgacagaatgaaaacttgaattagaagcattagttggataatgagaccattttttttatactaattcacttagggttaggattgaattatttggaataaaaaatgataaaataatagcaaaaaataggaatatagtggccggccatatgtgggcccaacactagttatatttttgccatttttcttaactatttatctattatttcacaaatgtcatattttacaattctaatcctataaatgctaaaactatttatttaataattgtaattaattattgaatcatttatattatttattaactaggaaacggcatgcgcttcacgtgcggtataagaatgttggatttaactccatgtaggagtgacaaaactatcatcgtgttcgtgttatattttagttaatatgcttttatatttcgtgtcacatgtgtcaatccgttttaaactgcatctaattttctcaaccctaacccgaagcataaaaaatcgtattatatttgtgttaacctactttgacctattttgctattactggatttaagaagaatgtagatttatccattgaaaaacttatatatactatgtatatatagtttttatatatcacaaaaaattaaattttttaaaatattttcaatttcttttataaaaaatgaattaaattatttttttaacataatattgaattactaaggtgtcatttggtaacacttttattttnnnnntttttaatcacaaaaatgaaagtagaatttttgttttt

SEQ ID NO: 158331 - DNA, 536 bp, Cannabis sativa
aaaaaataaaagaaataattatttgaataaaatattaatttttttaaagagttgacctggtcaacctattgacccggtcaacccgccaacctgtgacccgccaacccgctaactcgacccctattggggtacgggttcagtttcatttttttaaacccgatactcgttaacccaaaattgcgaacccgaaacatggtaaacccgctcaatgttcagccctacccagaccctaaaccttggaccccccacccccaacccctaactcctcacaccctgaaccctgatccatgaaccatgaactctgaaaccctaaaccctaaccctgaacactaaaccttaacccgaacaccctgaacctagacccttatgtggcgtttagttggaggtaatgaaatggaatcgaaaagaaacagttttcatttcattcttttgtttggttgcattttaaagtattgagatgtcattccaatggaatgccctttacactagattggtggaatgactattctattttaaaatggaaggaaagaccattc

SEQ ID NO: 158332 - DNA, 575 bp, Cannabis sativa
tgaaacgtacttccataacatagagacatgaaacacgttgtaaactatgaaagtgttggaggcaaagctagacgatattacaccagtctaatcttttcgagaatctcgaaaggccatgtaaacctagggcataacttgcctcttttctcgaaacgtttgatccccttcatcagagacacccgccggaacacatgatcacctacctaaaattctacatgttcgcgcttcagatctgcataactctttcgcctattctctgaggaaagcattctagccctaatcttttctatggcttcattagttcgttgctctgattctggacctatgtgtttcttttctctctcttcatcccaatgaataggagatctacattttctgccatataggctcataacatgtcttctagtatctgaattgtcctttcagattatctttcagtctgaggatggaaggctatattgaatttaagtttggtacccatagcccgctgaagactatgccagaatttttaagtgaacttcaaatctctatctgatataatggacttttggagcaccatgtaacctcactatctc

SEQ ID NO: 158333 - DNA, 545 bp, Cannabis sativa
aaattttcttacatcaactataattttataagttcaatcctttgcaaagacataattttttttaatttttaatttaaacttttaaattaatttaatagtttaatttttaatttttttttctaaataataatttaaaatttttcaatatgaaccttcttttcacatatatgcatatatgatatatgcatttcttttagtttattcaaagccttccaaacataggggtttcccattatttattttttattttggaaaattacatgaaatgtagaattatctaaaaaagttacaaaaatatggtatttataaatttgccactcttctatggtatttttttacatttaagattttttatggtatttgatataccatatttttgtaaacttaatatccaaacccatattttatgtttttatttttagcccaattaattttatcttaaactatgtttttgtaaacttaaaatataaaaattgcatatttttttatcaatacaaaaaaaaaaaaaaaaaaatcaaaccaacatttcaatttattttataatt

SEQ ID NO: 158334 - DNA, 563 bp, Cannabis sativa
cttttcttgccaaacaaatgtgttatttaggacattatcaagaatcaagtgattgggatgggtgaaaggattggcaacctttactaccttcatgaccaacttgtttcttcagttttttctgttgttaattctgaaataagtgatgaaaccttatggcattataggcttggtcatgcctcatgcgtaaaaaaatcattctatcaataaaattttacagttccaatactctccttgtcaaaattttcattgctccatttgtcattttgctaagtaaagaaaactacattttgtgtctaatcataacatctccaaacattgttttgatttgatacacatatatttggggaccctatcacacacaaaccacttattcacctcattaacaacaaatttgaggcccaaattgtgataccagctttcattcaacttgtaaaaactcagtatggagctcaaattaaatggattagatctgataatgctaaagagctccaattccctgagttgttctcatctttagggatcatacattatcattcatatgttcaaagaccacaacagaattt

SEQ ID NO: 158335 - DNA, 550 bp, Cannabis sativa
  modified_base (50)..(50): a, c, t, g, unknown or other
  modified_base (349)..(370): a, c, t, g, unknown or other
attttttgagagtccattaacatcaataccagcactatcctccgcttccntatcaacatagtcgggcccaccaaccccttcatgttggcgcctccttttggactcagcagaaggcccacggcctccttgtcctccatgtggaccaataataccaccaatgaaaagtgaaggttgacctttcccacttggcacatgattgccaaacacaactgactttcctctttcattgacagtagacttggaaacactagtcttgttgccattattactcaaattttcattaagagggatattcccatcatccaccagttctggaatatcatcaaccacctttgactgaggattattnnnnnnnnnnnnnnnnnnnnnnttcccagtttgcatggctggccgagtatcctcctcctcatgtcgcactggggaggcgttgtcaaactgcacatcggcctccgtacccgtacgcaaatactgagagctcaatagataatttttccttcgtggttgcgcacgcataaagctcccataaggtttaacaatctcatcctcaggt

SEQ ID NO: 158336 - DNA, 544 bp, Cannabis sativa
  modified_base (481)..(481): a, c, t, g, unknown or other
caaggagtacgatcatttgagtacaatcgcatatatgaccattagaatactgagacacacccaccatttggaataacgattgataccctcgcaatccaacccacagcacataaaaatcctaaaagatctagccatcaatcaaaagaaagtaaatcttgtcaatacgcgagtattcgaattgttcatctgaatacccgcaagtattcgagttgttcatctgaatacccacgagtattcaagacgtgaaacagtgcctattcaagtatagcatatgcggttatgtcaatttataggtcatattctatgaatttacccaggtttttacctaaaacacatagcctcatgcctatcatctataagcattcatccttacacaaccctcatgcacactaaaaacccagaaaatataatccccactcaaacagaaaacgaagtatgatgaagattcagaaactaaccttttactttgataaatctgttnccacaaatcgcccttgacagcaatatagaatcaagaagaatccacgaataaaggcaaaaatct

SEQ ID NO: 158337 - DNA, 647 bp, Cannabis sativa
tatcagagtcaccaatttcgtaacgaaatcactcatcgaaactgaaataggcttctacttagtggtgccgatggacactggcagtagtgacactatcgatgtagacgattatgggtcccttgacacaaaatttgtaatgaagttaggtgtagtgtattggagtcgccagttttgaaacgaaataactaaccgataccataatagggttctactttgtggtgtcgatgtatactcgcagtagtgacactatcactttagatgtttaggggtcccgtgacacaacgtatgtaatcaagttaggtgtagggtattgtagtcaccagtttcgtaacgaaatcactaaccgatatcgaaatagtattttacttattggtgccgatatacgctcgtaatattgacactatcactataggtgtttagcggtctagtgacacaaagtctataatcaagttaggtgcagtgtatcagagtcacacactaaccgataccgaactagggttctacttagttccacaaatgtgcactcgttaggtgtgtagtctgtaataaagttaggtgtagtgaataagagtcaccagtttcttaacaaaatcacaaatcgataccgaaataagattcgacttagcggtgctgatgtacacttgcaa

SEQ ID NO: 158338 - DNA, 542 bp, Cannabis sativa
tgcatccactcatagaacttggaagtgcactctcagttatatagaacgctctatatgttccacgatatagaacgctctattcgttctgattttcagggggtatctcattttccctaggttgttcttccctgacattttcctgtctcctagttcgtgagccacgatgtctgcctcgtggtctccttactccaggttcaggttgattttgagcaatcatcccttgtgccaccctagccaagtctgcatcacgctctaactcagcatttcgacgctgcgcctcttccaaacggcgtctcaggcggcggttttccgtttcataagtactttctcccataaactgggcacctctacgattgagctcttcatcccttgccctagggttctgaccactcccacgctgagttctcctcgagcgtgttgttcgcgtactaggaccaacgccaggttgggttctctgggaacatgtggtccgtgtactggggccaccctcaggttgagtcctcctggaacgggtgatccgtctagactgcgggttggtagac

SEQ ID NO: 158339 - DNA, 562 bp, Cannabis sativa
tgggtgaagaaacaaaacaggtttaggctcaaaagggttcactaaggatattcattttatggtaggcttgaaaagctcaaactatccaaacaatctgtctaaatcatgttcctattaaatgctatcaaggatttcgcctcaaaagaataagacatgcaagttctaagctattcaatcaatcttaccacaaaccacagtaaaacaattataacatatttcacagatcatcaaattgcattcatacacaggtttcacaagcatccaaactaatccaaagagttaaaagaattaagcacactatttcaaaatttcaggacatatcacaattaacagcagcacacaactatcttcagtttatttaatcgactaacaactaaataaaaagactaaactaaagcaaaataactaaaaagaacagaataactaaaacaattaaaaaaaatttataagtcccatcccctaaacttagaatacacattgtccccaatgtgtcatgcaaaacaaggaaagggagacttacctgcacccccatcagaaggggttgaacctcaatactgcttca

SEQ ID NO: 158340 - DNA, 729 bp, Cannabis sativa
  modified_base (675)..(676): a, c, t, g, unknown or other
tatttttgtaaagataggggaaaaagtttatatttttgtaagtttctcttttttttttatagaatttacacctaatattatttttctccatttttttttttaaattttattgttataaggaaaaaaaaatatttttctacatttcttttttatattttttacatttttttagcaacagcccacattatatcatactattttaaaaatgtggtaatcagttgataatgttattgacatatatactctttacattgttaatgtatgtttttattatattaaatagtaagctttatgaggtgataatgttattgacatatctaccctttacattgttaatgtatgttttcattatattaaatagtaaacttttcaaagtcaaaaagtccaatagtcaaaattaacagcatagtagtgcacatgtttatatttcctatttccacttttttattaagtgtatattaaagtgtatttattaccttttaaaactctatttatttttcttaaaaaaattaacagatacttttttagctttccttttccctctctcagagtctcttgcactctctccagatttgtttcatcttgttgattgacactttttagcttagattttccctgagtagagtttcttattctctctcttgatattttcatcttctctgcaactttcctttnnaaagtctaattttcctttttaaaactctttcaaaatataaataaaaaaatatc

SEQ ID NO: 158341 - DNA, 502 bp, Cannabis sativa
aactcactaaaaagaatcaacagtttttaaggatagacaagtgtgaagcaagctttcacgaatttaatagaggttgattacagctcaagtattagccttaccttctgagagggtaaactttgtagtttactgcgatgcatccagatagggtctagggtgtgtactgatgcaggctgactaagtcatcgcttatgcctcccgtgagctaaaggaatatgaacagtgatacccaactcacaatttagaacttgtcgcggtagtgttttctttgaagatttgacggcattatctctatagagagaaatgggagattcataccgaccataagagcctcaaataattctttactcagaacgatttgaatattagacagaggagttggttggagttggttaaggtttatgactgtgaaatcctttaccatcctgggaaggccaatgtagtggctgatgcctgagcaggaagggtcctaggcaggtaactattatgattaagatttcac

SEQ ID NO: 158342 - DNA, 521 bp, Cannabis sativa
  modified_base (26)..(40): a, c, t, g, unknown or other
ttgttttttaaaaacaaaaattttannnnnnnnnnnnnnntaaaaaattaaaaaacaaaagtgtcaccaaacgacacccaagttaattaatttttatgctcaatgctcaaaattacatgttagaatcttttttcaaaaaaaaaaaaaagcatataagtatttatcattgtttacaccaaaagtagccctgatgacgtggacatcaatgtttaacatgtggcaagaaagatgtcatcttggagttaacttcaggaggggtccctagtcttgcgtcaaggttaacttcgagaacttcgggatggaagttcgaacttcgataacttatttccaattcactatctttcaatattttatgccatgaagacatggagcaatcaaatccaggccacgggagctgaaattacacgaacatgcacccccagaagccctaggcacttaggtcacgtttggttgaaggtaatgaaatggaatagaatggaaaggaaacaattttcatttcattcctttgtttggttgcatat

SEQ ID NO: 158343 - DNA, 501 bp, Cannabis sativa
agaacttggacggccaacgggaaggatatcagcaacactaggtcagacaatatacgtccagctagatggaagataacgcctccaacccttctttagttcccaaatataccgaacgttcccttctcttacgatttgctcagagtaagaatggtgttgcacttcgggttctggagtaggagaacatttgttactcacttcccaatccttgaagcttgaattagaaagtccgtcactcgaagaggacggactagcgcgaagacgaggttgatcctcatacagaaattgaagcagatcctggtcaatttggtgttcgcctccccaaaactcaccagggttcatctacataagacaacacacaagatgagtgtttggccgagatattgaacaaaaaataggcaaatatcccgaccaggactactcaaaaggttaaaaagacaaataatgcataaagattaagtcataacctacgagtttgaaatttttgggttaaaggctaaattt

SEQ ID NO: 158344 - DNA, 557 bp, Cannabis sativa
agagaataaaaatagagatttttttctgttttaggctaagagaatctaaaataaacatttatactatttaatatttacaaaaatattatttttaaagcttactaattacaaaaaatattctcaagtatataaactgagaaaacaaaagtcaattttatgggtggcggcaaaaaggttacactttacttacctactcattggagaagctgtggcctgtcttttagccatggagatgacggtctttttgcatcatccttttgtgatggtggagactgattcagagattgttatcaagaacttaaaaagggatgaatctatttgggggattgagaactatgtgcgatattacaagttcctctcttctttttatggctaattgtaatttttcttgtatttctagaaactataactatgcggcccataatgtggtcaaatagacgtttgccaacaatattacgggcatggtagatatatctactatacttattaatattttttgtaatgactataaggtctaactttatttttatttataaatgtatttttttttttaaaaa

SEQ ID NO: 158345 - DNA, 634 bp, Cannabis sativa
tgggttttaagagttttgttcattttaaccaagctttattggcaaagcaagcttggttaattttttcaaatcccaattctcttctatcccgtatactcaaaccttgatattttaagcatacttccttccttgatgctaatttgggttcttacccatctttaacttggagaggaattatttggggtaaagagcttctcccaaaagggcttcgatggaaggttggtaatggtgaaaacattctctgtgcatcaagtccttggctgcctggaatcacttcctttaagccactggttttcaatgggacagatatcaatatgaaagttgtcgatcttataaataatgatagacaatgggaccatgacaagctttccttgctattccttgattcagatgtttccaaaataataagcttgccattaacactcacttctcatcaagatcaacttatttggcatcatgattctcatgggttctatacagttaaatcggggtacaagcttgctactgatctggaagatcaacaaccgaatggcagcagtatactagctcagcaatggtggcaaaagttttggaaaatgaaagtgccatcaaagattagaattttcttatcgcgtgctattcatgattgtctccc

SEQ ID NO: 158346 - DNA, 663 bp, Cannabis sativa
  modified_base (355)..(371): a, c, t, g, unknown or other
  modified_base (421)..(444): a, c, t, g, unknown or other
taaacctagcagttgtctataaatagaaagtgatgtctcacaccaaataaggcagtaaagcaattatttagtaattcaagaagttgcctctttcagaaaattgagcctttccttttctttatatagccgaccctcctcttcttcttcaagagaatcataatttcgaaaccctagttaaagagtagtgcccacacacagcaaacagtacctcgatcatagtttggaagattgtaaaagatccaaatccaaaagaaggacattcggactcagatcttgataatactcttcaacagaaaggatacaagggttagagatctgagtggaagaagacatattatttcgctgcacccaatgnnnnnnnnnnnnnnnnntatatgtgtttacttattatcgtttcagaaagttcatatttaggatgttnnnnnnnnnnnnnnnnnnnnnnnntaagatcctagtaaaataaattccaacaactggtatcagagccattgtaattgatttacttgcaagaaattcggacttagaacgatttgtttgtgttttagatagtatcatgttgttttatgtgttatttgatgattgattgatgtttgtgaaattctgtgaaaaataattgattttctatttctggaattattttattggatagtttggaaaaagtta

SEQ ID NO: 158347 - DNA, 564 bp, Cannabis sativa
aggtgggcagcaacgttataacactgtctggcctctccttggttgcccctcatggtccctatcccagcctcttgagtagggaactttaggcacaaatgcctgattaacgtcaccgcgccgaagtccaccagggctggtcgggcgaggattgtgttgtaagctgttgggcagtccaccaccacaaatgtgaagtacttaaaagtgctttggggtgtgtctgggcacaaggtgactgggagcctcacttttcccattgggataagtgttgtcccattgaaccccgtgagttgggaaccactcggcgagaggtcccggtctgtgaggccgattgccgtgaaggcttctttgaataataaattcacagaactcccattgtcaattaggattctggccacaattgtgttggcgatgggagtctctatgacctgagggtcatgatgaggaaaacacactatctttgcatcttcttctatgaacgtgatgggttgatccattagtcggggcctttgagccgggagctgagtaacttcccaaacctcatgtgttttacgacccctacgtaac

SEQ ID NO: 158348 - DNA, 686 bp, Cannabis sativa
tcgtctcttccatggtgtgcgattggggatatcaataacattctcagtcaagaagataagaaaggtggacaaccttaccctggatggcttctagaaggctttgaaaaagctctatccgattatcacttgtttgatttagacctcacggggtacccgttcacttgggagaaaagcagaggcacatctctttgggttgaaattcgtctggacagagcaatggtcactgaagcttggtctctcctatttcaaggtgctaaactttttaatcttgaaacctctacttccgatcattcttctttatttcttgagccaaattttgctgatcaaatttcaaagagctaccgctttcgatttgaaaattcttggttgaaagaacccatgtgcttccaaattgtggaggattgttggcaacgggttggtgtggggggaattttaaataagttgaatgtgtgtgctcatgcgttatctcaatggggtaaggagataacagggaatttcaaaagaagaataagatagtgcaatgccgaaatgaagcttttgaaaaagaaaagagatgacatctctgtggctcggtatagcgaggttcgaaaacagctttttgctataatcgatcaacgagagatcttttggaaacaacgagctaagcaattttggttaaaagagggcgaccaaaatagcaaatattt

SEQ ID NO: 158349 - DNA, 568 bp, Cannabis sativa
acttaagatcaaggagaaatgttcattttcttatagctcttacaacagtatctctgaatgtataattcttagataatatatttagggtatagtctcagctaagttgttttcgacccttgccctgtgaacatgcatcactatttatagggctagtaagcttggagaagaagagttttgcctctcgtcacaatgcgtataaacagaaagatcgtgggatcaatgctgaatacaaggatcgtggaattgatgctagatacactgatagtgggatcgtgtgtatgccatatccctgtaatctatccctgagctatagggatttcgttgatgacacacaatgcgaaagctgaatacgctaagtgttggttgctctgcgcggattgctgattgctttgctctgggcatgccagcgaggcttctcgctcggactatccaagtggattccacgtgtcaccattcatgcgatatcatgtcagagtacaaaaattggaataacaaattgcaacaaaaaattgtatagaaactcctattgcaactagcgctgcagccactttagaaactcaaactgtaa

SEQ ID NO: 158350 - DNA, 765 bp, Cannabis sativa
  modified_base (252)..(259): a, c, t, g, unknown or other
  modified_base (713)..(716): a, c, t, g, unknown or other
gtgagattataatcctactaaatgtccacataatcacatatttaataaaatatgtctaattaaaatattactatattttctgggatattacaactagactcggctcgatgaggaatacaacccacactaagctattttcccaactcactactttttctagtgacatttttgtagctccgcccctttctggtgacttttcagcaacatcgtgtactattttgacaaacagttggcatgggtgtgatctactcnnnnnnnnggtcgttttgatatacactactcctattttcagcgacatttctggtagactaatttttaccgccaccgatagttaatgtacaccacttaggtgaggcttcagaaccctaaattttaaatatagtcatattatatgtcttcagactcagttttggatgtagaatgcgataatgataatgatttcaccatttgattgtataggtgagagtaatatctaagattggactaaacaattagagctcgggacttgagagcttaagatcgtcttttggacaaagtttaatgacttgggagaggtagagactcaacttgattattggacttgatttttagatgtgttgtataacattagacatattctaaatttttattatttgaaaattttttgaaaaattgaaaacttcatctgcatatttttctggaatgctcttgggcactgagtgccaaatatattnnnntgtgtcaatatttatgcaggttatgatttttgtgtttattcaaaataca

SEQ ID NO: 158351 - DNA, 563 bp, Cannabis sativa
  modified_base (412)..(422): a, c, t, g, unknown or other
ttcagcaacttactaaagtaaattgcttgcactagagtaagtaaattaccaagcataccacaagccataggtttagataatctcaaacctatattactaaaatcaagaagtttgttaattctattgaatagacttattttcaaaatttcctttcttgtccttgtaatagaaaacctttatgttactccatgtgaatggttttaacgatagttctcttggctttgcttctttgttccttattctgacttatccattacttgttgaaactaacaatagatttttattcacaagtgtctccgaagtcataacagggcgagttccttaaaaccctcccactacgacaaggtgccatgactttctatctaacaacataagtcttattgtcctcatcggttgtatcaagacaacagannnnnnnnnnncatcttatatagaataagatgataaaacacttttggattcaagaaaaaaaatatctctactgtgctactttgtttacaaatttagtcatactcttataaaagtactatttgttgaaacgaacactttcttatcttaatgac

SEQ ID NO: 158352 - DNA, 566 bp, Cannabis sativa
tttaactattttagctaaaatttagataaaaaaaatagagaccatcattggagatgctttgaaatttttattaaatcaatagtcatttgatattagttgtttaattacctaattggtttatattttctcccattttaggaattcaatttaatgctagtgtttgcagtggcaaaagtcaaacttttactagcgcatttacgtactgagaaaagttatttttgccagcgttttttattttgtaccagcaaacgttataatacatgttgatttgccaaccccttttgccaacacatcaaaagtagattttattttgccaacacattaccatacgtttgccaacgtaaaaatgtgctaacaaaaataatatttcttgtagtaactgtagggatattattattcttatatattgatgaatgatcttaattttgttactaatatcactataagaaatgtcacttttaccagtacaattcacttttatcaaggcatttcgcaaactacactggcaaataggtcaaagttttaccagcgtacatttgcagtagctaaaatctaacttttaccag

SEQ ID NO: 158353 - DNA, 685 bp, Cannabis sativa
  modified_base (57)..(63): a, c, t, g, unknown or other
  modified_base (578)..(591): a, c, t, g, unknown or other
cctatatgaccgagcttccaataaccagatctaaaatttaccaagtaaattctctannnnnnnaattcctccttgcaccactataaatttggaattgctctctcaattatatagaaggcgctatatgttccatggtatagatacgctatgagttattcattgttataatcctaataatcagtgatcctctatagatgatttatattgagtagggaaaaaattaccgttacatccttcaatgtattttatccttaaaacactttgcaacctataaatgatatttcagtaaactaatatagtcactaaaatgagcgctctatcatttatctctaattagccaagctcaaaggaaatcatcgtttcacttctatgtctggatagaagttatagattccgtatctatgattagcggtcccactcaattgaactaccatgtccttaactatatgtcacgagaagatccattggtcgactttaacgaataggttaaagaacacaaataataaaattgaactacaacctaaccatctcaggattgagatgatttgatttcagatcaactaggtgatattgaattnnnnnnnnnnnnnngtaagtttatcatatctagttcacatttaatatcggtcccttccggtgcatactccatacattcaacccaagcttactttaaccaatgccttgg

SEQ ID NO: 158354 - DNA, 665 bp, Cannabis sativa
ggaggaacccaggacaccaaccggaattcgggttcctacaggccatactgaaccggaattctagttctgtgcaggaaaccataaaaaaattcatatctgaaccaaaacaacctcaaaccatatcaaactttccagacctgctctatacatcccaaagaacatatccaaagcaagaaaacaaagcatcatgcataatacaaaaaatgccattaaagctccaactttgagttcaaaactcaagcttggttaaaccccattcacatgcaccaaaacctgtttgaatctactcaaatatacataaacaagcctctaaaaacaacagcaatcaaataccacaagcacaacaagctatttcaacatttcaccattgaaattaaagattttgagtctaaagctttacagaaggttaaatcccaccaactaacaacaaaactagcttagatcaccttaagtaaacatatttaaactacagaaaataacaacaaacctgcacagcagctacaaacattaaaatcaccaagcatgcacttatttttcttcaaatttcaagaacacatcaagtaggttactagaacttgtaccttagcttgaacaacacttagaatttctgaaaaattcttgaatttcaaagaaaaatcccagccctagcagccccaagccaaacc

SEQ ID NO: 158355 - DNA, 535 bp, Cannabis sativa
  modified_base (507)..(507): a, c, t, g, unknown or other
tggactatctccacccatctgtccaaccatctgattcaactcgctaagatagcatctgagtttaagcagctggagctaaaataagaagttaaacaaacaaacatggttagtaggtccaaaattaataatcgaagtggataataattctctaaaacacatgagtttatagaaaaagaaataccttgtttctttgctagaaatttagggcattggggtttctagtggccattttcattgcaatagaagcattttccttttggtatatcaccagtagtagaagcctttttctttttaactgttttcacagcttcaacaggcttcttgctattcttccacttcttcttgttcttgggtttggaagtagaggcaaagtttggctcagccttagccgccccattagcattcccataattatcagctttagatccctttttctattgtcctccaattaaattttcaaatgtctgaaggtcgttaaccaactcgtgaaagtcttgttccttcttnttcatgacataatttgaagtgtaaggca

SEQ ID NO: 158356 - DNA, 525 bp, Cannabis sativa
gttcaatctctatcactggtcagacacttagaacatgtttttggtattgtttttcgggtgtctatatgaacgatgcttatttgctacctctattttaaaatcatacatatttagtactttaaatttaattttttttaataaaattttatcaatacaatcaatagtaaaaaattttatgaatttcgaatttgaatataattatttaattacatataagtgagaactatttaattaattgataaaactatattgattaaattttattttagaatatcaaatatatacaatttaaaaatattaggtatcaattaagtattattaaaaactcaagataccaaacaaatatgtttttttataaaaatacaaggtactaaatgagtatattctcttgtttttggttttttgttttaaaaatatgttttaaaaaatagaacaaaaactagtttttgaagttttcaaaacacaagtgacatttggttagtgttttttaaaaacaatattgatcaaaagtgaattattttttaa

SEQ ID NO: 158357 - DNA, 509 bp, Cannabis sativa
  modified_base (30)..(54): a, c, t, g, unknown or other
atttctcatctttattaataagtaaatctnnnnnnnnnnnnnnnnnnnnnnnnnagggcataaaacccaacacaccccatgtccaaaaaatgcttaggttcttaaatctgtcacacactaaaatatgggtgtaccaggcatatgtattgggcaatgaacccatacttttaaagaaacattgcaaatggactaagagtttgtccatactcaattttatatttgatctcactatcttaatatgcaaaatgcactatttctctacttaagatttatatgtctttgaaacatataaatctttacttttgcagaagttaaatttatgtgagtaatcgttaaaaagatatgcaaaatttgagtccatgtctacacaattaattgacttgatttctaatatgatagaactctaatgtgcatcgattttgaacttgttggaatacattttcttaatgaaattcacacaagttctaaataaagttagtaaaattaagtgtaatgaatatccccaccat

SEQ ID NO: 158358 - DNA, 592 bp, Cannabis sativa
  modified_base (267)..(268): a, c, t, g, unknown or other
cactctatatgtaccatgatatagatacattatgattatccatattgttacaatcctaatagtcaaagatcctctataggtgatctatacttaataggaataaatttaccgttctacccttcaatgttttatcgttaaaatacttagctacctataaataatacttcagtaaactaatataattactgaaatgaggcctcaattatttatttctattcagccaagcttgaaggaaattatcagttcacttctaaatacttatagaanntatagattccatatctatgattactgtcccactcaattgaactaccatgttcctaagatgtaaatattcgccataaccatttgttagcttccaccaacacctctaagaacataaataatacaactaagctgaacctaactatattaggattaagatccatagacctaagatcaaccaatgatattgacatagaaagatataacggtaagattaagatatcttatttaatttcactatcggtccaatcaaatgtatactctatacatctgatactagtaaactttgtcaattccctcgaaaggacaacacttatccaaggtgtaa

SEQ ID NO: 158359 - DNA, 602 bp, Cannabis sativa
  modified_base (255)..(270): a, c, t, g, unknown or other
  modified_base (557)..(559): a, c, t, g, unknown or other
aaatgcattctgaatccaaataaactatcataaataattagttcaatattaataaataattttcataataaagccctaattatctgctaattttcaaattaaagctaaggagtctttacaccaaatatatttagagcttaaagaagacaaaagaaaataaataataaataataaatagataaagtttatgtgcttcaagcgttaatgatacttagtccacgagtctatattattggcctctttgggcaaatgttnnnnnnnnnnnnnnnngctactaaaaagactactctgcttctcttgagagagagctttctaggaattttttacagagtgactataagtaaaaattgttcccccctgcctgaagaaaaatgagactatttataggcacatgtggggtaaagggcatactctttacctacctaggtttcgtactccatatgatactaaggtctgtgctgcgagaggacaatctgaccattggctgataggaaccttcttcatcatgtggtgtatagccgcttgcaaggaatttgtatgtaacaccctaactaccnnnggcgtattacgtgatttttaaatgtactgtgcagctcgttgct

SEQ ID NO: 158360 - DNA, 572 bp, Cannabis sativa
tgccttggaatatatttttcagttcgtctagctgtgcctgtacggctgggctaacttgctgggcattctggtcgattttaatcacataagtatccctctgagcgggaatttgagcacgggctttgggctgaacgatcgtcgtgacagtctgatcgtctactcctctccttctgttccaatcattcattaggttgtgagtcatgcccaacctttcgaatacagaagcccctagctgccttagcgattgatttgcttggttgacaggtggaatggcaccattcacctggttgtaaccatcaggtatgacctctcccgatgaattactagacaaggtctgcctgcctaccactttgcccacaagtggaactcgtgaccgaggattgggcggctgaccatttgtagtctgtgaagtgttcatcgctgaatcttcgtctgtctcacctaggggtttgacactcggaggttgctgagctatagtttggtaggctttttgtatcagcacggtagcttgccgactacgattttcaatctctgtatgatgagcccttaacgcttccatctctctatctctc

SEQ ID NO: 158361 - DNA, 845 bp, Cannabis sativa
  modified_base (818)..(818): a, c, t, g, unknown or other
cctagcaattctatggcagcaaggaattaattagaatcccttttcaaatgaaggaaatcaaaagaaataaagaaaaaatcaaaaatcgaggaaagaccatcttcctttctctctctcctttgttcggccatagcaaaaaccagaggagatcacctctatttcagctggttttctggatttttagctagggattcaagtgagactcaagttgaggtaaaccctagaccattggttctttgttttcaagctttgatttggttttagtttgtgattttgagacataggggctgttagggttagaaatgtttagggttcgaatttttaggttcatttgagttgaattcactttctagcagctggttttgaggtttggtttacgttttgtgcaagtttgtgctttgagttcaaagctttgatctctaatggcatgttgtgtttcattgggattttctatgtaatactggctggaaaattttttctatgcattggttaggtgctctggagggtttggtcgcatttggtggaggattgagcaagaaatggaaattttggaaagaattggtgcaaaccggctagccggttttggcagggctcccaaatgcgtcattttctcgattctcgtccattttagtgccgtagttgggtgtttccctatttctagagttagagtaactcctagagagtataacagaacctagggtcatgggttcgggtatttcggattagggttttgatcttgtgatttacccgattttattatgtgattagggcatccattttgcaccagactttttgttcaggtcggccaacacacttgnatctggaaagaaggtaagaactgtgta

SEQ ID NO: 158362 - DNA, 619 bp, Cannabis sativa
tcattctaaccttccaataaggatagttagaatcattgaggagtggtgggcgaacaatagaagttccttctgcaaagggaaacatattgaaaaaacataagaaaacatcaaaaggatcacactaagagtttagtgtcctgctctgataccaattaaaaaaccatgttcttgcaaatgccaataattttatttaataacagtaaagagaaaaacaaaaataatagtgcagaatttacaacttgacacaagagaattgtatgtggtatcattgttctttcaaacactactagtccacgtggccatgctcagacaatcaaattaattagtaaaatatcaaagattacaaaagcaattgacttaaacaaatttagactccctctagtgatttgccacaactctttgtaatccatcttgctaatctgatctctgaaacacaccaagtagtgaactcccttcagctattgatgtgtccttacttcctcccgaagtaaggcttaaacaaatgttctctagaagatatatgctcacttcctcttgaaatgagacttggaaaagtcttctcccgaagacccacacttgttcaaagcttctcttcaacctattctaagaatagtatgag

SEQ ID NO: 158363 - DNA, 880 bp, Cannabis sativa
cgtctaataagaaattaataagaaaatattaagtgttaatttaaaaagaagaattaaattatagttaaatagtacttgtacatacttgtagttccatggtatgaagaacatctgagttttgttattcattctattcaacaattcagcccatttgataacagcttcttggtcgacaatttcatcgtcgtccgtggcattgagtagctcttggtcaaagaacttgaaatactcccgcatatttgttaaatcatcccaattgcatgtacacaaatttatcatggttaagtgttatatttaataaattgggaagatatgtaaaacatacttaattccaaaaataattatgtaaaacatacctaattcgaaagatcatgccttgacattcaataaaatttaaggttccaaatttacatcctctgatgacaagataatatgtgtgcgaggtggcatgaagtcaggatcagttgtaacttcaacaacgctccacttccctttcctccttataaattcttctactaaaaagtgaagacatacaggtatttgagcctagacctccggcttgaatgtttcattcttgtccacttgatctatcctgacatttgattatgatccagccaaagacatagcaggaagagttgatatctgtttccctttattcggtgatctgtgaggggttgctatctgcttcccctttgacgatgatctatgggtggatgcgatattctggaatatggcaacctacaaaatatgaattataacatcaatatacaatgaatattcattaatcatatatgacaataaataaataatttttaccttatccaaatttaaaattaaatgttttggccaaggaaggaatgtgtcctttgtctcatagaca

SEQ ID NO: 158364 - DNA, 794 bp, Cannabis sativa
atttggaaaaattaatagcctaacgtgaagccctaggatagatattaaagacctcctggagagctaaacaagagcttctatcagcagaacaaaaaagaaggttatcatcaacaaaaaagagatgagaaataggaggagcatgtctagagatagcaatcccgttaagaagaccagcttcctgcctaaccctaagaagagaggacaaacccttagcacaaagaataaaaatgtaaggggataagggatccccttgccgaagacccctagaaggtttaagggaacctttgacaacaccattaataagaaagaagagattagtagtagaaatacatttcataaccaaagtaacaaaattaatagggaagttaaagtggaacataatactctccaaaaaatgccattaaacgcgatcaaaagctttagccatatcaagttttagagcagaccaaccccttttaccattctttcgagagttaatggcatggataatttcttgggcaataagaatattatcaaaagtaattctcccaaaaacaaaagaactttgaaaatgagagataattttatcaagaaccactttaagacgattagctagcactttataaataactttatacatagtagtacaaagactaatgggtctaaaatcctttatagaatgtgcatgttgttgcttaagaattaaggcaataagagtagtactaatatccaaaaaatcagcattattatttaagcaatctaaaacagcacggacaaatccaggaccaagagtatcccaatttttctggtagaaa

SEQ ID NO: 158365 - DNA, 530 bp, Cannabis sativa
  modified_base (414)..(419): a, c, t, g, unknown or other
  modified_base (484)..(491): a, c, t, g, unknown or other
acctgaatatgagacagaggcgttggctagagttggtgaaggattatgattgtgaaatcctttatcatcctggtaaggaaaacgtggttgatgatgctttaagtagaaaaggctagagtcagttgagcactgttcaacagatctcccaacagctagcaaatgagatgactcgagctaacattgagtttgttgtggggtagttggctaatattaccctcaatccactctcttagagcgaatcaaagaagtacaaatgcaagattttggaattgataagaacccgagctagggtttcgcctgggaaggctagtgatttctcagtggatgaaacgggaatattaagattctagaatcgtgttttagtgcccatggatgataatattgaaagagagatcatgaatgagtctcatacgnnnnnntactcagttcatccagggtcaacaaagatgtgtcaagacgtgaaagccatgttctggtggccagnnnnnnnnaatgacattgctgagtatgttgcaaggtgccttacgtgt

SEQ ID NO: 158366 - DNA, 564 bp, Cannabis sativa
acaaagagcttgagccgtatcacctagatattatgaataccctttttccttcaggattcaaaaacctacatgtctcgtcttatgatggaaccacaaatccagtattgcatttgaataactttaacatgataatgcgagcgagtaatgtgacaaacaatttatgctgtattttgttccccacctcgcttgttggagcagcgagtagctggtttaacaagttcactcgtcattcaataatttcttgagagcagctgtccagggatttgaagaagcgattccaagctgcaagggataggcaacccaaagcggccctgctaaccaatataaagcagcagcctgacgaaacacttaaggcgtactaaagtcgttttagcacggctgtggctagggttagaaacttggatgacagcacgcaacttacagcctttcaggcaagaatctccacggatccattaaccaccgagggtgagttgtgggatgatctacaaggacgtccagtaagaaacatgactgagctcaacgagagagctcaggtgtttttccaaaaggaagaagcccgaaagg

SEQ ID NO: 158367 - DNA, 638 bp, Cannabis sativa
tttttttttttttttgttgaaaaagtttaacattctatttttttgttgaatttaatttttaaaaaaaatttataactaattgggtaagattaagttcatcaatcacatatatagaaaataaattatactaactttgtgacaaaccaaaataaaagaacattgatatatttaatgtaaaaatatatcacttacaataatctcttaatctctaaaccatgtgggacttttgtgaagtgactctcatattactaaaaacatacaaaaatgtggaaaaatgagaaaataaagatatattcaacaaaaaataataatataaaataaaaatatataaaaatatatgctatttttatttgttaaaaacttaaggattttttttttaaatttaaatatttgataaagattaaatagtgcaaaaatatgtgaaaataaataatattaactttggaacaaataaaatatatattgttaagtatactgtaaaacttaatttagccctaattaattcatgagaatcaaacaatagaatatagattagcggaagcgtactggtgtccataaaatcgacatttgattggtatgatcttccaatttgcatcaaaacctttctctgaaactttttctcttggtgatggggatac

SEQ ID NO: 158368 - DNA, 617 bp, Cannabis sativa
tatggaattaccaagtacgatttactaggcactgtactctaatgcgtgtgattttgattcagatcaaatatattaatagacatttagtaaaggtactgtgtataatttagttatgcacgactggattgatagaactaatatcttttatcaacgtgtcgtttattataaaagattttcacatcacaacgataatcattaatagatcattcttaatcttcagtatacatgtgaattcatgtttatattcattaagttctttaattcactcattaatgtttctcagagaagattattcttacaacttctattttaggagcttaataacatgagtggttgagaacatgttatatagaaatataatctaagctttccaaaaggatcggatattcattctcttatagtgttaattctgtgagtgctaacagtttgatctaaatctataattagattatagattaactgttcacattgagttaatgatacataaggaatcaacaggtaattagaagggtaaaatagtaatttcgaccaactataattattaactaataattggagggtgaactaattatattagttatatcaatagactacacataagaattatgtaaatataa

SEQ ID NO: 158369 - DNA, 632 bp, Cannabis sativa
  modified_base (67)..(67): a, c, t, g, unknown or other
  modified_base (569)..(595): a, c, t, g, unknown or other
aaaatctaacatgaacaactctggctactgagccctcatgtcagactctaactcccaggtggcttcntccaccttactgtttctccagagcactttgaccaaagctatggtgttattccgaagagctttatcttttctgtctaagatttgaactagttgttcttcgtaggatagatctagttgaagctcaaaattctcataactcagcacattagtagaatttgaaacatactttcgtaacatggaaacatggaatacattgtgaactgttgaaaatattggaggcaaagctagacgatatgccaccagtccaatctttttgagaatcttgaaaggccctgtaaatgtaggacacaacttgcctcttttcctgaaacgtctgatcccattcatcggagacacctgtaagaacacatgatctcctatctgaaattccacatttctacgcttcgaatttgcataactcttttgcctactctgagaggcaagcattctggccttcatcttttctatggcttcattagactgttgcacgaattctggacctaggtgttgggttttatgccctnnnnnnnnnnnnnnnnnnnnnnnnnnnatttacttattaatatagatcacaaataacatttaat

SEQ ID NO: 158370 - DNA, 572 bp, Cannabis sativa
  modified_base (43)..(51): a, c, t, g, unknown or other
attttcatatatacatatagatttgacgtataacaatataaannnnnnnnnctcatccaaactaaatgaaaatactaattagatagattgaatgttggatgtattgaatttttagacacctcatccaccatctgatccgatccaattggataattaaaaataacatccaatccgatccgatcgcaattggatattcaatgtttgacggtcagttgtaattggatcggtcagttctcattggattggatcgatttatgcacacccctactgctatttaccttagaaaaataaagattagttgagcggggtaactagactaaatttttgaaatttttagttagttaattttgaatagtttatagtaccaaaaatggaattttaattaaccatacgtatttaaaaaattttaaacttacttttggtagtgtaaataactcaatttttttaaaaaatttacatattctaactataacagtaaaaaaatattgaaaaaaatattctaatatatatttttgggtgtatctacaatgcacccccttaaaatagatatattgatgcaccctctacttgtt

SEQ ID NO: 158371 - DNA, 787 bp, Cannabis sativa
agagagagagagagagagttaacatgtaaaagagactaataaagaaatagagaaaagatgacataagcataaaagtatttttgtaaataaagagtttttttgaaaaataaaattgaaaaacagattttataaaaaaattcaaaaaccaaatataaaaaaaaatataaaaaaaaagccaaatttggcatccagtgtaagaatcccaattaaaaaagctaatataagtatgaactaaaattattcccccatagtataatttttcattgtagttaggggtgttcattggatcacatctaatgaatttagacctaaccgatctaatctaattatttattggatattgaattttgtcatctgatccaatccaatcaaattgagtcatccgatctgatccgattcaatggatatattagattggatcggttctaactattagatgcattgaatagttttttatttgattagattggatccatccaatctattttagttatcatttaagttaatttcattaaaaaaaacacatatatatatatatataaaaacataatttaaaacttaataatctaacatatataataaatattagtttagtctaacttaattcttatgacctcataataaaaccgttaaaaaataaaatttattcaatacgcattgataatttttttagcctttagaaagatgagaattaatattttaaatctaagattttttttaacctcatgtgttaaatgtatattaaatcaattataaatgtattttaaaatatataaatataaatgaa

SEQ ID NO: 158372 - DNA, 534 bp, Cannabis sativa
tcaagtgttaccaccagcacttgtgtcagtggtgggtaactaggggtttgttatgccgtatagagactctgtatttgagcggtttgtgaagttgcagcctccgaattttcttggaggtattgatataataaaggtcgagtagtggatgagcactgttacccgtatccttgataatatgggggtggtgggaactgaaagagtgaactatgcagccttcatgttacaagatcatgcccacgttggtgggatatcgtgggccaaacccgggatgtcagtgtaatgacttgggaagaatttaaaagtttgtttgatgaaaagttttacaacatcgctgtgagaacttcacacatggaagactttgtgaagcttactcagggaaagatgtcagtggccgaataaactctggagtttgatcggctgtctaagtttgctagtgatctggtgctcacggattttgccagaaaacagaaatatgtgagatgactgaatgccacaatcagtcgggacttaaagattaccacttcacatgacact

SEQ ID NO: 158373 - DNA, 654 bp, Cannabis sativa
atacatacattccaagggcaagcatgtcattagacacacattattcaaataatttcaaattgttaacacataattaaaaagtcaataaatcatcctaaaattgtatttcggccctaaacccggttcggcccaaaatattcggttgtgactataccgcgctaacttatcagaacacacctgtaaaagaataaaacatgcatactatataataatatagttccatagcacatcataatataaatttctcagttttacccctcttaggtcaaaattaccaaaatgcccatggctcaccaacggagtcttaacatattataaatcataacaatttacatataataaattatataataatataattccacaattatacacaattaactagttagagtttgctaatctttttccttaatcttagggtattacagtaaatgacaagtaaaagatataattatatctcttcctttctcctttttactagatttagaaattcctataccaataggaataggaatctaaatttaaaaggtaacacgaaatcttaatgctattaagattaaggaaaaattggagaattaaaagaaaaagatatatgataagcaaaatatccaaaaaaaaaaaattctttcttttctctctctaatttcgaatggc

SEQ ID NO: 158374 - DNA, 518 bp, Cannabis sativa
ggttcttgagtggctgggaagacctgtcttaagactagatcaccaatagcgaattttctatttttaacttttgagttaaagtgtttagccattttcttttgataatctgccattcgtatttgagactcatcccagaattcgtcaatctgatccaacgcttcttgtaataaagccttgtttgttgttggatcataagtcgttctcctgtgggatgggaatagcgtttccttcgggaccattccctcactaccgtatgccattgaaaatggcgagtggccggttgtgggtcttggggttgtccgataggcccataacactcttggcaattcttcgggccaattgtttttgcaggccagcaccttttcctttagagtgacttttaggatcttattgaccgcttctgcttgcccgttcgtttgtggcatttccatcgcggagaagcttttgacgactccgtgttggttgcagaagtcggtaaattcttcgcagtcaaactgctttccgttgtctgagactat

SEQ ID NO: 158375 - DNA, 1438 bp, Cannabis sativa
  modified_base (804)..(804): a, c, t, g, unknown or other
tttgccaacactacatgccacatactatacaattggatcatgttgtcaaaaggattaaatccatcagcagctaaacctaatcgaacatttcgcggatctattgcaaaatcaagatgtctgctatcaaagtttttccatgcagcggactcgacaggatgacgcataacaccattttctttcatgcgcccagtaccatgacaaaccatctctttagctgtacgtcttgaactatataatattttcaatcgaggagtcaacataaagtaacacatcaccttatgcactatttttttccccttgtattctcatcattaacccatctactggtcccacacattgggcagaaatctttgaatgcatgctcattgtaaaataagcaacaattattcacgcacacatgaattgattcgtacccttggcctaatttatctaatttcttctttgcctcatagtgtgttgcaggaattttgttatccttcgaaaatgcaaatttaagcaatttcaactattcataaaaaatataatttggtattttccccaaaattttcaagtgcattaactttgctataaagttaagagaggatatccaatcgcaacccaggtacaactctgcctcgatctcctcaaacattttatcataatattgacccctttgaataccatcatcggcggctctttctttatcgtttataggagggaagaaatcttcaattacatcaaccatctcatcgacatcaacattgttgttggcctcaactggttcatccaactccccgtggtaaatccacctctcataactgcttnaaaaccctttgtaaagatatgtgtctggacaatgttcaaaggatacagtctggtattcttacatttaacacaaggggagaaaattcttctgtcacaatctttgtgattagacgcaagtgccataaagacttggagacctttccagtaagctggatccttacgatttctcatggtcactcaagttttatcgattttcatctaccaaaaaattataattaataaattataatcgaatttgtttgtgtgaaacaaattttatgatttatgtacaagttgaactaatggtgctattattttattttatgatttttttttcacttttagtttgaatagtattttgataattctaaaaaaaacattgagatacttaaacttataatatatatctttcttttaataaaaattaaatattaaataaatttataaaaaaaaaataaactttttctagttaaaatacttagttttaaaatcaaatgcattgaatttaatatgtttttaataatacttaaatgtgtaaaaaaaatataaaaaaattattaaattaaaaatctaaatatttaatatgttttaaaaaaacaaaactaaacttttttttagtctacttagttttaaaattaaatgcattaaattttaa

SEQ ID NO: 158376 - DNA, 1049 bp, Cannabis sativa
tttttttttttaaagggcccaattttaaaatttcgcacaaggcccccaaaatgcttgggctggccctgccattgggtgtacaacaattttacttaattttttctctttgtttttaatcattattttttttagtttaatgatttttttagatacatattcttaattaataagtatttttaacaacaaaactatataataaacaagaaagtatggtgaaattttttctctctgcacaagttatggaatgttgtatttctgacactgatggtgatgatgcacgtcccccttaggggtacggtttggcaggaatacgcttttgtacgacgaggacacaacgcctcttgtctggaaagacttattcttttaaacctttttaggctttagggttttttattcccgatttcatccattaaaatatctcccttattaacctatcaccttgttgtttcttaccctttctagcaaccaacccgtagatttattctcatttaatatggtgtttggtttttcttctactccaacccgccatctttgtctattgtttgttaatatggattctacggtgatttaaaatcctctggaggtggtgttggaagaggtggttagcctcgtgaaaaatgtggatgtcaatgatttctcttttgaactagtcctcgatgatgtcactgctaaggctctcattcataaatctaaagtgggaaagtttttgtgaagcaaaagattagtaatggtcgactttgctctatactatctaagatgtggaatgttagtcctagatggcgactccaggagattcaacccaaaacacatatcttccagtttgctaaggaagttgaggcctcaaaaattgttgggattggcctgtggtccccctgtggaggctttttattggtgactatgatgccatggaccttgactgatttacaaaatgtgaggatttgtgtaacgtcctcgcttcaagcctccattgggcccttacacccagagactcatggctcttatacacgagtacgccactctggctgcttcctagattgatgactgaccct

SEQ ID NO: 158377 - DNA, 548 bp, Cannabis sativa
gagagaacatcagaaataccagtcgagattgtgacttggatttctcacccttttgtatcaatcttcttcaaatagtgcagatctgaagatcgtcttcaaggcgagctcatcaaaggacgtacccctaatttagggcgaacctctataacttctggtgtttgattttttttttcactctaacctaatatgttgtgtttgatctttgtgtgtgtgtgttgtgtgatgtttctgggatgatttctaggtgagatcgatcaagagatcgggaagaatctctggttctagggttagagaaccagagagaaggtagagagagagagagagtgtgtgtgagaaactctcgaaagttcgatgtgagaagtgagctagggttagctctgtttggctttggttttgttcaaagcagaacgacaaatcgttttggttgaaacgatttgtcgtgcaggtaagaacgacaagttccattgtcgtgtgggaagaaacgaccaagtttctttgtcgtttgatgcttttgtttaattgacttttctgggacaattttgtccctg

SEQ ID NO: 158378 - DNA, 1812 bp, Cannabis sativa
  modified_base (1770)..(1778): a, c, t, g, unknown or other
actgacgtagtccacgccctcaacaaggacgtctccgtcagcgtcgactgtctccctagcctcattgtactccccgtagtttgggggttcaacctctggttcttcctccgcctcggaggaactgctaggacgtacgtcgtcctgctcctcaatctattggacctcaatgtccccttcatgatccctctcctcctggatggctggatcctgttcggcactgggcaaagtggcgtgccgagctacttgaggatcagatgcgtcggccaaacgagttgttttcttggtacgagccatcattctatggctggatataagattttggggagaatgtccttcactggaagaaggtgggctatagcaaagacgaggatggtcctcgtgcaaaagttgaagcaagtcctggttgattcgatgtcctctctaccaaaaatcacctgggttcatctacaaaagacaacacacaagatgagtgcttggtcaaaatatcgaaccataaacaagaaaatatgtcgaacatgaatactcaacagattaaaggacaagaatgttcgaagaaaagtcaaaactcaagaagtttgaaattttcccgagttagggcaaaaaaattcatgaagctaagaataagcaagatgaaagacaggcattacgcagttcagaaagcaagcattatggactgtaaaattgcatgaaaccatgacaaagaagaatcgtagggtttctgaacctagggtttcctaaatatttttctacagcaaagtcgaaggtgcattcaaaatgtaaacatgcaaaaataagcgtaaaggaaatcgaaaacttactcaagagtcagatatctagattcaagtaatgtcaaaccaacgagcagtttcgatgaaggcacttcagtaaacttgaagccaaaaaacctctcttttcgctctgaactcacttagcaaagaaggatggagaagatgagtttatgtgccaatgctggttgatctttatgtgccaatgctgggttgatctttatgtgccaatgctggttgatctttataggcaagtcacgaagatgactgggcgtccctttcggtttttttctaataaaagcaaatatgggaaataaaaaataatcaagtgcagccatcaaccgtggtgagagaaaatcggattttgaaatagtaattgtcagagcatttattagcaaaaaaccgaaagggacgcccagtcagcctcacattgagtcttaaatagacgcgcctgacacgtgtccccatccaaaagcagaagcagctcggatgaagtctacacgcaactttagaagtcccgtacagacttgggggcaaatgttatcctaatttttgtactctaatgtggcatcgcataatggtgacgcgtggaatcaacttcgagtatctgctcggagggcatagtctgaacaagatgcctcgctagcatgcctaaagcaaagcgattagcaatctgcacagagcaaccaacacttagcgaattcaacttttgcattgtgagtcatcgaagaaatccctataacttggggatcagattgcagagatatggcatgctgtccaaatcccacgatcagtgtatactgcatttatcatgtaatctttctacttatatccattgtaattagaagggaaacacttcctctccaagttcatagccctataaatagtgatgcatgttcactgggcaaaagggggaaaacaatttattcgatactttacccttgagatattatctaagaattcatattcagagatactgttgtannnnnnnnnagaaaaggaatctttctccttgttcttaagtcaa

SEQ ID NO: 158379 - DNA, 523 bp, Cannabis sativa
atgaagaaagatgtcagcaagagggacatgacaaagttttgtcggttgcacagagactatggccatgacactaatgaatgctagaacctgaatcgggaaattgaattcctaataaggaaaaacaacccacacttgcagaagtatgtcaagactgatcagggtcagaggaatgacaataaccaagagttactacctctactggtagatgggcatatgcaagtcatcattggaggcccgcatattgctagagattcgggcaaagctcgggagaggtatgcccgaacagcgcaacacgaactagaagaagttatcctggccgtggaagaaaggaggccgaaagttccacgagcaggagaaccgatcataaccttcaacgatgaagacgctgtcaaaattaaatttctgcacaacgacccactggttgtggaagtccaaatagcaaacaaaatggtggtcagaaacatgatagataatggagcctcttccaatatcttgttcaaaactacttatgaaaagatgggac

SEQ ID NO: 158380 - DNA, 581 bp, Cannabis sativa
gtagccaatcccagcctgacatttctaggttcaacagcaaaagacggatgaaggcggtcaaaccgcttccattcttcagcatacgcaggatgcctaaggacaccgtcttctttgggtcgctgtgagtaatgccacagcatatcctccgcggtgtgtcttgagcaatataatcgttgtagtttcggtgtgagtgggaagtaacgcataactttgtgaggaacttttttccccttacctttttttttcacccatcttgattcgccacatacagggcgaaactctttcttctcattctccttccagaaaatggcacaatcatacttgcacaaatctattgcgtcgtaacccaaacctagattgcgcaatcacatcttcgactcataatgcaacttcggtaattttgtcccctccggaaatagttcaatcaagatggacagcaacatatcgaaagagtgattactccacctattagaaaccttgcagtgcataatctttacaagtgcattgagggccgattttttgcaaccttgatacaactcagactccatctccttaaacaagtcatcaaacttgttgttgtc

SEQ ID NO: 158381 - DNA, 1448 bp, Cannabis sativa
tatttaggcccaattagtactgggcttattcaatgaataacaattattcaattaaaggttaaattcctttcttttgggccttgtgtgagagttaaagagtcttagtaggagagaagttgaggaataccacttctttgtatctattaatcaaaaataccctcatattaaattttattaaaatatacccacttttataaataatttacccaatatatctgcaccctccacttatttctagcacataatttatattaacctaaggagtataataggaacatcatctataaaagtggatattttttaaagaatatgaaaataaaggtaaaaattaaaataaataaagtaaaatgagtatacaatgtaatttcctcccacagtagtgggtatgacgtactaaacccaaccctccctcacatgaaccacccaaactgtgaaggcccatttaccttatttaaataattatattagtttaacttaattacaattgattagcaacataattaattttaaaaaaatataacaaataattttttattagattatttttaaattaatctagaaaaacacacttagtttaatgaaataaattctagataggtaatttctagcaactaatttatattttctaatatttaattaagtagaaaaatacatttaagttgaagattgattattaattagttttagatcaacttaaattagtatgtttttcttagatattaaaatacaattaataattaaattgattttattcaagatacttaatttttgtttctatttaaacaaatttaattaaacaggaaataatatttaagctggaaattttctaattcagatcagctaaaattagatgaattttcaaagtatattttattttattttaataataattttttttttaaattttgaaatgcatttgattattaaattcatatatttttgaaattttgaaaattagattaaatttaaaaattaattctttaattaattttagatcaacctaaattaagtaattttcataaattattttattataatatatagactaatatattttaattagaaaattagtaattagtttatgaaatgtctagatagttattttctatataaactttttgctatttttctagatatatttaatgaaaattaatatttaagttgattttattcaagacacataaatattagatattttttatttgattaaataaaaaaattatatttatgttgaaaattagtttattaattttagatcaacataaatcagaataagtgttcaatatttattttattttatttcaataaatttgaaaatgtaattttttacattggatttctaaattaattagatatatatatatttatagtaaattaaatttgagttgaaaattaatattttttaattaattttggaccaacttatttgttatcccaaatttggcact

SEQ ID NO: 158382 - DNA, 558 bp, Cannabis sativa
acagaaggggggttacgccatcaggctttaatacttatggcagttccaatacgtcttatcccatgcgggcattaaatgcgaggtgactgttcagataggatttgatacctcccggaggtgctatgttacggtcttgctctccgggagtatgtgaacccttcgtaccttctccgggaggcatcttaaaggctgatccttttgattaagaagacttagtcgaattatctcaaagtcttacttcttcaatcctcgtgtcacggtcggatcggtccacgtattttggacaaaattaagtgcaacatttaccccccaggccttgtttggtggaaagtaaacgaggcttgcttaggtgcctccggttgtcttattaacttcctggcacatgctttgggcgcgtggggatgcatttatgaccatcattactgtagttattcactttttccagtcaacgattcgtttcctatcccattaattgatacggcgcattaaatgggtgtcagtcgagtactcaaacgtttcctaccgccttgatgaacgcttgtcccaaccgttggatct

SEQ ID NO: 158383 - DNA, 587 bp, Cannabis sativa
tactcgtgagtatgcttaaggagtggaaacaacttcaacatttactcaccttgcttttgacgtatggaagtaaccgcctcactaatatctatcacacaacaattaaaggagaactgtgagatacattgtatcttaacacttaacattttccctacaaaggcggttgaaaaagatgtcatgcaaccggcgagtgcaatctaataaaatcagcataattgttaacaaatatagagaaagaatggttaaacggttatttaatattatcttatgtgcacaaagataaaacgtggggaatgtccacgttttatgaacgattactaatgagtagatcccaagggaataactgtcatcccatacatctataaatagggacggaatccatggtaaaaaggacggtcaattttagagagaaaagaaagatactatcgctaaattacaccattatattctgtattcaaagatatttatccataataagatggactcgtaaactatgaagagttaactttaaaaccacgttaaaatctccttgttatttattctttatttaataattaattgctatataataaattatatatttatta

SEQ ID NO: 158384 - DNA, 540 bp, Cannabis sativa
  modified_base (360)..(361): a, c, t, g, unknown or other
ccttacccaaatcttgggaatctaagcaccgtgactaccactggatctaagcgaatttccctagctctaggtgtttcgcctggggtccatactaattagaacggcctacgtaaccaagagctagtctggtcagatcgtgattaagtaaaaacttgccgcttatttggaaattaaaacatgcacctattctactttcaagctattaacatgcttcctaactggcttttcttaaatcatactattaaaatatactattaaaacaataaaagcttattgagctgtgaaacgaactgatcgctgatgatgattgtacatgtcatgacgatctttaaaagaaaacctggcggctctgataccaanntgtaacaccctaactaatttaggtgtattagcgggatttttaacatactgtgtagctcgttgttaattaatgagattaataaaaaaaatgcgattgattaaaatttgcttatttaattagaaatataaagtagtacatttataaaatcctgggatcccgttacaaaatacatttacaaa

SEQ ID NO: 158385 - DNA, 538 bp, Cannabis sativa
  modified_base (184)..(187): a, c, t, g, unknown or other
ttaattattcctcttagctttttcattttgaatttgcttgaatagtatatcattggatgaatggtttataaatcatatgcttatgatgtcattcaaattctcttatgaagttgaatggtgcaaataactatattcccgacattctatctcaaaataatttaaatcctcgatcttagaaatctcnnnnttgtatatgtttactttaggcaacttagacttagagttagattagtagtggtggtccacgaaagaatattacttagaaatatttggtatacatttaagtatttgacttttaattttagattccaaatagaaattttaaatttcagcttcctagaatacattggacaatacagtatgactttcacaagttttaatatccattttctgtcaatggattcaaattggatgtttatgtatcgaatttgagtttattattctattactaggatccacttggactattctaagaactttttattgtaactaaacctaagtcatcaaaagacaaaaaaccatattttataaatctatg

SEQ ID NO: 158386 - DNA, 776 bp, Cannabis sativa
ccaatcacaacgtattacctctaaataatgctaaagaactatagaatattgctattagtcactagtgatacctaacattttctatagatgacactttatgattggttagtgatataatacctgatatttaattacaccaataacaatgtactatcgtaaaaatactagtgactttttagcgattgtcatagcaatatcacacgattaattatatagtcttctgtcacaaaaagtctacccactattatataaaagtttttgaaagtctttcttgcgactaagggtaaaaccgtaatataaaccataatttctaagttagttaaaaagggcgccaagtaccgtttggacggaacaaagacgctgaagctctaaaaccccaaatgaaactctctcaattcactcccacaccttccttcttctttctcatcttcgccgccactatctcggtggccggtgccaccatagacaatgacgccgccgttatgtcaagcctcctcaaggccatatctcctgccccaacaggctggtctcactccactaactattgttcgaaatggagaggcgtatgttgtagctcaaccggccgagtaaccgccattaacttaccgaatctctctctaaccggaactctcccttcgaatctcgcttctctttcacaactcacttccttaaatctcaaaggcaattgcttttctgggcaattgccttctttcgctaaccattctgtgatccaagaaatcttcttggatcataacaagttcgcgtctttacccgtc

SEQ ID NO: 158387 - DNA, 734 bp, Cannabis sativa
tccaaacttgtgcaagtcatatatctataaaaataagtacctcattagagaatgacaaacacacttaacataataaacattgactacacatatatattcaccttcttgtgaaactatggacgaaaatatttttgtgtagaacaatatgatttccattcgtgtaattttgtcggatcacttccaagtgttcactgtaaaatcaaatagatttgaattgattgattgaaatttcaggtgaaaaaaagaaaaaaataataaaaaaagaaactcactctaagtaagcttaaatttcaggtgaattgttgaatatataccactgtacttgttcacgagatgcgcaatcaagaggccagagattggcttttgtaatgggccgacattgagattgaaacgcagaaagctttcatgggacatcctcatcttcattgagatcaagtcagttaaaccttgtttcaacccccttgaaatacattgaacaaaatgtcaaagcctcatcaacaacgtaacttttcgctatcgacccttcaggatgtgctttatttcctacatagttcttcaactttttcatgtacctttcaaatggatacatccacctcataaaaacaaagccacccaaaattgcttcttcaggcaaatgaaggaccaaatgaatcattatgtcaaaaaatgctggaggaaatatggactccattttacacaagattaaaattagatcttattgagcaacctccatg

SEQ ID NO: 158388 - DNA, 646 bp, Cannabis sativa
  modified_base (40)..(44): a, c, t, g, unknown or other
ggttcctggtgcacagaaatgctttttcggtcctctcgannnnnagggccaagactccctttttggagtttgcccctctgcggacctttcccttttgggaattctgaggggaccattcgcggatcctgcacctttttctttttcccagggggtggaagtaggatttgtctgctggttcccttcagagggataccgtatagggctagggtccctggacttatgcttttgggtgcttggagaggactcttctggtgtttctccaagtcctgcagggatggctttaggatgcacatggatccctgctactttccgtggctttctgcatggcgagcatcacctcttgcatctttttgttttactccttttgggttgtgatttcagcttcataatcagcagccttttgtcttaagagcactagctaccttcgtcataggcatcatactcgtcgaagtttccttcgtattcgtcgtcgtgggttccttctccttcctcagagcccacgttaactcttgaggccacttcctcatcctcaggatcttgggcgtctggaggaggacggggttgacgtgtgttacaagtctccacaattgttgttttaacatataaggttgttgtctatttgcagacgcttccttcagctctcaat

SEQ ID NO: 158389 - DNA, 548 bp, Cannabis sativa
taacaacgaattttggctattaggagtgtccgatttaatttaattataaccgattattaaatattaaatatttaattgtgatcgcatcgaattagatattatttttaaatatccaattaaatcgaattgaatgtcaaatcgaattagtgggcacttgtaaatgatgtaaaactttattcatgacaactttattgaggtggtcaagccttttgtaccacaaatttacaagattttgactcatagtacaatgttttgttagaccctgatttacaaactctacaacattagcaacaacactgttatgatcggaggagtgagaggcacttggacagggaattgggagggatgaagctgggtacaatccttaacagtgccatgatatgtatttactggtgttggatattttcccatactaactgtctcataaataagttacaaagaaaaataaaataattaagacattttacaagcctcaacagaccattataactcttggagtagtcggttctgttttcataggcttatagatctttaatctctttacaata

SEQ ID NO: 158390 - DNA, 565 bp, Cannabis sativa
  modified_base (439)..(463): a, c, t, g, unknown or other
gcgggtaatgggattgtagtggaggtgatgtcaatacccgaagtagggtcgggcgggaacagggtgatactaacgccccatatctaacacggtatatccagtatttatttatagttttaacgtatatatattaagaacaaatattgactattgtgtatttattttattgactatttatttattttttttttattacgtataaaatgttctttaataataattctttcatcttgaaagttgttggccaatctgttagcctaagatatgtttctaagaggggcggagaattgaaaatgggaattttgatattatatgcttaaaaatagttaatggtgttttaatataccacaataaatatataggaaaataaatctccaaaaaatgttaaatccaaaaatactctcctttagaggttacgtgttggaatatgttttaccannnnnnnnnnnnnnnnnnnnnnnnnttgtttaacatcctaaatatgattctcaaaaacaatgtaaataaacacatataaagttttagaaaccttacagtgggtgcagcggaattataatggctcctt

SEQ ID NO: 158391 - DNA, 587 bp, Cannabis sativa
  modified_base (95)..(95): a, c, t, g, unknown or other
ctgattatgccttgaacgcataacacttaaatctcaatataatcatatacatagcatggcatagaatttcctcaacttatatcactagggtaatnaccctaggctattaaccgctcatattcgggtaacaaccctaatcccggttataattactcacatatatcatattcaacataagcaccaccgcgcatactctatgtgaaaactacagtcttacctattgtcccgcaataacaaagattcacaaacccctaggtgctcctgatcacgtgccgataatcctagtcacacaatctgggatttcaaaaatagggttaatccctaattccactttcacataacataaaattggcattcaaaatacagataatcatatagcgctcggaacgagctttccaacgatataaagaatgtccaaaacggagtctcgagtcaaaagttatggccaaagcaaaaatcaggaaaagggatggctctctactaggtctatggccgcggcgaccataaatctggccgcggccactgggttcgaaaaacccagaaaaccaaattttaaggtctacaaatgctcacttttccatatattc

SEQ ID NO: 158392 - DNA, 510 bp, Cannabis sativa
ctttctagtaatccttttcttaggagattagcgtttcataatcggttggcatagcgtgcctaatttttaggacgttacagtttgctataagagtgccaaggtatttatacttcctgtagatcggccgaacatttacaatcatcgtagagacaagcttggctcgtgctgcagtaagtgttgagagtaaacgcttaactgcctatgtgattatttatttatcgctttccattttaggcagtatgtgagcctctagtgtatttatgtgatatgatgccatgcttagaatattaattgataagtgtttatttaattggaatgaaatagttgagttagggtttaaaggcaataagtgcataagtgtggtattggtgcctgactcgttggagttgttgattctagggttgtttgttaaaaatggaccctccgcaatcatctagaccatagggcaagaaagtagagcctgttgtagacaaaaccgattcgctggcactgcctgcgcctccgcagaat

SEQ ID NO: 158393 - DNA, 705 bp, Cannabis sativa
attgagatcatttgatctaagattaactaggtgataatcaattgaatagatactatggtaagtttaatatatttgatccaagttcaatattggtcccttctgaggcatactccatacatccaatctaaacttactttaaccattgtcctgcaaagcacataacacttatccaatgtgcaagtaaactacattgtagattattctatcagttacaccttgtgttatcccattttttgcactatgacgtggcagcatgtaccagtgacatgtgtttatcattccttgcacttgggccaaaagatattctaagtagacttcaaccaagcaaagaatgaggttagttctccgagctgtgtaccaagacttgacaccttcaaaattaatatcgtgaagcccaagtacgaaggcaatccctacaatcatgggattgaatcagagggatgcgataggttgtttcaatcccccatttcatgtattctaattatgtaataaatgttctttccaattatagatattgtaagccaaagggaaacgttccctcacgcattaagcccctataaatagtgatgtagcctcactgtaaaagggatcgagagaattactttagagagagatctaagagaaacacttaaagatttcattgtgagaactttgagagaggacatgttgtattctttgttctcaagtcaatacaatctaagggga

SEQ ID NO: 158394 - DNA, 584 bp, Cannabis sativa
tatgccaatccctccagcctatattcacatgtcaactgaattcaatacacgatccactatgtcttcttcctctgtcatctcaacgtctactgctgcaaattcaccaccggttactgagaaccgtatgtcctccctcttcaccaaacgacaactttcaacctcaagagggaatgttcgtaatgtgctaaaaaaatttcgcacaaggggttcaccactagctgatactaccaacatcaacttgcttcaacaatcagattcagacaattcagacaattcacggatagatgaggattgtgttgcttccttggtgaaggctgttccacagcctcgccaattgccatgaatatcgtctcttggaatgctcggggcttgagtaacccgagagcattctgtcatttgcgtttactcacctctcagtgtcatcccgatgttatttttattatggagtctaagttaaagttaggttctattactaagtttcgaaatgcattaaagtttcctaatggtattgaagttcctagagtaggtctaagtggtggtattttatttctgtggaagtccaatgtaaatgtatctattcttaa

SEQ ID NO: 158395 - DNA, 811 bp, Cannabis sativa
  modified_base (248)..(251): a, c, t, g, unknown or other
gcaatgtgcgggcctccaacaatagcttgcagatgcccatttaccggtggaggtagtaaatcctggttattatcgttcctctgaccctgattggtcatgacatacttctgcaggtgtgagttatttttccttattaggaattcaatttcctgcttcaagttgttacattcattagtgtcgaggtcgtagtctcagtggaatcaacaaaactttgtcatgtccatcttgctggcatctttcttcatggnnnngggcttcttatatggggccaacgactgagttgccatgtaaacgctttctatatcttcagtcagaatagtgaatgcagtgtacttggcatgattctcccagggagcttgttcggattttccggtgaactttccctttttcccattcccttgcttgtggttgttgttggaacgtttaccacttgaacttgaattattccggtaatggggaagttgggcgaatgttctagtagaatgagcctttgacttgccaggcttttgctcaccttccgcttgttgaatggcttcttcgagcttgatgaagccttcgacacggtcaaggaaatcactcattgagtctaccggcctgttcttccttatatccttccaaagttcgccgaggacttcaatgccccccactatcgcggataactttccatcttcagttacctgtgaaactttggtcgcctccgtcatgaatctgctaatatatgcccgaagaggctcgcctggcctttgcttaactttgacgaagtctcctagatgcaatggaagttggcgtgaggaggagaattgtgcatgga

SEQ ID NO: 158396 - DNA, 560 bp, Cannabis sativa
ttagaagttcatatttaggttgttgaatcaacatacttgtaagtagatctaagatcctcgtaaaataaattccaacaataggcacctctcttattaagccttgagtccacctaaccgttatacttactttgtacattatacgctaagtgttttcacagtcaataagcatcacttttgtcttcccaggtgcaatgaagttgatgtctcgctttatgcatccaacgacgtatggtttcttgttaatacactaggcaacagtttgtatatctttacctcacataagatcttatagtcagcgagttgcaagtgtactcagttacttacgcaattaatgagttattccattaaaagtgatatcatcaatccaaattccccttaacatgacatgtgtcctctatttgaatggtagccgaatttcgggtagaacaattgccccttaaaaagttcttttttaattaaaagtgctatttaataattacagagggcattttcgtgataatccctttttggaaaaatgcgtcctttaattttgatggttgtacagttttgagggtcattat

SEQ ID NO: 158397 - DNA, 516 bp, Cannabis sativa
tcggatgatgatcccaagggttagacagagggagggttctttctttcagctttagtgtttatatttcagctgtattttttgtttgtgttcttgttatctgttgtagttgtcgttgtttgtgcttttgttgtgtgttcaagttgtattttgtctttggtagtattgcctagggggctcagtgacgatgctgttatttaagcttagctacttgaaactgaatgtctttctttttgagttttaagatgcctactttaagttggaatgtttgttcccttcattgttgaaagtgtgcctcttttgattgtgttcatagcttgactaaatggtttgtatcactagttagtttgagctaaacccttgtgagagtttaagcctctagaattacttagtaattttttccttttggcgaaatcctaggcatcaccacactgaggtaatgatataggtcgtgtttggaccgtttgagctttcaagcctatcctttatgaatattttatccctagttttcccccttga

SEQ ID NO: 158398 - DNA, 906 bp, Cannabis sativa
tcctctttttgtgaaaaagacgcagcatgtcctctaattttggcggttgtgcagttttgaggtacattagaattaaataaccatattttccacttctgccttgaatcacatttgtaggatcaaacccttatctgatctaacgaagccaccattatgagcataaagtaaggaaaaaggaaccagttttgcattatttcctccattttagaaagtctgaaaaaactcttaagcttcttcgtcaaggatcatcatttgtttgaggacttgcatgccatctctgtccttgaccttttttctacaagtttctttcgacttcatcctctcaaagcgatctttgcttcgttcgaagatttgcagacggagtaaccagtcatttccccaagccctaacttcaaacagtaagttgctttcttctttctcatgtttgttatattgtgtggatttgttacttagtttgtttgtatcgttgtcatcccttttggttttggaagttttttttctagggtttaaattgtatctaggtttatactagggttcaggccatatgtaggttgttttaagatctccaactcattaccttcgggtttgataaaattctctccagggattgggactactttttgcctgcagcaatgtcccactctggttcagtaatttatcggccagaagttttagagtttgagttccctacagaattagccatcatgtataaacccaactcttcaaaacccacctccaaattagagttgaacgatgctaggattagggaacacgtggtgatagcccaacaggaggatattactagtcattacaggcgtttcttgtaagaaatctccgaaggcaaatgccgattcttgcaagaagcagcctggctggaaccatccagtgtgtcctttattcctgtgg

SEQ ID NO: 158399 - DNA, 820 bp, Cannabis sativa
atacaatttaaaaataaattaaaaatttatttatacatacaattttgttcttcttttgaattttttatttgttatttaatatattttaatttgttgttagagacatgaaataataataatgtgtttattgttttgctagttatgtgaaaaaaaaaattcataaaattaataattttataaaaaaaaaagtaatcaatccaaaataaccgattgaatccgcacttttgtggattggatttgagctattgcgcggattagattggatctaaaatatgaaatccgcacttagtgcatcggatgcactatgagcaaaatagtgcagattgaattggatgaacacccctagtttgcaaacactcagtttaccctctctcaagcttgaccttctaaaagacatactccaagtatcttctttagtttctgaaatatagataatttgataggctttgtgaatatatcagcaacttgctctttcttcacttctgcaataaatatgatcaataacacatttcatattgtgctctcttaaataatggtacttcacatcaatgtgtttgcttctaccatgaaaaacaaaatttttaaaaaaattaattgctgagctattgtcacaataaattatggtgcctccctcttgcttaaagtgtaactcttcaagaatcttcctcaaccaaatagcttgacaggcactagttgttgctgctacaaactctgttttggagtttttttcatttttacacttcaaaactgtttttttatatttttacgtaatttaatataaaaacttctatagcaactaacggagcaatctaaatcgcaa

SEQ ID NO: 158400 - DNA, 1041 bp, Cannabis sativa
  modified_base (256)..(259): a, c, t, g, unknown or other
agactaggacccgtgattgggatgcagatcttgtccaatgattagagaaccggggcttggacacgaccaatagtcgatgtcttgatcatggactcggacaaggacccgaagttggaaaaggacctagaccctgacccaaacctaggacccaaaacctaaacttgaaaaagaacgtgatcaggaccatggaaaaggaccgcgaccgtgacttggaccttgactcggactcaaaactagaccgaacctagcccagaannnnggttcagacccagtcctggacccagactagcactcagactcgaaccagaacctgaacacgaagtcgggacacgatcccagacccggacgaagccctttacctaaattggaatttagaccttgacatggacacgaacccatacccgaacccaaataccgatgcagacatagaccgggattgaaacacgagacctaggcccagacgcagacacaaacccagacacgaacatgggacccagaacaaagacctgaacctggaccttgactcaaatctggacccagaccgagattcgaaaaatccgtactcggactcgaactaagactcagaccctgacaccaacttggacacagacctggacgcggaacaaaactcggacccagaataaaagctggaaaatatgactaggacccagacctaagacgataaccaaacccaaagcataagtcaaactcagaccaaaacctggaccgagaccttgactaggacttggacctaagacctaagacttgaacctggactaggaccgggaccgggacctagacctgacctggtcctaagccctcaccagatcctgacactcgcaacccagacaaggatctagacccttaaaaggacccgaacctaaacccagacaaagatagggatcgagatctagacctgaacacggaccgcgaccaggactaaaaccaagactcaggacctgaacccgaaattggaaccagactaggacctaggaaccggacttggatggggcacctaggccccgtaacccagaccatgat

SEQ ID NO: 158401 - DNA, 639 bp, Cannabis sativa
aaattcaatgcccttccggccactaatacaaaatcaggtaaaattatattataatcctatcttcaaaatatatgtatatgtatatatatatatttgaaaagatttttaaaataattagaattacattaggaaaaaatgaactctctttcttcatgatccatctcttcttcagcctgttttgagttttgataataaaaatcaattttgtaagaaaatttacacataattttttgtaagaaaatttagacataatttgagttttgttgagttggtttgatttgtcaattttgaatagtttgtttgctgagttgataatcagaattatttaatcatgctctctaaatatattccttaactaaaaagaaaatagagtaccttggagattttgtggtgaatgatcaccttcaaaattgattgttacaatagtaacaatattcaagaatgcataaacaaaactaaaactaatcacataattaaaattagaacttaattaaaattagacaagaaaaacttagctcgagaatgaataaatcatggatattttattgattaggaatagtcaatagtacataattgaataagcctaagattacaactcaacacagtgaataattacaaagaaatagaaaatcacttcta

SEQ ID NO: 158402 - DNA, 626 bp, Cannabis sativa
atataaaatataattgatatattcattttaaaaaaaaaattctgttttaagtattctaaatacgtttaatttcatataaatagggcaacggaataattatttattaaaaaaataaattaataataattaaattatatataaatataaataaattgttaatatttatttttaatattatcctgacacaatactaatataaataaggtaaatattattttggatcttgtattttgtaaaagttaccaattagaccatatgttttgttaaataacaaaatagaccttgtattttctaaaatggtacaaataggaccctgaattgatttttgtcaaaataaaatttaataattattcaatttaaatctgttataacaaaactgtttacattttctgtatctgttcgcattaggaattatcttcaagttggttacattaaaaaaaaaaagttgtcaaaaattaaactcaaggtcctatttttactattttagaaaatcaaggtacatttagtcatttaacaaaacagatggtctaatctataacttttaaaaaacacatgatccaaaatagtatttacttatataaatatgggatattggcggctaaaccacctgaactttacggtttgta

SEQ ID NO: 158403 - DNA, 581 bp, Cannabis sativa
gtgaaaaaagtacttgattgaggcaggctgcttttattgatcggtgtagatctcacactttttaccataaagataatgaagccagagttttaatgcaaaaacagttgctgccagttcaatatcatgggtaggataccgttgttcatactccttaaattgcctggatgcataagcaatcactttccctgaattcataagaacacaacctagcccttgtttggacacatcacaataaatcacaaacttttcatcactaaccggtaaagttagcacaggagtggtaattaacctttgcttcagttcctggaaactgctttcacacttatcattccaaatgaacttgcagttctttcgagtcaactctgttaagggtgtagaaatctttgcaaaaccctcaacaaaccttctataataccttgccaaccccaggaaacttctaacttcagttgctaacttaggtcgaggtcagtctcgtaccgcttcaatctttaccggatccataagaataccatctttacttaccacatgccctaagaaactcacctgaggcaaccagaatttgcatttcttgaacttggcat

SEQ ID NO: 158404 - DNA, 798 bp, Cannabis sativa
  modified_base (383)..(386): a, c, t, g, unknown or other
ttctagtgaaggacattcagtgaaggacattcttcaggacattcttctgaccacattcttctgaccttcttctgaccttgtactctgaccttgtacccagccataggatgatggctcatacaaagaaaactacgggtctagccgacgctactgatcctcaagtggctcggcttgccactctgcccagtgccgaacaggattcggccgtctcgatggaggaggatcatgagggggacgctaaggtccaggaggttgaggagctggacgatgcgcgtccgggcagtccttctgaggcggagggagaggaagaggtcgaaccctcaaattacagggagtacaacgaggttgcgcagccagtcgatgctgacggagacgtcccggtnnnnggcgttgactacgtcagtgaggagcttgctgcggtggttcctcataggaggcagggtgctttgggcgccaagtgggtgagtcctccgtccaagattacggaggcatgccttcgaactcttgactaggacgggtacctgggtgagctggactgctacattcccacccacactaattgtgccacaaaccctgacaaaaggatgtgcacctggtcgggggcccatggtcagcaaggagcgttgatgcccttgcacaagtacttcaaggatgtggcgaacttctttggtccctgcccgacccaaatcactcttaaaggcattaagtatttgtccgccctcttcgtcctctacgcttcccaaggatggggtactctttctccccacgaggttgcctagttctttgatttgaagtcca

SEQ ID NO: 158405 - DNA, 584 bp, Cannabis sativa
cttcttcttcttcttcttcttcaatcgcttggttttcatgcatgattgtgaatttagttgttgtatgttctgtagttgtttggatttgttttctagtgttaaaattgagttaattgggttattttgtgttggttttagttgttgtggttgagaatgaccaaggtttgagcttttaagctcaaacttgagtctttgatggcggatttgaatttaggggtttataactattgttattgcttggaatatgtttatggatgttgaattaggtgttctggagagtttgctacaatttgggaaagttttgagctagtttttgagtttttgtggggttttctacagagaaacgattaaccgtttttgaagaaacagttaaccagtttcccaggcaagccccagaaaacggtttactgtttggaaatttggcttaccaattttagcagttttgggaccctagtttttatgttttatcgatatttaaggtattaccacgctatctatcgatagagaaacttctagttttaagtttaagtgctcaaaagtgatttagtgtatcacttatcaattttatatatgttgtgacataa

SEQ ID NO: 158406 - DNA, 604 bp, Cannabis sativa
tcgcatggagtctcaaattgctactgaccctcagactcagtgttgattttgttgagacagattctttactggttgtaaatggcttaaaatctcaatctaagggtctctcttctttttatgttatacttaatgatattacatttctgttatccaatttcccacgagcacagatctctcatgtttataggtctgctaataacaaagcccacttgttggctaagtttgctcttacggtggattcagattgtacttggttagaggaagttccaccacctctaaggactgttatgtaatttgttttttcaaattaatataatagtcttttctcaaaaaaaaaaaataaataaataaaataaaggattgttaaaattaataaagaaattgtaagatgattttttttttaattttaaaaaagattgtttaatttttttggtttaattattgggtttaattgttaacgggagatcaaacctaataacatcgttaaatttaacagaatattcttttatttttaagtaaaaaacgtgtgggagtctattcaaaaaaaaaaaaaaaaagcaaaaacaaaaaacgtgggggggggggaggtttttttttttttttt

SEQ ID NO: 158407 - DNA, 841 bp, Cannabis sativa
ctataaaattatataatacctattgttaaaaaaattaatttgtaataacattccaattatctttattaatatataaatatatgttcaaagtttttaagtaaatctctaaatacaaactattttaatgttctatagaatttcaatgatttcaacaaatacaataaaaaaaattaaactgaaaatttgatatacattacacaagcataatattcaaaacaaatcaaactatacaaaatccaaaaattaataaaacacattttgaacaataaaaaaactacacaaaaaaaaaatcaaatccttgcacagatctatcacgctgtcgaacgccaaaatccacagtcgtcgaacacgaaagttgagagccacagcgagcttcaaatatcgtcgacaactgaggccaagatccctgcacataagagagaaagagagagaaatagagaaatgaaagaataaggaaaaactgaccttggatttcgaggttggccgggaatctgagaacttcggtgctggtttcttggtgcgaacttcggtgctggtttcaaaggagggtggggcattggctggcagcagcgatcggtgaagaagaacaacatcgatcgacgagaacttcggtgctagtcgtccgtcgtccgtcgtccgtcgcccgtcgtccgtcgtccgtcgtccgtcgcccgtcgccagagatggcctggccagaaatcgaaagaagaagaggccagaagaagaagaagaagcggccagaagaagaagaagaggcaagagagagagagagaattcctagggtttttcttgtaagaggcgagagagagagagagagagagagagactgactatataagtc

SEQ ID NO: 158408 - DNA, 778 bp, Cannabis sativa
  modified_base (265)..(272): a, c, t, g, unknown or other
agttcgggggaaaaaattactaattagcctttaaattatatgagacatgatacttaattacatcaataataatataatactaaacaccactaatattttctcaaagagaaatgcttaagggcactagtgatgcctagcaccctcctatgtgtcgctatcgctattggtccaattaagtatcgggtcctatataatttaatataatagcttttagggagtatcgctctagtcaatcgcaacgcaacatgtcgagaaggtgctaggnnnnnnnngtacctaatagcaatgctctttttcaaaaaatactgtggaacgtgagattattatttcttgtattgaaaagagaaagggtaatattctctgaaaaaaaaaggtaataagtaagagaaacaaattaatgttactctcaaaaaaaaaaaaaaataaggttacatattccacacatttttgtgtcttttatttataacaataaggtttgtgcttcgaactttaatctatgtattattgtatccctaaactttttagcctgttataaatggttccttttgtcaagttttgtcatacctgacaagtaaaatgatgatataattgcttagccaattatcacatcagcgccacatgtataatttaacattagaaaaaaataaaaattatgtattttttttaaaaatcattaaactaaaaattaattaatgattaggaaaattaagtaaaacttaatcaaaaaaataaattacttttttaaaattaattacatatgtggcgttgacatggaact

SEQ ID NO: 158409 - DNA, 785 bp, Cannabis sativa
gaaggggtgaaagaagatgagccagtaagatttaaggcaagattagtttactaaggtttcgctcaggtggaagggatagattacaccgaagtgttctcacctatggtgaagtataagaccattagacttactttgtcaatggcaacacaacaaggtttagaagtggagcagcttgatgttaaaactatgtttctaaatggttatctagaagaagagatatacatggagcaaccaccttattttaggaggaacaagatggaaaagagatggtttgtaagttggacaagtccctatgcggccttaagcaatcaccacgataatggaagaaatgaattgacaactatgtttaagagattggtttcacaaggtaaaagtttgatcactgtttgtatttccagcacctagaagagttaacagttgagtatcttctactctatgtagatgatatgttaataatgggcaaagacaaggcagtaatcaaagtaattaaagataaactcaaggcagaatttgacatgaaagaattgggaccagtaaagaagatacttggtttagaagttcatagatccaagagtgatggagtcatgcatttgaagaaaaagaattacattgagaagatcctaacaaagttcaagaggcaagattctaagagcagttcagtacctcttgaaggacagattgtattaaccaaggaagaaagccctatgacagtagaagagaaagaagagatggaagaaattccatatgcaatggctttagggtgtctcatgtatgtcatggttagc

SEQ ID NO: 158410 - DNA, 522 bp, Cannabis sativa
ataggcactcttaatatataaagatatacagatggttggctttttgactaagtaaagctattatttatttggcatgattaaatacttttagctaacatttaatacatacaaaggtttcgtttcaggaaaaaaaatacatacaaagagttacatatatgatctatattatatgtgaaaaggatataattatagaattatattttttaaaaaatctagaatatgtcatcgtaaaacattttaataatttgtacgactaaatatactcaactttttctttcttggtccattattaaaataccaattataaaataaaaggctcaaatctctattatattatattaaattaaattatatattatatttttatataatattattaaattttaatttatattaaaatattatatatatattttttttgaacaaaaataattcattaaacagcaatatctgcatatctcaataaattaaagagcatgtagaacatataattaatacaacatataattttatataaaaata

SEQ ID NO: 158411 - DNA, 801 bp, Cannabis sativa
gccaagattttctcctttttttttttttttttttttagcaacaatcaaattcttttttattgaggatgtttaatggctacaaaagtatggtgactttgtcctctctctttttattactcttacctctcacaacacttcaactttcctatttcttcatcgttgtttgtgatcgcatccccagtaattacttctccatcgttttgatcctccaacaaactatcacggtaaatatctctctggttttcttttttcctttttgtagactgaattcattctattttatatagccgtatttcgatattatgtgaattgtgatagtgttttagttggtgtatatactgttggatataatctgtgtgattcgtgaaagaattggttatattaaggaccagtgatcacgattttgaagcaatttttctgtagtttaatacctcttgatcagattcattgttcaagttaccttaagagttttctatttcaataatctttgtctatcgtttgttgctgtaaatgagttcaatttttttctttcttttgtttcacaactctttttttattctttcttttttcaatgttttctttttttgttataggtttgttttattttgttctattttgcgccattatttatggctttggcgccttacaaggctatagcacttattatatggttgggcccctaattatttagggtagtttgcttaagaaaattttcacgtttttcggtatgttttaaagaatatttttaattgaaataatgtttaagagtgtttactttaaacgctaattcctattagttat

SEQ ID NO: 158412 - DNA, 744 bp, Cannabis sativa
  modified_base (698)..(703): a, c, t, g, unknown or other
gttgagtctgattgtatgagagttattaaagatttaaaaaagaataaaattatggcttctccttatggtcatattattttagattgtaaggctgtgttggccgatgttagtattgtttcttttaattttgttaagctgtctgctaataaggtggtgcacgcactggcgcgatcttcttttatggaggctgaccgtacttttagttgtgttactttacctactgtaattgcttccttggttttggaagacttgaattaatgaagtttttcaggattattccaaaaaaaaaaaaaaaaaatgatcacattaaagtgtaaatttcgatgatgtaacttttaagctcaaataattatacatataactggaaaaggtttttaaaatagatataaaaaagagagatttttttaatattataaaaaaagagaaaaagaaaaaaaaatcattcaattgtgagaaaatgtatctatttaaggagcaaaataacaaaatagcaacaacaaaaaaaatagttgtaaaaaaaaactggccgtatctttatgaaaactagtagtattttcattaataaaatatgggtaaataccgttttggtctctgtattttgcaaaaggtatcgattggaccatctattttgttaaatgacaaaatgaattctgtatttcttaaaatggtacaataggaccctgaactgattttttatnnnnnnaaaatttaataataatctgatctaaaagtgttatgataaaa

SEQ ID NO: 158413 - DNA, 709 bp, Cannabis sativa
gtatcttaggagttaggtggatataatctttatcctcccttgattgatgtgattcctcataaagtagtcgtcactagccctattggttatagggtaatagccgaaaaaggggggttacgccatctgtcaagtcgtttatggagatttcgatacgtcttcacccatgcgacattaaatgcgaggtgattgttcaataaaactcaataccacccaaaactgccttagcacatttctggcctcccggagcataaagatactctttatgcctactccgcgagacaccttccctgagacactcctctttcgtctaagacttagttgacttccataactgctagttcttgcggcttccacatgtcatcctcatccaggttcacgtgttttgggcaaaatcaagggcaacatttacccccaagcctcgtttaatgaagggtaaacgaggcttgcttggtgcctctgactggcttattggtctaatggcacgtgcttcaagcgcgtgggttgcatttatgatagtcatcattaacatttatttcttttcgcaggcaacgatttgcttcccgtccattgagaaaccggcggatttaatcggtgtgtcagaaaagtactcaagcgttttcaaaccgccctgatgagcatttatttcgaccgttggatctgtagaatacgaatcgattacgattcccaccgtacgatggcgcctgatcac

SEQ ID NO: 158414 - DNA, 507 bp, Cannabis sativa
aatattttaaaattaaaaaaaaattgttgtcttttttttttccttcttcatttcttcagaaataacttaaattttcaaaccggagttgttaatagtttctttgattgttgattttgtttcaatttaggggtttagatttgtgaagaaaatttaagatctatagtatttttttttttctggattttgtttgatttaggataatagtggtggtaatagtgagatgatagtggtttgatggtggacacacaacaagtcactacaagaaatgttacttttgccagtacatttttgtgcatggcaaaagttgatattgcgctggtaaaatagaatttactggtgaagtattggcaaaagaggttgaaaaatcaatgttggtattagaacttttgccagcattaaatgaaaagcattgacaaaaatgacttttcccagcgcgtaaatgcgccggtaaaaattaaattttagccactgcaaatgtacgccggtaaaactttgacctctttgcca

SEQ ID NO: 158415 - DNA, 545 bp, Cannabis sativa
acatttataatgttattacaaaactatatatattaaacgtcataaactaagtaaaagtattctaaattcataaacagtaatatctacactgtaaagtaaaaaacactacaaatcaacaacatcatcttcatcatcaccgggaggggcagcctgtgaggaggaaccagctgcatggccagaaggctgaaatggtggaatcggtggaatcggaggcagttccagcatgttaaaccctggaacagcgctgcccaattagatcatttgttgttggaacgcactcataatctaattttgagtcatcatcatctgttgttgccactggttctgtgcctcttgttcttccgctcttcgcttcagtgcctcatattcctcttgagtgacactggcccgcccagatgcacttggcctgtgagttgctcttttttcccctgccttaagtcttggcaacggtctgactcctctcaagtggcgtgaccgctcacccaatacctgtgtcataatatgcgtatctgcaggaaattgggtggggtcgacactgtactggc

SEQ ID NO: 158416 - DNA, 771 bp, Cannabis sativa
aaataatgatcaataaactaaatcggatgtaaaaaattataaaatacactataaattaaacaaaagtacaaccctataatataccaaaaaaaaaaaaaactaaagcatacaatataaaaaagacattcaaacaaacatcaataaagtcttaaaaaatgagaaaaaaaaatcttaaattatatagtatcaaaattacatttgaacaaattgcaataaaattctaaaaatatttaaaaataaaataaaaaactattaagtatataaaaacagaatcacatttaacaaacgaagtaataaaattttaaaacaaatataaatacaaaaatatactctaacaaaaaattatttaaacaatacactcaaaaactaaaaaatatatcctaattatatgaaaaaagtacatatataacattcctataatatgcaaacacatttttcaaaaataaaaaataaaaaactctaaagtatacagtaacaaattaacattcctatgcagtatgctgaaatgtctataaaatagggaaccatgattgaaattgtgaaaaatgtgagcagtgtgattgacgcgacagctctgcatgtgaggttacagatgttgggagtgtgattgacgcgacagctctgtactctgacatcacctgcaacgcgtgaaccaaaaacaaaactaattaaagctaaaactgcataaaacaacggtaaatttaataaaattaaaagtaacgttaatactgaaattaaatagaaaaaaacgtgtccaaatgtaaattatcc

SEQ ID NO: 158417 - DNA, 526 bp, Cannabis sativa
  modified_base (445)..(460): a, c, t, g, unknown or other
aagtatcaatttatattttctatgtaataattccaagaaaacaatgtgatagtacaaaaggataaatcatgtttttaaaactaagtaaaaaaaaattataatacaaaaatatattgaggagttgatattattttacttattgcaattaggttaatgctttattatttttctgttactttatagctatatctttgatgttttatagttcttttcttgttgtgtattaagttgttctaaggttgttataagttatttttgagtggttttttactttactgaaatacaaaaattttgtaattttaattttaaaagtttaaacagagtatttttgtaaagtcggtacagtgcaaatgtaaaaaactacatgccccagtatttttgtaaactttttcctattttatagtatttttgtaagctcccctaattagggaaatttacatggtannnnnnnnnnnnnnnnttttttacaaaaatactaccaggcggtattttttacttttttattgtgtttttttataagtttcat

SEQ ID NO: 158418 - DNA, 585 bp, Cannabis sativa
  modified_base (414)..(430): a, c, t, g, unknown or other
  modified_base (515)..(520): a, c, t, g, unknown or other
aattttctataaatatatatgataaaattcgaaattcaatgtatttaaaataactacattttcaaaaattgattataaaataaaacaaagtaaattctgaaaatttattctaatttatgttggtccaaaataaattgaaaaaaattaactttcaacataaatataattttcctatttaattaaatttctaacaaaaatatcaaatatttaagtatcttgaataaaataaacttaaatattaattttctatttgattaaatataactagaaaaataccacaggcaaacagaaaataactatctagatatttcactaactaattacttattttctaattaaaatataatatattttaatctatttattttaataaatcattaacaaaaaaatttctttatttaagttggtccaaannnnnnnnnnnnnnnnnatctatttttcaaaaaaaaaatcaaaaatatatgcattatagataatacattttgaaatttgtgggaaaatgattaataaaatannnnnnaatatattttgaaaattattctaacttaagttgttctgaagttaaaattttcaacttaaatataa

SEQ ID NO: 158419 - DNA, 512 bp, Cannabis sativa
ctgaatcattccttagaacactattgaagtttgaggacccgagttcgtcgagcatcattccactcaggtcggctcacatgcttgactttagacttgaggtaagaaaagtattaagcaccgtatatggtaatgttatgattgttatcgtctcgataatgatcaagatctcggtatgtgtttattgtgacttaatcttaattgaggttaacgatatatatttgttgtgactcgatggtaatcgaggcaatgatgagaaacaattatttttgtttgtgaatagtttatgaataaggaaaaaacacggttatcaccgttgttgtgaatgaattaagatacgatcattaccgttatgagtaatcattcttgaaactgcggataggtttcttacttatcatttgttttaccagacaacgatattgacatatgcagctcgtggataacgagtggtaaggttagaaacggtcattactgttatgagtaattactcgttgaaaccgcggttaggtttctta

SEQ ID NO: 158420 - DNA, 842 bp, Cannabis sativa
aatttgttaagatatttttagcctattatttatgttatttttagagttaattttcttcttcagtgtcactttttagaatataattatgcttgttttctttaacattaagtttcgacacttggaatatataaattggtcaaatctcacaaaaaaatatctataaaatagagaaaattgtgcaaaaaaaataaagcttaaacttcaagcctaaattttactatgatttgttcagattttggaaaaagtcaaagcataaaatttctatatctctctttgagctttctggaacatgttgaatcatccaattccgagtaatatcgagagagtgatggccaaagtactatcagttgttacagtaggaaatttttgaaaaaagataaaaagatagcaagaaaaaaggatagagttgcgatttttatcttgtttaagtttaaactttaaatctttttagtatcttttaggtaaccttgttaatctatataaacatgttattattagtatttttaggaggttttgagagctaaaaaaactcaaaaactcttaattaggaagcaatcaaggagtacgaattttggagagcaaaattgatattgaaggctttctcaccagggtattcaatattcttttcttctctattttcttcttttattctaaattaatatgtgtgaaattgctatgatgaacatgggtagctaaacagttcattagggtttagatggatactgtttgacattgaatttttgttttaatatgatttaatttcctctcaatttctatgtattttatttcattcatacttaatttcttttaattgccttaccatcaattaattgtttatgatt

SEQ ID NO: 158421 - DNA, 629 bp, Cannabis sativa
  modified_base (569)..(572): a, c, t, g, unknown or other
tttttataattattttaaacttaaataaaaattgaaaaattgaaaaatgtaaaattatattctgcattcactttaaaaaaaaattgtaatgggcaagattaagttcaccaatcacccacgtagaaaataagtgaaatactttttatatgaaaaaaataattaaagggcttttttttataattattttaaacttgacaaatattgaaaagtacaaaaatatattttgaattcttttcaaaaaaaaaatggaaacaaattaggcaaaataaaaacttgagtaagaaattaattaatcacccacaaaaaaaaataatattttttagacaaaggaaattaatgtaataagaatattatttataaccaacatagataaaacctaaacggtttttaaacaatgtgggacttttagtttgtttgtgtggtttagttttcaaacaaaataagagaatgtgtaagaaattaagaaaaataggaagaaaaatttataaaatgacacataaactcttcttgtgctttcctttatatatattgattaaaggattagaagtgttatcccaaaattggcactnnnncgtggcatcacaagaatggtgacacgtggcatcaacttagagcacctggtcggatca

SEQ ID NO: 158422 - DNA, 672 bp, Cannabis sativa
aatatcaatctattccatatgttctttgcataatcaacagtcggtacttgaacaaaagaaacataaaacagtttagagtggaatttacccctcctcaccgccgccttgacatcatcttcacctattattgagcagagccggagaagctttttaaaataccaactagcatcttgctgaaaattgatagtccatatgctttgccctttcaaataaatagcatcaatccatctgacccataggttatcatgcttgctcgaaatagcccaaagatacttaaccattagagcaatattccatttcttcccttccctaaacccaatgcctccgagtttcttggggagacaaactttctcccaagaagggatatgcattttgctacggtacccattcactccccaaagaaaattcctgtaacttttatcaatggccgcagtaactttttggggaagtaagaaaaggttcatctaatagttccgaacagccagaaggacagaatggatcagttgagctctgccagcaaacgagagattcctgctagcccaattatgcaaatgtttacgaagtttatcaatgatgacaccacaatctgagaacctccatttggtgggcctgagatgcacaccgagatatttgaggggaaactttccctcatccatttgaagaatgttcaaa

SEQ ID NO: 158423 - DNA, 540 bp, Cannabis sativa
ttttttttttttttctgttatacatactacttcatacgtgtagattatttaatttgtttttattttttttaaaaaaataaaataatattaatataacttaatagtagtctttttttaaataaaaaatataataactaccaatatatattatatttgtatgttcactaacccattttaatttcatgcaccttcattatttaactaatctatatatctatataatctcattgtttaaggtgatgatgtggcagcttaagaattgagtaatacaattttcctattttatagtttttttagcctttacattttttagcaattgagaaatatactcataaatgcatttgcactattaattttgcatggtatttaagtataactattataataatagctatataacttctccatctaactatcttaaaaaaaaacgcacgattgttacaaaatttaagctgatttcatgactcttgattttttgttaaataaaatgaaataattaatattttataaaagatcttgaattgaacatttaaagattgt

SEQ ID NO: 158424 - DNA, 522 bp, Cannabis sativa
  modified_base (219)..(222): a, c, t, g, unknown or other
atggtaagcttgttcaactctcggtaatcaatacacattcgcagagacctgtccttcttttccacaaataataccggagcaccccaaggcgagtagctcggtctaatgaatcccggattcagtaattcttgtgattgtatcttcaattccttcaattctgctggagccattcgatacgatgcttttgatactggatccgctcccagaaccaactcaatnnnnaattcaatctcccgggtaggtggcaattccagtaaatcttctagaaagacatcaaggaattcgcacaccaatcttgaattctcaggtcctgatgtcacaggtttgctggtatccactgcagtgactatgaatcccagacaacctctgctcatcaggtccttaacttttaacagtgttattcttggtatgcgtgtcccctgaaccttactcacaaacatcgctgggttagcactatcaggctcaaacaccaccatcttccgcttacatttgatcgttgccccatacttagacagaaaatcc

SEQ ID NO: 158425 - DNA, 555 bp, Cannabis sativa
acataaactaacatactcctatgatttggggccatttactataatttccaaaaaaaaaaagagagagtcgggtccgatactgagaaaaattaaatagaatcgatttcactacaaaatgagaaaaaacatgcaaccaacaattactcaaaaaccgattataatttaaaaaagaagaagaagaagaagaaaagagtaaactaaccaaaatagtaagcacggcttgtcctactattacccagtattaattctaaaaatacggtcaattacctaattcctgcagtaagttgacaattacaagaggaattcaaaaaggttgacaggcaatcacaagggactccagatagatgtttcaatctaaagctatactcaaacagttcttacgtaaaagaaacctctaaccaaacatcacagatgaaacatttgaagaatgaatttgacccgagccagaagctagactttgtgtcttgcatagtgtcacgggctcaccttttcaggcagcggaacacccgtgcggcaccttgacttctctaagccaaggtcagccttccaaccatc

SEQ ID NO: 158426 - DNA, 502 bp, Cannabis sativa
cgttactttaagtccactgactttctccaggccccaactggccataatccatctttcacctggagaagtctccagtggggttcccagcttcttaaaaaagggctcatttggaaaatctgcactggcagtaatatccctatatctgcatccaattggattccccaaatttctcatccaactcttcttcaccccattgacccttctctagccactgtctctttttttgttaaccaagatcgatcctggactactgaaaaactataccattttctcccttcttatcaagccaaagccgttctaactattcctctagatcttggtcattctgactctctcatttggggttttcaccactcgggaattcttactgtcaaatctgcatatcatcttgcccagtccattgtcactaactcttccccttcctcctctaatcctagcccttttaaggattggtggaaatttctttggactttgaaaattccccccaaaattaagctcttca

SEQ ID NO: 158427 - DNA, 588 bp, Cannabis sativa
tctgcccagattatgaaatatgttctacgtgtcacctagatggatgccacgtcatagtgcagaaatttggataacatttgtccccaagtctgcatggaatctatttggtcgcacgtggacttcctcggccacgaagctttctggatgggtaacgtgtgttcgattcttgtctttgatctggcgtgacttgatcgaacgtctcttcaatgtcttggacatttaatgctactttgaaagttgtacctcaaattacggactgacggttacatgatacctcatgcgtgatgtctgtactatttgtaatgagtgctaacattccattttgggggaaaacccaaaaaaaaaaaagaatttcaaattaattatccctctcacacacctttgttgtggtattttcaacatacaagtatacgtaccgataccgttaacaagttatagactcacaaagagtgaggtcgatcctacaaggattgtagttaagtactttaaaattaaacctttacttctatttagctatatcaaatttaagagaaatttaaaattagaaaacaataaagaaatagtaaaaacaagaagcaagtaattaat

SEQ ID NO: 158428 - DNA, 553 bp, Cannabis sativa
  modified_base (343)..(343): a, c, t, g, unknown or other
aatccgattttctctctccacggtcgacggttgcactagattacttttgatttcccatattcgcttttgaggcgggaagtcaaggcgtctaaggttccttttgatgtagacccctttgtctataaatactcatcgtactggcacataacccattttatcacccttctttgttaagtaaactccagagcgaaaagagagttttttggtcttcaaagttgccaaagtgccttcagacgattgctagtttgcttgacgtcgcttgaactcagacattcgaatctttgagtaagtttctgatctcctttatgcttttctatgcatgtttaaactttgaatgcaactntgctgtaggaagaatgcttaggaaaccctagggttaaaaaacttctgtgactctttttcccatgtcttcatgtgggctttcagccatagagcttgtctttgaaccgcattgtgtttgtcttccatccttctcgttcttagcttcatgaacttttttgccctaactcaagaaaactttctaacttcttgagttttgacttttctttaaaca

SEQ ID NO: 158429 - DNA, 959 bp, Cannabis sativa
ttaaacttcaatgtctaaaaattagtgatgagtgtagtgatattttaaaattattattttgtaatgttgatcttttaaaattattattttgtactgttgatttttttttattttgtaaaattaatgattaaatgaactaatttatgcatttttcttgcataatttgtacatatagtttaaactttaatatttaaaaattaaattaaattatcctaaattttgttttaataataactttttttttttttatgaatactaatttagaatactttgcttaatttgatatttttatattcaagtttattcatttaattctactatttaataatgttaagtatacttttttttttaatttttttcctagactatatataagaaaataaaatatatactatatattttatgaacatgtattattattttcaagactattttatggtcaagactcaaatatactattttatggtcacgtatttttattttaaaagataactgattatttcccttctatatataatataaaatttaaaagaacaaaacatccaacacttaattaaattttgtatcattaaatatttaatttgtattttttttttggtgaggggaataccttaataattctttaactcaacaattatatacctttagaaaaaaaaaacatatatataaagacaatataaagactagagagtcttagttattgaatgtgtatgtaactaaatgtaaaaatacgtcaagttaatttttttctaatatttttttggattttataacaagtaatatgtctttcttttagggaggtcacactctttgttgcttttttgaactaagcagtgttaacgcagatttttgttaactatatttgagcataaattgtgatagacttgtacagaaattaaaggcggtaaagaaaagataagaacacaaaggtttttacgtagttttgcagttaaaattct

SEQ ID NO: 158430 - DNA, 546 bp, Cannabis sativa
ctcaccgcaccaatttgatagaataatcttagagtaaaaatattctatcagctatttcccaaataaataccaataatgaatttctcaaataatttttattctgaaaaacagtcacagagttacaatattgagctttcgagaggctcgtctctccaaattcccaatctttcgagaggattggtctctccacaaagaagtctactcttatctaattccaagctaatctaaatgaggttgctccctctttatttgtaagcattagtcttaaaaagacttgggccacctaggattacaattggaccaatagaattaaaacactaagacaactcaacttgtgcacataagagactaagcatttcatttaatcattttctgatataaaataagtcttaggtttatcaagatcaggttcttgaagcttgaaactaattcttgatgacttgaatttggttcttgaaggtttgaagatgagtcttgatcacttgaatgcagttcttgatcttcaattcaaccttgctctgataccatttgtggtgaaaacaccct

SEQ ID NO: 158431 - DNA, 529 bp, Cannabis sativa
  modified_base (26)..(35): a, c, t, g, unknown or other
agggtccaatctgtaacttttgcaannnnnnnnnnccaaaatggtatttaccttatttattattatgtaaatttaattagtgtaatattttttttttgttaactgaggaacttattaaagaaattatcctattacaggcagctcgcgcgccaataaattagaaataattaattaacaatattctacaaaatgaaggaactcatttgtctaaattcgacataatttttaaggtatacaaaatttagcatacatttaatatattgggataattacataagacacaatttttttataaaaaatattacatttttatgtttaaagattttttttttataatttacagtttttcatagaaacaacacgaaaataacaagaaaactacataaaagtaacagaaaaataatattcaaataacgtcaaaataacaacaaaagataatatacggataacgaaaaatcaacaacaaataacaagagtacaatataaaaagactgtattttctgtaaaataaaatcgtaaaaatatttaa

SEQ ID NO: 158432 - DNA, 935 bp, Cannabis sativa
ctccaggagactcgagcaatatctttgcgtagtatggctagctcagctaggattccttcattcagcgatcctgtggagactgtcggcgcgtgtttcttttggtccaagtgatcccataggtcaccatgttttccgttgatttgatatcttagatcgacgggagggtatctttggttccttcttcctttctctctgggttccgggtgcacaaaaatgcttttttggtcctctcaatcatgagggccaagactccctttttggagcttgcccctctacggacctttctctttcgggaaatctgagcggacctttcgcggatcctgcacctttttctttttccttgggatggaattaggatttttccattggttcccttcaaagggataccgtatggggctaggctccctggacttatgcttttgagtgcttggtgaggacttttccggtgtttcttcaagtcctgcagggatggctttagggtgtatgtggatccctgctgtctccatggctttttgcatggcgaccatcccctcttgcatcctcctattctattcgtttttgagccggcagctcggcctcatgatcagccgccttttgcctcaagaccagtaactccgtatatctaccttcgtcgtaggtgtcatacccttcaaagttttcttcgtactccttttcgttggcctcatctcgctccttagagcccacattcactcttgaggctacttctttgccctctgggttttgagcatcctgaggaggacggggctgacgtgtattgttacgagattccaccattgttaatctgacatttcctttaactgttgtcttatctgacgatgcttccttcagctctcaataaaagcagcaaaatgttggccgaggttttcggcaaccaattaaatagtagaatgagtagagctgtagaaagtttaatg

SEQ ID NO: 158433 - DNA, 619 bp, Cannabis sativa
  modified_base (580)..(584): a, c, t, g, unknown or other
tagtctaacctaattaaaattaaattagcaaaataattagttttaaaatatataaaatttattttttattagattattttaaactaattttagattaacacttagtttaatgacatatattctagatagttgtttctagtaaataattattttttctcatatttaattaattaaaaaaatatatttaagttgaaaattaattttttgatcaaattaaattagaatatgtttcttagatattaaattagaatttataattaagttggttttattaaagacacttaattatttgtttcttatatttaatatatattaaataaataaattttactttatgataaaataataaaaaaaaaataagaagaaaagatgtaaaagatgttatgatatgatattcttttgtggtattctttttcattcaaattaggggtgttcgcggtgcgggtggtgcggtctttgactatttttttaaaccaatctgcacatgcagttttttaatttcccaaaccgcgcatgcaccgcgaaactaaaaaattgcaaaaactgcaccacaaaaaatgatgcggtgcggtgcagtttnnnnngtttggactatcactaaataataaaactatcacaa

SEQ ID NO: 158434 - DNA, 730 bp, Cannabis sativa
taataagtaaaataagacgaaacaaataatgattttcttctccaacggtaacatctccatccactagcatcaaactaagttcctggaagggaagaaaatagggggtgggcttataaagcatagtaggaaaacaactaatatcaaaagacccttggtttaataaaaattcctgcatggttagcttttaaaaataaaatatctcatcaccattataaaaatacataaacaaagtagagatgccacaaataatcacaaaatcaagcgtcaaatgcatatcacaccgtccactagaccccctagctctcaataccactcatagaaaacgacatccaaaactgggtagtcgcacctgataaccaccataatattggggctcagattcaattcactccatgtacagattctaggtctttcacctacaggtgagtggacacctgatctacctatgatgacactgagactaggtcgtgaaacaacaatatgcacaaataatgatcaacatggctctcatcagtataaccaaagcagacaaataataagaataacaaaagaacatatttctttttttttttctagaaaatttggcagcataacgactgtatgtttaataaatccaaaaatcataacatggataaatatttgtacaaaaatatatttggcacttcgtgctccagaatagtccagaaaaatgtgcagattaagttttcaatttttcaaacaatttgcaaat

SEQ ID NO: 158435 - DNA, 648 bp, Cannabis sativa
tataattcttttttatttatttatttatttttaataagaaattttttaattatatacattatatttaaattaattatgaaaataattgaagtaatttaaataaatataaatagcgaatgatgttatacactgaaaacataaataattattttctattttaattttttaaattattttcttctctcttgctctctcttgtctattatttcaaaaaaaaattcctatcacaattttgatcatttcaaaaataatatattattataatatatttttcaaattaatctttcaatatatatagaaaacatatatttcatttattgtaattaaaaacaaaatataacaaaaataaaaacaaccttttagtttattttataatttattactaaataagtaaccaaactataaatttaaataaaattcagtatatatatgttattatagagttgttttatatcaaaataataataacttaaagttaaacatcataaacttaactatgttatatatataaatttttcaatttaaataacattatgttggcaaattatttaagatacatttatattatttttctatcttaataacatttaaattaccttaaaaatctatgtataaatcaaaagtaacatcatcatcacgaaggaagat

SEQ ID NO: 158436 - DNA, 756 bp, Cannabis sativa
cataaaagacataagctcgtgcctgacagttgcatccactaactggtcaatcctgggaagtggaaaacagtcttacgggcacgcctgattcagatcggagaaataaatacaagttctccaagttccgttaggtttcagaactataaccggattggctatccacgagggataaaataccttgcgtataaaatcattgactagcaacttttcaacttcctgttttagtgccccttgcctctcagaatccgagggcctccttttttgtgtcttcgttgggtagttgggatcaacatttaagtgatggtagataatcttagggtcaatccctatcatatctccaagactccagacgaattgagtgaattgatcatggttcgccttcaaaaagcttattaattactatttgagctgctcgtccaggttcttcctaatgtacacacatttggtgggttttcctgggtcaagaataacgtcctccaattcttcaattggttttagtaggtttctctcatcttgaactcgaggatcaagatcttcatctttcttcttgttttctcctgccaagatcgtcatcagttgatgatcggccttcctatactgtagctctatgcgataacaatcgagagccagcatctggttgccacgcaccacccccaccccatctggggtttggaactttaaagacaagtgcttgatcgagctgattgcccctagttcgtgttaggttttatgccctaaataaaaatctatttcaat

SEQ ID NO: 158437 - DNA, 634 bp, Cannabis sativa
  modified_base (54)..(63): a, c, t, g, unknown or other
  modified_base (325)..(341): a, c, t, g, unknown or other
actgcaaaccgcaccacaccgcgtagtttaggaaaaattcaaaccgcgaccgcnnnnnnnnnnatttcaaactgcatttttttgtggtgcgggcggtttgaatggtttaagcggttttatgaacacccctaccggcagcagctccgatgactttttcgacactggcaattactccgacgatgaaaaaaaagatgctaatctagaaacccataaaatttattaatcaataaaatgaaagaaaaatagaggttcccactccaactgttgatattttattgtaaattcttaaatgatccaaatcactttgtcataataataataatannnnnnnnnnnnnnnnnaataataataataataatacacataatataatagtcaaaattgataaaaaaaaatgacttaataaaaaaacccttaaaatttattgatgaataaaggaaaaagaaatttcccaacaaaaaataaggaaaaaaaaaataaaaggaaaaaaaaggagaacacactagtttaatatatcgagtgtgaaaaaaattagaacaacaataatattggtaccaaaactgtcaagatttacatgagagttaactaaaaaaataataattcaaattaataaaattaataaattttttaatta

SEQ ID NO: 158438 - DNA, 640 bp, Cannabis sativa
acaaggtagcaagcgatcatatttcgggtagctaatttgaattccagtagaagtggagggcttgaaagatctgcttatctaccctttagggtttgaattccaatttcacttacttctttgatgttgatttatgattcggatggttgtcagtgaaggaacagacatagctagggtttcgtcgatggacgaagaagagaagaaagaggtttgaattgaaaggggaacagctatttttgagattaatagcaggttggttgtttttttttttaaatgggttgtgattctccaatatttaaaactagggaatagatccgcgcttcgcgcggttttaataatttttttaaaattttacattaaagatattaatttttagtcacgaataaaatctcaattcagtctaatactattttatatttttttatgaataatataaaattatataatatatttatgtaaaatttcttttatttgtgattagcacaaattttaatcataatacaataaaataaaagcacatttcgaataagctaatttataataattaaaagctattaaaaatataatatatttttttaaaatgaatcaaatatatattataatggtataaatttttctataattaaaaaaattattatttttt

SEQ ID NO: 158439 - DNA, 626 bp, Cannabis sativa
ttttattttaataattatcattttgattaaataattatcaaataattattttaattaataattaaaagataattaatttaatttaaattattttatctaataaaataattaaactaaattaatcacgtgcctttatatgtcaccttacatgtgtagaatgagcctacatgcgtgggtcatattttaaagtccaaaattaatttctcaatttttccataaataatatttattactgaataattagcaattttctctctgaactttcgacaatattaattttttcccctaaaatatacagcttattaagaattctccctaaacttttacatttacaaaaatttagtcattttattaagttccgtcccattattctattgaaatactaacgtgtcattataaattaccaactttgccccataaacattgataattatcagatcgtaccccctcataacaaacatgagaaagattcaatatttttttagtaaaacttaaaaaattaatttagatctttttaaaaaaatacattttgaatgattaagaaattaaaaaagaaattaaaatttcaaaactaattaagcgatttaaaaaaattatttatgttttattaaaaaattcatttagat

SEQ ID NO: 158440 - DNA, 694 bp, Cannabis sativa
  modified_base (665)..(666): a, c, t, g, unknown or other
acatatacaaatatattatatctacgtatatatatatatatttattatgggtaagtctgccgtaaatcttattagagacgtattttagtacgattctctatttattttgatatacatgagagatttttaatttatttttattatttaaaatattttgtaaatttttaaaaaattaattatgaataatttacagtgtcataaataaaatttacatattttgttgtacgtgtcactgtttttcttatacgcgtggtatagtttacactgttaactattcgaaattttttaaaaatttacaagtgatcttacatagttacaacatatatatacaattatgaaaaaaaaaattagactaaaaaactgttttaaatgccgaaataaataaaaaatctaccaaaataacccttttataaagagatctactgaaatttaattttctgtatttcttatctttgtatagtataatatttagaactaaaccacttgaggctaagtggtcataaaaggtatacgagggtacgtgtaatgggaagctctgcattcgagtatcaaattatacaatatagtataatgtgtatataaacgtttcaatttaataatattctcaagaactatatacatttattatatactaatataatttagagcattgctattgggcaccnntggtgcctagcaccttctaaatgtgtcg

SEQ ID NO: 158441 - DNA, 505 bp, Cannabis sativa
  modified_base (45)..(51): a, c, t, g, unknown or other
atttctgatctttattaataagataatctgattatattgaaatgnnnnnnntttagggcacaaaacacaacatgtacatgatgctaccaacaatggtgggagatacagagttgacgatccacgatataaccagactgttgcatatgatccacgactcatagtcttcatcttcctcatcagtaatttaccattgatgaattttatcttgtttctcgccattaaagcaaccatcatagatctacgccaggagctataattctcagcaccagtgagaattttaggaaccagtgaagaagaagcattatcgccattggagagaaaataagggcttcgtggatcagtagtaggaagcttactgctatcatccaaagcagagaatcgacttgaaccagcatcaactccattgttgctgttacttcgagtttgagttcctcctcctcgagccatggagaagtagaggaaacaaagaagaagaagaagagaagaggaagaagagctcaacaat

SEQ ID NO: 158442 - DNA, 545 bp, Cannabis sativa
tgggaagagtaaataggtatttatatgtaaattgtgggagaaaagtgtgatttttggacttttgttagtgtattttcggatgggtgcaattccaattaacaaccaatttttttattctttttcttctgcaggtggcagctggcgagctgggataggaggagaagctgacgaaattgcgtgtggcgctggctggttggctgggaaagccgaagaggcgggaggaggagggagaccagctcctgcgtgtgggtcccacacgtgcaggctgagagaaaaagaaggggagctcacgctcctgctgccggggtgagatccactcgccatctggaccctctgatcatcaaatggacgactcggatggatgctgactttgactgagagtggggcttccataaaggctaatctgatttttcattcttcacttgttcttcaatttaattcatactttttctaccaaatacacctaaaaatacataaaattaattagaaaattaaaataaaactaaaaataaataccacataacatattataataaaataattat

SEQ ID NO: 158443 - DNA, 536 bp, Cannabis sativa
gtcttatttgtacaatttttaaaatacaaaatctattttgtcatttaacaaaacagaaagtacaattaataatttttacaaaacacaaagttcaaaataaaatttaccagtttatgaaatatcataaatatttacaaaatggacgaaaatttaagaaaatttgaggatatcgtagatattgtctgaaaatatgaaaataaattataaaagatatttgataaatatgaataattataataatttatacaataatataacaaataaagatcttatttaaatattataatatcatctttactacaaactcatataaataaatatgataatatttaactttaacacacaaccaataaaagaaatattaataccaaaatgagcttttagaaaagtcaaaattattagttaaactatcttgtttttctgcatccattactctagttcagcgttttttttaggggtaagttgaaaaatgcctcttttattaattaattaatcaaatttacctctaattttatatttatttgaaacatacctct

SEQ ID NO: 158444 - DNA, 521 bp, Cannabis sativa
tgaaattacgccttatagtgaaactatgtaaattagttataccatactttggggtgaaagtttgagcttcccatgatctttatattatatttagaaaagggataattaaataagatactactttttttaaaacaaaaaaaaaaatattttttttatgtttaaagaatttttttttacatttttatggttatccctagaaacaacaagaaaacaaccaaaaaaatatataacagtaatatatgaaaataacatctaaacaacatcaaaacaacaacaaaaaataacataaaaataacaaaaaatcaacaacaaattagcaagagtacaacataaaaaagaccatattttctgtaaatattaaaatcaaaaaaaatcataaaaataagtttttctataaatatgtttctttttatattggattgggcaaataccattttggaccctgtattttgcaaaagttatcaattagaccttgtattttattaaatgataaaatggaccctgtatattctaaaatggta

SEQ ID NO: 158445 - DNA, 794 bp, Cannabis sativa
ccttacttatgattatactaaaataattggaagtattggaattaaaaaatagtaaatttgttgtggcttacgacacgcatcacctctcgtactgactaacctggcatgattgcccaatggcaattccacaggtctttaacatgtcgtctgtatagcctgagataaatcgcaccttcgattcttttaactcagcctcgaaggtgacgctgtgatcttgaggagttttaaacgtacatggtttgggaggcataatctcgaaatccaggtcatctggttcaaaagcaattgtgacgttgggtaaaaacaaaggctttgccacaggaataaaggacacgtcaggtggttctggccaggctgcttctcgcaagaaccagtgtctgccttcggatatttcttgcaagaagcgcctgtggcgattagaaatatcttcctgttgggatctcactgtgtgttccctagccctagcatcgtttaactctaatttggaggtgggttttgagggattgtgtttatatgggatggccaattctgtaggaaactcaaactctaaagcttctggatgataaactcccgaaccagagtgggacattgctaccagcaaaaagcagtcccaatccctagagagaattttatcaaatcagaaggtaatgagttggagatcttaaaacaacttacatattgcttgaatcctactatgaatagttttaaccctaaaaaactaccaaactcagatgagatgataacgatacaaacgaatcaagtaactgatccacactatgtaataaacatgagaa

SEQ ID NO: 158446 - DNA, 721 bp, Cannabis sativa
cctttttttatcagaaaaattggtctgttttggataatgattttacagctgttgttttggactgtctcaataagggggctgatttttctgaaattaattctactttaattgttttaatccataaaaaggcccgtgctaatatgcttaaggattttaggctcattagtttgtgtactactttttataaagttatctcaaaaattttggccaatcgtttaaaacatgttcttgatagtgttatttctccttttcagagtgcttttgtatctggtcgtattatttatgataatattattctagctaatgagttagttcataatataactaataggaaagtagggaaaaggggttgggctgctcttaagcttgatatggctaaggcttttgacagggttgaatgggattttttaaggaatgttatgtttcatcttaacttccctgtcagttttgtttctcttatctttaagtgtttatcctctgctgctatttcttttgctgtcaatggtgttgttagtgagcctatcgagcctactaggggtttacgtcaaggggatcctttgtcaccttatttgttcattctttgttctgagggtctttctgctattcttagcaattttcaacgtcgaggccttcttaggggccttgcaattgctaggaatgccccttctatttctcatcttttgtttgctaatgatagcatacttttttgttctgctgatcc

SEQ ID NO: 158447 - DNA, 737 bp, Cannabis sativa
  modified_base (123)..(124): a, c, t, g, unknown or other
agaacccatagtcgatcaactcgaagaggagaaagtactcaacgagctaatgatcgagaaagtatgggaaccagtaaatttgcaattcactcaaagacgaagtctatgagtaggacgcgatcnntgagtaagacgaggtctgtcagtaattattcccaatcggatcttcgagagcacttgaattggaagaaacctgaccttcgccaacagctcgatccaaagcaagaggatcccatccaattgtggataaacgagctggaggacaagttcaggagatatcaagtaggggaactagggagacagtctagatacgactcagatgaggagcttaagccgtatcatccagatatcatgagtaccccttttccttcgggattcaaaaacccgcatgtcttgtcgtatgatggaactactgatccggtctcgcatttaaacaactttaatacaataacgagagcgagtaatgtgacaaaaaatttatgctgtattttgttccccacctcacttgttggagcagcaagcagctggttgaacaagtttactcaccattcaataacttcctgggagcagctgtctagggatttcaagaaacagtaacaggctgctagggatagacgacccgaagcagccttgctgaccaatataaagcagcagcccggtgagacacttaaggcatacttaagtcgttttagcatggctgcggctagggttaggaatttggatgatagtacacaact

SEQ ID NO: 158448 - DNA, 534 bp, Cannabis sativa
ttgcctcagagatgaccagcgagtatgtctcccacctgactcaattcccgcccaaacggtacgctgcatgtgcatccttgaactccgtctaccaggttcaagaaatcagcaacaccatggttgcggtaagtacttgtgattcatttctttcctcaatattttgtctaaggcatttgatctcactcttttctcctttttcagattactacggagaccacccgcctctccaggaccaccgttaatcatggcttcgtcatgtccgaatttgggggcatagacgaggccgtgaggatccttcgggacctgtctgctgaaaggcgggcgatctagaaggaggctgagcgaagggaggccctcgcattgactaggccgattgagtccagcccactttatcaagctttttctcacttcttttttttttatctacagctatttttcttttattcaagacaatcttaaatatgtagttgttttattaaggggagacaattgcttatggcctgtccccgagccctttgtaatatatatattttt

SEQ ID NO: 158449 - DNA, 867 bp, Cannabis sativa
ttgaactggccctagtttctgagggtgcagaagctcagatacaaaagaaaaatattgccaaaagggattcatggaagcaaacatcaggtgttggttctagtaggggtacagatcccggtgaccgcaacaaaagacctagtgaattatcagctacatgcccaaataaaaggttccacggtacccaaggtttccgtcctggtgggaacgaaaactggcagacttttcctaaatgtctgaggtgtaaaaggcgccaccagggcgagtgttaggccaggacctgtttccactgtggggtggtgggtcacatgaagagaaattgtccacaactactacgactagagcaagagaaggatgatacacccgctcctgctcgagtgtttgccctgactcaggttgaggctgatactggtccttctattgtaacaggtcagctttttgttgctggtattttattgactgttctaattgattctggtgcgatgcattcttatatttcaagtagaataattgagaagttgaatagacctagtgatgtgctttgtagaggttttggaactttgatgcctactggggaattggttatctccaacaggtgggttcgatcccttccagtatttgtggaaggaagagagttatcagttgatctgatagaattgaatctagaggattttgatgttatcttggggatggattggcttgctaaatacaatgccaccatcgattgtaaaagaaagatggtaacttttcagcctgagggcgacgatcccttggtgtttgtgggtaagatgcatggatcccagattcccttaatttcagcacttaaggaaagagatttgttgtgtgaggggtgcattggtctcttagcaa

SEQ ID NO: 158450 - DNA, 692 bp, Cannabis sativa
taaggtatagagcccgtttggtgaagaaatgggtcatggatgggctttattagagagagatacaatctggcttacacacaaaggctcatgatcattccaatgtgatgtaatacgagctgctaagttgaccatagagttctttcaaaaatactgtaaaatgagaaaaaaatactgtataatatagtgatatagaattttatacatttttattatattaattttataaaaataatgtgtttaaagttttaaaattataaaaatattgtaaaataaaaaaaaaattcaaaaacaaccttagaataatttagcaaacaacatacaaataactataaaataataaaaatataactacaaagtaactgaaaaataataaaatattgacttaattacaataaataaaataatgtcaactcatcaatatatttttgtattacaattttttttacatagttttaacaatttaatttatcttttttgtactgttacattgtttgttttttcatagaatatgttgttacaattttattttttcaattttatttttgtttttgagttagtgatagttaaaaaataactataaactgaaaaataatataataaggacaatttacactaatgtatacattatataattttattacaatatatgtgcataataatttattttcatataatcatacattttatctatt

SEQ ID NO: 158451 - DNA, 523 bp, Cannabis sativa
  modified_base (428)..(429): a, c, t, g, unknown or other
gacaaaaatattttattatttattattaatttcagctgaagtatttaaattgtttttcatattttgtgtatttatattttatattaatcaatttaattttggaaggaaaggtgtctagctttcctatttatgaaaaataaggtaaaaatggtaagttttcttactcagttcttttctacctaaccagttgtgatattcttatcttgtgagagtttcccattttgtttgatcagattacttgaggagaaaatcggagctaaacttttcttttctataaaagaagagttgtacttgctgcctacgattttgtaggtacagaaatgaaaatttctaggctgattgaagatttattttagtgaattttctggtgggctggggtcttgttcagactgtgtataagctgtcaataaggtgtatattgattatanntacaccttatagcagctaggtttagtatctctttcgtacactttgatttgtattcatatcttaaggaaagagtgtctttgttttgtagagaaga

SEQ ID NO: 158452 - DNA, 666 bp, Cannabis sativa
caatggggcgggtcggatctgatctgactatgatccgacctgatccagatcatgtacggatctgcctcgccccgccccgctggatcagatactcggagcggataagatccgacccaacttttttttttaaaaaaaaaaattagtttatatctaaatttataattttttttttaaaatttatttgtttaagaactaataatgcatcatttttttttcttgtatatttttttcctgtttagttttgtttcagcttttacagtataaactcagaccaatttcatttccttcctataacaataaacaacaatatgaaaaactcagaaagagcttttttttttttttgaacagaaacaacacctttttttactcaaacaaagaataataagttgtgattgctccctccttgtgtgagggaatgatagattagtagtcttacaacaaatggaattttgttttgagtagttgaacttgttggtaaatatgttaccccaaggcctaatcttattcatgggtatccagaccagttgttagagctctttgaaaaaaaattctaacttgaactttctcagatttgcgaatttctcctaggcctttcattagtattagagtcaacatttcacaggacaatgaaatcaatataggccgatcttggaataccttaaaaga

SEQ ID NO: 158453 - DNA, 747 bp, Cannabis sativa
ggttcaactacttaaaagacaaacttcatatggcatcatcaccatttcttttgaggggggatattaaaccagaatctgttagttaagtttagtctgttatttttcttctttgcaaactatctgttagcttcattctattatgaccgttagttgtcagcattagtttgtttttcttcagcttgtaactgattgtaaaggcatataaataaacatcaaagcaacccattcaggttaagctttttttggcaatattattttcttgctctgcatttgctctgtttttttctcttctggtttttgccttgataaagtttctacatggtctgatcgaagacctaggaggaagtataatttttatttttagtatatgaatcaaaagtttttgtttttgtataagtaaaaattttatgaatataaatcatatataaatgtaccattgaggaatcataaacataaaataatcatattatgaataattagtctattaacagttttattgattgagtgacaatatgattaaaatacattaatctactaaagaaatcaaaaacataaatcacacatatataaatagaaataaaagtgattccaattaatatgcacaggaacaaaaagcataaaataataagggatatatatttgcatctggtaaatttatctaacatttgttttttagggtaaataccattttggactttgtgttttgcaaaaattacagattggaccctgtgttttgttaaatgacaa

SEQ ID NO: 158454 - DNA, 625 bp, Cannabis sativa
aaaaggaggaaaacgataaatgacaagaaacgagtaaagggagccccgacggaaacagaaggaagaacaggaaggaatgggtaatcgacggatcgaagattaactacaagtgaaacagtataccgggacccgaagaggcacccaggtaccttgccgacggaggaaatacctaaaacgccgacggaggaagtacctaaaacacaacaaaagggggaccgaggttacactactcacggaataaaagcccccggcggaggagaactcggatccccgtagacgagaaccccgttggaagtagggaggggactaaagcataaagtaagaaattgataaattcaagaatgcgatgccgacggacacaacaccgttgaaactaggaagaataataactttaaaacccgctaaaggcataaacatgtgtaacaaggaagttatctactagaatgcaaacacgtggtagagggcaaaaggaataaaagaacggaaacacgtgtcaacaaaacaatgggtagatgataaataaccgatgcaagcaaaaaagacgtaggggatatatagagaaggatcacgtaaaagaagagaggattaggaactggaaaaagaaaggcccccaaaaagaaatctt

SEQ ID NO: 158455 - DNA, 621 bp, Cannabis sativa
aatttttgtttttacggaactcaattctaatgaaaaatgaagatgttatgaaggtttgaaaaatcgggtgcatatggttgagcaccatgcgcgcacacctttggacaagttgatccgcgcgcatgaattcagacaatttttgtctaaagtgcacgtgtcctgaccctgcttcacgcccacgtcacccgcacacgcaccctgcagctgacgaagatttctcggtcaaggaagctgcatctcctccttccgtgcgcgcatgagggccatttgcaacctgtgatggctgcacagacagccttgctcccagccatcccgaatttttgatttttgtgggatttttccccaaatttcgaatttttgcgattttcaaaccctaaattaaaataaacattatttttaatatatttaaacttaaatatcaattttgaattaaaaatatttaattttttaatagattattattaattatatgatattttgaggtttaaatttaaaaaatgattattttatttttattaacttatggtcagatttaaaaattagttagtttctttaatatttatatattatttaattataaggttagatattttaatattgggtatattttaaattaaagat

SEQ ID NO: 158456 - DNA, 554 bp, Cannabis sativa
tttgactcgggactccgtttggaacgttctttatatcgttggaaagctcattctaagatctatgtgaatatctgtagtttaaatgctaattttataataagtggaaattaatttagggattaaccctatacttgtgtatctcgagattgtgactaagattatcggcacttggtcaggagcaccaggggatttggaatctccatatttacagaaaatcaggtaaaatagtagttagcacgtagagatatgcgcaatggcacttatatagaatatgatatacatgagaaactaaaaaccaggattagagttattactctaaagtgagcggtttattagcttagggttattaccctagtaaattgttataccatgatgtatatagatgtatattgaaattaagggttatgtgttcaaggcataatcagattggactcggtaactagaatagtgatgaattgttcaaaggccttattgtaaatagacgtgtgagcgtaacacataggtctatgccatatagacataaataggcatgtgagtgtaacacgcgggtctgt

SEQ ID NO: 158457 - DNA, 815 bp, Cannabis sativa
gacatgtctgcacaaaagcaaaaatagcatggttagcaaaaaccaacaaaaaatacaaagtatggaagccaagaagctgaaaaagaagcaaagcgcagagtgacggtccgccttgaaagtcagaagtccatcatcacctaacatcgactttatctcagccataacgaccttcccttttccagcataaggataggatggccgaacaggtgaaatgacctcccttatgagaatgccgtgttccacgggcctgggcgtggccgggattttcttcttcctcctcaaaggagccacctgctcagcctcaggctcagcctcagcttcatcttcaggattcataggctcctgagcgtactgctttgcccgaacaccacccttcaacttagcctcccgcttaagttgaatcaactcatcctcctgatgagctcgttcaggccgagcagtagcagacttcctcttctttcccgtcacagacttagaagaaaagtcctcagggtagagtcgtactacaccagatttgcatcggaggtcaactggataatatccctgtctttcgcctgcaaccgggcaagcttctgagccctatccttaagggtaagagtgaggggaggacggtgatatgtcggaatctgctgaaactaagtccgggtgatgttcggatccttcaccatgaagtactcatcaacaaaatgccctattttgctgacagccttgttgtccgtcccgctcagccacttgaagcctggctaagagaagtagaaataccccgacctaccttgcttgggagtagacttcaagtcgaagaaccaagcaacctc

SEQ ID NO: 158458 - DNA, 669 bp, Cannabis sativa
  modified_base (417)..(418): a, c, t, g, unknown or other
agagatgagtcactatcaacaccatccagttgctcactgacctcaggaaccagtcggttcatatagtgggccagcatctccttgcccttttcggcctcaggcaggacgggcaaaggtggagttggtgcctgcacccgctcaggaacactcctcacaagttcagacccagccgttggtggtccagactcctttgacttggcatatttgggggtagaagggtttgcaagagtcagctcctcagaaaggtcaataatctctccagaaggtctcttctccgaggacccctcaccgcccttagacttcttggccagaggagaggcgctagagctttcgcccatcctcttccttagagcatcgagcatctgccgagacatgtctgcacagaacaaaaaagtgtggttagaaaacagccatcannaaacacaaggcatgaaagtcaagaagctcaaaagtaaagaaacatgcaaggtgaccacccacacaaagattcaaaaatccatcatcacctgacatcgattttatttcagacatgacagccttcccttttcttgcaaaggggtgagatggccgaacaggtgaaatgggcttccttatgcgaatttcttcaacaagcctgggcgtggcctggagtttcttcttcctcttcaatggggtcacctactcagcctc

SEQ ID NO: 158459 - DNA, 592 bp, Cannabis sativa
aatatttattattattaatagaataattaatatttttgtctcttaaatttatgacactatcaaatggtttgttaaaaatattctttaatataattgatgatgtggcattttagtaaaggataaatattaaacacaaattcttatatataaaaaaataatattatttttttaaaaaaaggtaaaaaaaataatattatttaaaacataaatatttattttatataaaatgtgtctattgatttaacggtatttttaaattttctatgttaactttaatagaatatcttaattacaaattttttttattaattttataatattattatatatagttaaaaataaaaattatgtaaattttttatataaaaaaaattaattttattatatatttaattataaaaattatatctatatataatcacatctatatataaaatatatataaaccttaatttcaatacaatttttttgtattaaaagtgattaatgatattgttaaaaaaaaaaatgattaatgatatatatagggacacgattttgtgatgtacttttacggaatgtattccgtgatacattagatgggtctcaaggt

SEQ ID NO: 158460 - DNA, 638 bp, Cannabis sativa
ataagggtgcatcagtgctccaattttagaggggtgcattttagaattttcctaattaaaattgctaagaactaccaataaattggcttggtcggacttgagttgaaatggagtataggcaaaaaaaaaaaaatgtaggcccttactgtaaagataaatggtatttttaaaaattatttaaaaaaatatgtatattttttaaaaggtatttttttatttgagcccctaatataagtagggcctaagcacgggcctagcccgcctatacctaaggccggccatgattgaccactacaaaaatgaataaaataataaaaaaaaattcatcaatttttttttaaaaaaaaaaaaaaaatcatcattaaacaaaatgaatatgaacttatcgaaaaaaaaaaaacaaaaagaatatgaaataatcctatgtagatgctaaaataaaatttgtgtacaatcagttgtttttaatctttgattgacctaatttcctttgctgtagcatgaagtaaaaagtatatcacttactacctatatatatatatatatatttcttcttattttgatatattttttaaaatatgtctttgatttgtttttttcttcttattttgacatatttaaaatatatataaaaataa

SEQ ID NO: 158461 - DNA, 615 bp, Cannabis sativa
ggcactaaaattgatgaagtcatctacttacttctgtatgtagatgacatgctcattgtgagcgaagaaaggtctggaattgaccttatgaagggttggctaagggaggaatttgaaatgaaggatttaggcaaggcagctaagatcctagggattaacatttttaggaacagggagaatggaactctaaggctacatcagaagaactacataaagaaagtcatagaaaatttttctatgactaatgcaaagcaaactaagcagcctatgactaatcaatactatctaagcaaagaccaatgtcctaaaactataggtgagaaggaagctatgagtgaagtgccctattctagtgctgtgggatcagtgatgtacctaatggtcagtactagactagatttagcctatgccattagtgtacttagtaagtacatggcaaacccaggtaagcaacattgggaggctatgaaatggttgttcagatacttagtgggatctacaaatgctggattaaactacaagagaagagacaagagcagaatgatcacttggtacagtgatgcagactatgcaggtgacagagatagtaggaaatctacctctgcctatttcttt

SEQ ID NO: 158462 - DNA, 626 bp, Cannabis sativa
  modified_base (32)..(63): a, c, t, g, unknown or other
tttagaaagttcttatttaggatgttaataannnnnnnnnnnnnnnnnnnnnnnnnnnnnnnnaaataatttccaacaataacatcccacaacacaagcttaattcagcataatttagcataaccaaacctctgaaaacaatactaagtaactacagcaatcacagcagcagaaacactatctcatgcaaaatttcaaacttaaaactcaatgaacaaaaaagaaagttgcaaagaggtttaccttggcttgtgttatagtgagatttttctaacctagaaactcgagagcggactcctgtttaaaggacacgtgtactcaatttccccaaggaaagctgagatgtcgatgagagactcctcgaggttaaacctcacctgagctaaactcagtgggatgatgcgaatatgaccaagtctaatcgcattcgcgaggctcgcattatgtgggaccaaggaatggactcaactcgcatataccacgatatatgggagtatcctttcaatcctcccacaaaaacatagagatcgattctctctaaagcgagttggtctcgacgacccaacaacctcgataaaccaatatagactcgcatgtctaggttctatcagctcgttatacgatgt

SEQ ID NO: 158463 - DNA, 579 bp, Cannabis sativa
  modified_base (234)..(241): a, c, t, g, unknown or other
atttaaaatacgtggatataatatgagttatttatgaaataaaaatattttcaagttcgacgacccaggagacccgattgggggtcaaaaatgtcacaacgactttagttaaaaatattgatgggattattgggataagctgattttagaaataccgggatattttggggtactcagagttggccaaatactctaaaagtaaaaatttcttaatggctaagaaataataagatnnnnnnnnataataaagtttttattaatattagattattattattaatatattattataatattatttatatataagttaacgttaaattaatttatatatattaatttatcagtgaaacagaacgaacgaacgaacaaaactctcgctctctctcttcgataaaaccttctcctcttatatctattttcttcaattttcaactcgaaacctagtgatctaagcttcggtagcagcaaaatagcaaatctttaaaaaaggaaagcttaaggtatggtttaatttcattttaagtttaaaaataattggtttggtataggggttttgtaaattagaatagttatgaa

SEQ ID NO: 158464 - DNA, 601 bp, Cannabis sativa
tttttacgtggttcaaagattacagcttttaatctacgactcaatattattagaaaaaattacacagtatattgtcttttggtcattttttacttttatactgcatagcagtataaattacatttgtactgtataattgtaaaacttttatatggcaatatttttcctttatttaaaacttttattttgtcattttttttgggcttcaagatgtgtttttttttaaaaaagattttaaagaaattaatgaaaattttgattgtatttaataatgaaaaaattttgatgtgaaggtgttgtcacttttgtgattttttttttttttaaaaaaacctaatcatgaaaagcttaatttacatcttcctacacgttatcttttttttttttaaaagtataatagctttcattatttactttcttctttttttatttatttattttcattgtatttgagctctctctccactattcaccttcttcttcatttttttcttgttttttttggactattttcaaaaatatgggaaaaattattaaagttatgataaatatggtataaaaagtaaatgtcactaaatatgacattatctaatcaatcaaa

SEQ ID NO: 158465 - DNA, 619 bp, Cannabis sativa
actgtttataccgagcttaattaaactcaggaaaatatttacctcgtgcatgagcacaaggttgccttcagcaagcccgagcccatgaggcatgcgaggcacaaaaaagatcctactaggtattgaaaataccataaggaaattgggcacataacagacgaatgtcatcagttgaaagacgagatagaaagtctcatcggtcggggccacttcaagcagtatgtgaagagacagggcaatggatataaatgttgggaatattttaccaggatctagatttactaacaatgaaataaacacatagtggttatgaaaaccttacattgattgcaacaaaatataatgactccttccgtgcaagatctctagcccttgattcctttctgtagcagagcattatcgagatctgacctggatctctttctctccatcaggtttggttaccaccgtcttactcaatatgattttgtacttgacttgctatgtgtgggaatcaaactcattcactcaaggttcaagcggtgaagaacaatgaaggaggtttgaaatcactaaggaaggaactctctcatctaggttaaaggctatagtcaagatgacattaatttgacaaagtgtc

SEQ ID NO: 158466 - DNA, 505 bp, Cannabis sativa
  modified_base (94)..(108): a, c, t, g, unknown or other
taaaatattatatatttaagtgtccataaaagttaataccacatatagttttatataaaaatattacatatacaattcaatataatacaatacnnnnnnnnnnnnnnnggcgttccaaacgaaccctaaatttgtcaaatcaaaccaaaccattaagaacggtttggtttggttcgaaaccacagcttaaatagaatttataattattcatattttttgaaagtaaatatactatttttactaagtttttaattttattttataaaatatatatttaatatgataagtaataaatatataatatataaataacgatataaaaatattctcaaaagtcatacataacataaaaatctaaaatatatgcaataaaaaatttgatactcaagaaagttcaaaattatacctatagtcatatataaaatatatataaattaagggtgactatttaatggttacatttttattgtaaccatatggttatatttttttttaacctgtaata

SEQ ID NO: 158467 - DNA, 562 bp, Cannabis sativa
gaccctaatgggggaaatatgacataccactttcagggggaaagaacacagcgtgaagaagcaagtgtgaccttgaggtggtcaagaactcatagtcgatcaacacgaagaggagaaagtactcaacgagctaatgatcgagaaagtatgggatctagtaaatccacgagtcactcaaagacaaagtttatcagtaggatgcggtctatgagtaagacgaggtctgctagcaattactcactaccggatttgcgagagcacttgaattggaagaaacctgaccttcaccaatagcttggtccaaagtaagaggatcccatccaatggcgaataaacgagctagaggacaagtttaggagatatagagtgggggcactaggaaatcaatctagatacgactcaaacgaggagcttgagccatatcatccagatataatgaataccccttttccttcgggcttcaaaaacccacatgtcatgtcatatgacaaaaccactcatctggtcttgcatttgaataactttaacacaataatgcgagcgagtaatgtgacgaacaatt

SEQ ID NO: 158468 - DNA, 540 bp, Cannabis sativa
  modified_base (48)..(53): a, c, t, g, unknown or other
atattctgttaaaccaagaatgttaaaccaagaaatgccgttagatannnnnntttaatatataaagatataaacggtacgtaaaaatatttaaaatttcatactttgttgttattttttctttttacttttttgtttttttgggtatttatgaaaatatcccaatattctacactcttgacactcaaaaactactatcaactattttgatgcagaatttagacgaacaacacacattcacgttttacaataatcaaaggtggagtttaaagtttatttatttttatattttagttttctgcctcgtgactcgtctacataacatttcccattctctctaaaaacatgtcttttctattgtccgataaaagtttatgtcatttttctaagcattgggctattttgtttctctttattcacactgctttgtcgctcctgactttttgtgtcgttggttataatttgtgaaaattacacctaatatgggattttgaaatatttttacataaatatggcaattttaagtttggccattttgta

SEQ ID NO: 158469 - DNA, 729 bp, Cannabis sativa
gtaagactgatgacaaagtaagcaaaggtgtagaagtaacagtgtcagacacaagaacagaagatggtgatacatcagctaaggtaacaaaagaagtggcactataagactgaagagtgaaaaaaagactggaattacttgtcatgtgatctgtggcaccagaattaatgacccactttgaggatgtggaaagaaggcatgcattagattcacctgaatcaacaattacactgacaaaaagagatgaagacttgagtgattcctgaaacctcgagaacttgtcaaatccatccgcagaagtaaggaccgatttgtcagatgcatcactagtgcttgcaacattagcaaactgcctttgctaatttttaaaactttctacagtcaaatttttcagacctttgtggatatccccctttttttccacttgaggtagaagatctcccaggtggattattattattgcgacttaccaaagcactagtaagcggagcagatggagtagtttcagtacgaagaacacgtctaaagacatcttgcaaagataagatgtcaaatccagaaagaacttgtgttttcgcagaatcaaattcagaagagagtcccgccagaaagctaatgatagccatctgctcccgctgacattgttgaaccttcacatcaggactaaaaggcaccaacatattaagttccttatatgtcttcttgaatgtcataaaatagtttatgagg

SEQ ID NO: 158470 - DNA, 573 bp, Cannabis sativa
  modified_base (323)..(328): a, c, t, g, unknown or other
ctttgagtaactcgcggatttactagttcccatgctttcttgatcattagctcgttgagtactttctcctcttcgaggtgatcgattgtgggtccttgaccacctcgaggtcacacttgcttcttcacgctttgttctttcccccttagtgtggttttttgtattttccccattagggtctgtgctagcccttgctttatgggttcagaagaatgttggtgatttctcgtaggtgacctacgttcttgttcatcagttttcggttgcctcccattctcatttcagggagagggttctggctgatcattctgattttcaggggnnnnnncattttccctgggttgttcttcctaggcattttcttgtcccctagttcgtgagccacgaggcctgccttgtggtcttctcactccaagttcaggttgattttgagcattcatcccctatgtcgccctggctgcggctgcatcacgttctaattcaatgtttttccgttgcgcctcttccagacggtgtcttaggcggtagttttctatttcataagtaccttctcccatagactgggtacctcca

SEQ ID NO: 158471 - DNA, 708 bp, Cannabis sativa
tttcaagagatgataataatagcagtcttattctgactctagttgataacgctcccattgctaatgaatatattgctcttaatttctatgatgacgagggtcatattattctgactctagttaataacgctcccattgctgatgaatatattgctcctaatttctaagatgacgagggtcatattattgacgaggaacctattattgaagaaggttttgttgttgatgagggtcatgttatcggagaaatccaattgtggaatatgtcattcaaaatgatgatcaacaaatagaggttattccagaagtacttcttctatggagatctcaaagacaaaagaagtcaacaaagtgtcatactaattttgtttaccttggagaaggagaatatgatactggtcattttgtggatcctgtcacttatagtgtagcagttaatagtccacattcttcaaaatggataaaagctatggatgatgagattaagttcatggacaaaaataatgtgtggaagttagttctattacctgatggtttaaaaaataagggacgtttagtgacaaaaggctttactcaaagagtgtattgattacgtttaaactttcttgcctgtttccactaaagattcatttagaattattatggatttagttacgcactttgattcagagttgcatcaaatggttgttaaaactattgttctgaatg

SEQ ID NO: 158472 - DNA, 522 bp, Cannabis sativa
  modified_base (26)..(30): a, c, t, g, unknown or other
tctggtgccgggtcacgagctgggtnnnnngttcaagttcgggtctgggtcaggtactaggtcccgatcctagttctgtttcacagatccctatcctgattctaagtccaagtcccagttattgtgtgggtttgggtcctggttttagttcggggtcgagtgcaagtctcggttcgggtttaggtctttgtctgggttttgatctgggttcgggttttggtttaggtgctggtcctggtccttgtcctagttcggttctagttcaatttgcgattctgagttcgagtttgggtttcacttcgggtcagagttcgagtctttttctgagtttgggtaccggtcaggatttctgtgaaggtccaaatcaggctccgagtgtgggttcaagtcctgggtcttggtctatgttgggtccaagtcccaagttccattccatatcggagtcttgattcaattctgggtctatgtccttggttctgatcctggtctgagttcgagtttgggtctaggtccgggtctagc

SEQ ID NO: 158473 - DNA, 576 bp, Cannabis sativa
tctgggttttggtgggttttgtgattttgagatgggaatggaatggaatgatctgtttgatgatgaatcgtgagtgggtgaaggtgaagaacaagtagaagaagaggaaagaaaagaacaggttaaggagactgatttggttctttggagatggattaatggctctggttctggtgatgatgaatcttttgaatgaggtagccatgaattcaagagtggtgctgatgaactcctaagaagcatttttcttttcttttttcagtgaaagaaaatgtgttgtggattcagaaactcagaaaaggtgaatcacataaatcttggatttatagaatcgagggagagtggttgtgtcactgtccgtaacaatagaatagtacaaactacaaatacaaagatattatcagaaacagtcaaaaatagaattactttgcatatggaatcctataattattggtagttgaaaaaatatcacaaatacttccgtgctagggaaactctcttttgtactctcttttacactctctttctaattaagtgacatgtgtaactttttaaaggggagttctatttacaccc

SEQ ID NO: 158474 - DNA, 589 bp, Cannabis sativa
tcccacaactaaccaagattgagaatttttttcttttcccaacatcactgaattttattatttttcttgaatcatgtttttttcttttttttttcaatatttttcaatgaaagtagggatttaatggacaaataaagtaggaaagtatctttaaagatttttctatcgcatttaccctggacaggatacgcgaaatagttgtgaaatcgacattagtcaccctcctggtcagacttaatgtacttacgtaagtgtgagttgtttttcatgatgaagaatttgatttcttgtttcatattattgcacttgttggtgtcatgactgtagtttgcataaaagcggcaatatttggtggaatccctcttggtgatatcttttttcatcgaaggaggtcttttgtatggcaccacaaactggttgttgtgaagatagtttctatctcttcaataaggatagtaaaggcagtgaacttctgggctttctcttgaggatttttcagtgatattgatcttacaacatatctatttttttctcaatcttgcaagttttttttttttctatcttctctctcacaccatgcattttgctc

SEQ ID NO: 158475 - DNA, 558 bp, Cannabis sativa
ataactcaggattttggagacaactttggcatttgaagatcccaccaaaggtgctgaattttttgtggcgtgtcgtctccgactctctccccacatgtgtcaatctcgtcaccaaacatgtgcctatttcaagccattgtcctgtatgtaaaacgcacccagaaattgccatccattcgctcattacctgcgatttcgccaaagcctgctgggctctcttttcggctggcctattaaaatgttgcagccccttccagttttggtaactggtttgagaacatgttgcgagtttgtgatacagaacaagtttgtcgtgcctctatgattgcttgggccttatggaaatctcggaaccaagttgtttggaagaaacgcaattgtactactaatgatgttttagcttcagcctccaccacgcttgatcactggcgaaaggctcaagatactcttgccttatcatcactatctctctataatagtgatgatggggccgagctttggtctaaacctgttacaaatcacatcaagattaacgtggacgctgcactttttcatcat

SEQ ID NO: 158476 - DNA, 531 bp, Cannabis sativa
  modified_base (52)..(56): a, c, t, g, unknown or other
  modified_base (345)..(359): a, c, t, g, unknown or other
  modified_base (499)..(505): a, c, t, g, unknown or other
tctcaatacaaaactacacaaaaaatatgaagttaattccatgaaatagcannnnnaatcgaagaaaacgaaaaaaattttaagtggtactgacagtatgcattgcacactgtctgcgcgcgctcacgagggtgtcaggccgaggtttctcggcgctagaggctgcaagcagccattccgcacgcgcaccaggaagatttctgacaaggcacccatgtgtgaccgagaaaactcggacacaagtctgtccgatgcccacgcgtctgaggaatgcggctcatccgcgcgcgtgtgtggggtgatggcaccctgatattttgtgattttcaaaaattcataactaannnnnnnnnnnnnnnaattgagttctgtaaaaaaagtaaattgcttaatttttccaaactatcaaataaaaataattccgaaaacgaaaattcagttctttttcataaaattttacaagcatcaatcaaacatcatataacacacagatcaacannnnnnnatccaaatcaacacatatcatcgttt

SEQ ID NO: 158477 - DNA, 511 bp, Cannabis sativa
atcaaatatcatacaatttaagaataaaaactttcttagttaaataaacaatgtaaaatatatattttttaaattttcttaaattatttgtgctgctagtatgataatgagttatattaaaaaactcgtattattttatgaatatgcgtatataatacataaatacatcaaattataataaaataaaacaatagataagtgaggctttgaatgaaaaagatataagacctaagagtagtttaataaaattgtacattaaatatgtacaaaagtaattatattatatatgtatagtgtataacatatatattcggtcggttctcagtttaatcggtcggtttgttattgacactaaaaccgaccgtgcaaatgtggttttaacagaggccatttttttggtttttcaacttttcttgtgttagttttttcagtgttcggacggttggtgtattcgatttttcgatttcttagatattttacttagccttattttccacatttattcgtacta

SEQ ID NO: 158478 - DNA, 660 bp, Cannabis sativa
cactacaagaataatggttaataccaacgccactattaccaacgcctaaaagtcctcattaaaaatgagggtatcaataacgacatttgcctgtcgttgggaaagttattcattttttttaaaaaaacaaaatagtttattaataatgacttttgttattgaaaaactcttcaataacgacattgtcgttgggaatgtgtgtgcgatttttgaaaaggagccgttgatttgggcggcaaatttccccccaaaactgtccccaacgacatgtcgttggggacagttttgtataaaaaaaattgcagatgaaaaccctcatttcatctcattctcatcggtccactccgcctctctccccctaaaccctcgcctgaagcccatcctcagccccttcaacattcgaaaaaccaccttcctccgcctgaagctacgtcagccaccaccttcctccgcctgaagcttcgcgagtcagcccagcaccgctctcctccgcctgaaggttcgtcagcccaccaccggcggccatttttgaggtatactccatttgtaatatgtatagatgttttatatttatatatgtatttatatgtttagatataattttgttgtgtaaatgtttgtatttatttcagataaatgcttaaatatatatgtatttga

SEQ ID NO: 158479 - DNA, 789 bp, Cannabis sativa
  modified_base (26)..(31): a, c, t, g, unknown or other
ttttcaaatccaaatcacaaaaaaannnnnnaaaaaaatcaaaaaaaaaaaaacaccacccaccgaaatcatcacacaacctattttttaaatccaaatcacaaaataaaaataacaaaacaaaactcaaaccaatttaaacaaatccaaatctaaaaaataaacaaacacacacatatacatatatatatatatatatacacaaaatctcagccccaaaactcatacttaaaaaccctaaatttatttccccacaactattatcttttttcatctaaatccaaagaacacaaaaatatccaaatagggatatgtatacacaaaatatcaacaacaaagattgcaaaaaaaatctaaaaaactctacaccgggagagagaaaggtgatcgatattgggagagagaggagatcgatcgcggctgagatcgatcggggctgagagagagaatcggggctaatcagctaagagatcgacgattctatgtagtggtccttggtggttctacgcggtacgtggttgagatcaatcggttctacgcggtggttctcggtgactccacctgggtcggtggtcctcagcaacggtgctggcttggtggtcctcggcaacggttccggctcggtggtcctcggcaatggcgtcacacctagtacctgcatccataccagagagagagagagagaagaagaagaaggtgtcgtgaaaatggaaaagatagaaaaaagaaaaaaaaaaagaaaaaaaaaaagaaaaaagaaaaaatatatttatattttttatttataat

SEQ ID NO: 158480 - DNA, 708 bp, Cannabis sativa
  modified_base (183)..(185): a, c, t, g, unknown or other
tccaccaacagtttctttcttcttcttcttttatttcttttatgttaaattctgctttagtgttattataattattgttgaccttgcttttggccaacgaaagtgagtcgagattgtaagcgacaagtagtataatgtgtatgtaatatataatagagtaaataaagacacaagaattttatnnnggttcagccccgagcagttcggcaatagcctaattctcttggtttgtattgacttaagaacaaggaatatattctcttgcttttcttagagctcttacaatagtatctctgaatatgaattcttagacaagtttttcgaccctttgcctagtgagtatgaatcactatttatagggttataagctttagagggaagaattttccttctgattacaattgatataattggaaagatttcatattaaatacagaatacactaatcaagggattcggacagcttgccatatctctgtgatttgatcccaaaattatagggatttcttcggtgactcacgatgcaaaagctgaaattgctaagtgttggcgtgttgttcggcttgctcactgcccggttaagaaggcttcgtctgagcgaatatatgtcgtgctctgttcgggatatctcttccgagcaggtacataaagttgattccacgtgtcaccatcgtatgatgccatgtcatagtgcaaaaattgggataa

SEQ ID NO: 158481 - DNA, 598 bp, Cannabis sativa
  modified_base (52)..(54): a, c, t, g, unknown or other
actcaaatcggtattggaacttgggactcggaccgaacctagaccaagaccnnngaggcgaacccacacccgaagcctgatctagacctagacagaaatccgaacccaaacccacactcagagcagtactcgaactcgaacttagaatcacaaatggaagtagaaccgaactaggacaaggacctggaccaggacctaaaccaaaacctgaacccagatcaaaacccaaacagagacgtaaacccaaaccgagactaggactcgaaccggaacctagaccgggacccaaacccaaacaataactgggacctggacctagaatcatgataaggacctaggaaatagaactcagaccaggagctagtaccagacccaactgagagtggaactcgagcccgaacacggtcgtgtacccagacgagaactgagacccggacgttgacctaaatcctagaccgaatcgcaaacatagatttcgacctagatagggatccacacacgaacctggactcgaaccaagacccaaactgggatcgaaatgttggacctagatctggaccaagatcctgaccctgaccaaaacttggaccagcactcg

SEQ ID NO: 158482 - DNA, 708 bp, Cannabis sativa
cttttacacatccatatggaatatgatatatgctcgtgtttatcaaaccttccacatcacacacacacgtttagtaccgcactacactgcataaaaaaaatatagtttgaaataatataattttagtttgtatttttgtcaaatcgcacagtactatttgtagttttaaatttaataattatttaaatcgcatcgcactatattttacaaaattattaatttttttaatataatttcttttctttccatataataacaaatatatatatattatatatgtatatattaggtagacaatccaatataaaatttaatgattaatatatatgttatgatgttaagattttaataaaattttttttattgttaaaattttattagattggtttttaatataatttttgataatgatgatagtgcaaaccgtaccgcaccacactgtatttttgcagtataatttttgcgacccagaaattgcaaaggctcttgcacttcggcaggtcatctcccagtgcaagttgtttggctttgagcaggaacaattttagatagattagagtgtggtcctcaaactcaacaaatttactatgtttgattcctatgggaaacttacaaaaatattatttttttccccaagttttacaataatattgccacacggcaataatttcttttttactgtccaagcccttttttttttctttcata

SEQ ID NO: 158483 - DNA, 748 bp, Cannabis sativa
ttatttatatttggtttttttgtattattattttttttgttatgatcttgagcatatagcaattaccatacaaaattttgttagttgcaaataaatataatataatcttttcttttctactgatttttttatttgtaatttcatggatttgattattttttatactgttaattttactatgatatttagtatataataaacaaaatttttggtagttgctattattattataatctatttttttttccttatgagggagcttatgattttcttgtaggtaatataattttcttgatgaatattgaatgtttttttattatgtttttatttatttatttataataatttgactaactagtaactatgtttttataattgcagaacaaaaaatctaaggttaatgaatcattaccaaaagcaaagacaattgacgttgagattgttgagtgagaccgatatcaaaactgattttgattttctttaagtttgttatggacaattttaatagtttttaaaattttagatgactataatatttaatcttgaatgatttgtaagtttgggtggatatgtttatgtcagaatttttaattttctttttaaaatttatgtatgattttgataatattcaaatttaatttttttttaattatggaataaggattataacccaacccaacccaacccgcaaaggaaaaaatgggttgggttataaaaatttaaaatgtgaatgggttaaaaatctcta

SEQ ID NO: 158484 - DNA, 550 bp, Cannabis sativa
atcaaagtcttggaaagatgaccggcctcggcagcaatcgcgcagccaacaggaaaaagttagaactgcgaaagggcgacactcatatcttgaatctagtacacggggttggaagaagcgcaggccgcatacctcttggtgggaagttgggttagatcagcggcaaaatggcttaccatttctgaggcaaaaggagccaaaatacgtggccgctgctatgtatgacacgtcgataaagaagacacttcacccggagatcagttaagggttgtatagaagataggggtgtacgtcggtcgattttggtcaatttatgctatattttattcaacccaatgtaaaaattgggttgcaaaaattaagtgcaacccgtccaattaagaaaaaagaaattaataacctgcccaatgaaattggtcgcttgggttgggttatctcgtccaaaccgaaaattaatgttttatttttttttattcaattattatattttagttaattgtgataataagataattatatatagaatgaatttaaagttcaaatcaattac

SEQ ID NO: 158485 - DNA, 615 bp, Cannabis sativa
tttgtttacaagttaacaagttttaatatctaagtaaaagaaacaagaaaagagaaagagaaagaaaacaattaagagagggtaaaagaaaaatcaaacactaaaacttggacctccttttctcttcctcatctactgtactttttctgcatttacttttcttccaaaaaatgcagcagctccttcattacgtgatcaagatgtgataatggtgtgcttagctttttttctcctttagttgttgggtccttagggtacaaaatcacaccctaaaattagaagcccaatcttttttgcactttggcccactaggttcagtcccctttttacaaagcttccagctggtctcatttttagtgacaaatacactcctgctgatgtggacaagtaaatttcgtgtttccacgtcactgccagaatgctgaattcgcttcagcaatctgccccaatttcaacttttgttctcacgtcttccttgcttccttctctttttcctaccaatttaatccttcctttttcaacaacaaacaagcacaattaattagaaaaacacaccgaacaatatcaatttttacaagacttaaaaattagtttactaaatagaaaatgaaacta

SEQ ID NO: 158486 - DNA, 1306 bp, Cannabis sativa
  modified_base (623)..(625): a, c, t, g, unknown or other
  modified_base (1050)..(1051): a, c, t, g, unknown or other
  modified_base (1170)..(1173): a, c, t, g, unknown or other
tagttatgaatttttgaaaattcggaaaaaatcaggaatcgggtgcatcacacacgcgtgcggacaccgagtttcacagtgtctgtccgaaggaacacgcatgggctgtctgaagagccccattttgcacgcgcatatgctgctagcagcctccatgtgcgacatttcagccccaatccccctgttgcatgcgcgcggatggtatgcaatgcataccatgtgtaccaaatgcaatttttttcaattttttcatcatttttcatggaattaatttcgattttttttttgtatttttgtatttagatttttatttttcatatttcaaatctaattatgagatttaaattaattaattaaaaaattaatttaaaatattagtagtttttgaaccttgaaaataggtaaaaatctattttttttttacttagttggttatcttacttttaaatttgattattttaacttatttttaaatttaaggtcagatattttatattttaaattatttaattaattttataaaatgaccttattttaaatttaaaataagattattttaatcaagaaattttaaattgtaacaagatatttttctaacttttaaaattttgttattttatttnnnttaaattataaaattagataaatcatatttatttatcattttattttattggatttttaattttatttttttaaataacattaaatttgaaaagtttgttagcatcttttgaatagatatttaggtttgttgaaaacctaattttttaaatttatagatttaattttgaaattaattatttaatttaatttgaatatttttcgaaaataatattttattatttcgaatttttgaaaattaattaattatttaattaattcaaattaaataaatctccaatccaactatccaatttgttgtatgtgtgtgttttatattgtttattattaaaaaaagttttataaaacctattattgcttgatctaaattgtcatggttaagttgttgacaaatccaatgaaataggtcaaataaataatttgtannaggtaaattttacaatcttcttttatctgtgtataaacctagtaacatgataggatccatccaaattagtgtgcctgtgtgagcctatatgtttgatttgggcttagatgcatataggnnnnccatttaatttttgtaattaaaatagacaaagttgctaaataaaattatcacatttgatagattttatttaggtccaattagtattggacctattcaattaataacagttgtttaaattaaggttaaattcct

SEQ ID NO: 158487 - DNA, 658 bp, Cannabis sativa
ttcatatatttattatatcatattatttatatacataaatgctatatataaatatatacatatatacatatatacatttcatttatatatattatatacggtatactatatatattttttagtatgtatatatgtttatatatgcattgtatatgtatcaatacattcatatattgatatagattgttttaagcatgaaaatccactttgaaaaacaaagacatctcaaaattttctggaaaatatttttcggacccggaaattttggtgattttaaagtctttattttatgtattttcgatgcatgaaatctatatgaatgtcttaatttttttcatttagattcatttggaattgatttggggctttttggtcgtcgaaattgtctcttccgatcgggtttgggtcgggtctgtcggacccgtgcagaaaaacgggtaacaatcgacccagtttagctgaagaagacgacgcaaacgacatgtcgtttgtggaaaataacgtgtcgtttgtaaggttttttgccgtagtcatttgttgcaaacgacatgtcatttttcgtcttctgatgtagccctttaggaaagtaaatgacgtgtcgttttgcgttttgcaaaaaacgacatgtcgtttacgcagtgcatttttcaaaaaaaaa

SEQ ID NO: 158488 - DNA, 582 bp, Cannabis sativa
atttcagttgactcatgacagatgcaactttcacacgatcagatagtgcagactccaatggagttgcgaagatgagcaaaggtgtgcgcatctagagccttagtgaaaagatcagcaagttgagctcctgtagacacatgagtaatagtcagcaatttagattcaaccaaatgtctaataaaatgataacgtatgtttatatgtttggtacgtgaatgctgaactgggtttttggaaatgttaatagcacttgtactatcacaatataagaccaatgagtgttgtgggaacccataatcagtaaccatcttattaagccagatcagttgagtacaatagcttccagctgcaatatactcagcttctgcagtggaaagggaaattgaattttgttttttgcttaactacgacacaagattatttcccaagtaaaaataccctcccgtggtacttttcctatcatatagactcccagcccaatcgaaatcactgtatccaacaatggacatgttggtatctctggaataccacaagccaaattctgaggttccagataggtatttaaagatacgcttaacagca

SEQ ID NO: 158489 - DNA, 580 bp, Cannabis sativa
  modified_base (42)..(42): a, c, t, g, unknown or other
acatggttaggttcaatcttaagagtgttatttgtgttcttngatttgttagttaagcctatcttttggtccgggtgataggtacattttgggaacattttaggaaaatgatggtaatggtgttaatgaggaacaacctcatcttgatgaaaatcctacagataattgtacggataagggtaagggtaagggtaagggtgataaaaaagggatagacctcctactgtgcctattccttatcctaggaagaagggaaagtctgatgtttggcctcatttcactatggaagacaatcctccccgagctacagaggacaatgatgaagaacctcaacaaccttgtgttcctaagtgtatgtgcaactattgtgggagtgattttcactgtgacactaaaaacatgggactagtcatctatggagtcatttgagaaaagtgtgtgagcttagtccactcaaaaatgaagatgaaaaatagaagagtttaagttcgagcctcttaagggtggcaaggagggggatggccagttagtagctgtggcctataacaaagaagcgtgtaggaccaccctcacacaatac

SEQ ID NO: 158490 - DNA, 651 bp, Cannabis sativa
cagttcacaacctttgtgtaagttttctgggtactttacgcttttggtgttcacttgcatgttagggtagaacttttgattaagtgcttaatttctgggaaatgactttggcgaagactgtcgtgtgatgtatataccctcttttatttgtgttctgttactttctttatctttcattttgcaatcaacctttctgctgagagattgctcataatatgagatagtttttgtacccaagttttgttttcttttatttttcctttccttttcctctgctttcgctgcttttgagatatttgcacccgatgtttgcctatgagaatccctggaattcccatttttggcaaacatcaggagggggtctctttccagcggttaggggacccccattccctcttttcacattagggtttggtttgggggctaactgctggattttcctttttcagaatctcattatttttcaagaaatgcctgtctctacatccagagctaaatcctccaaccaaggagcgattacgttggccaccctggaagaagtgatgaaggaacccgttgtacaggagaagtacacgtgtcgatccaatggttgggaggcggatgagcttcactcaaccttgacctgtgcccatcagttggagaagatcgtga

SEQ ID NO: 158491 - DNA, 561 bp, Cannabis sativa
aacacaatccaacataatacaatacaatacattacaatacgacgtaccaaacaagcccttaatgtttatagttgaagtttagtgcaatactgaatatttttattattattattttttgagaaatcaaaatcattgtattgcataaactcaaatttacaacttaacagcaccatcacgacctttataatctatacaacttgtagaatttataaaattaattatgttataaatttacaattgctcaaaccattccaagtctttttatttcattttttaggcaaaatttataaaattctaactctcacctcatctcgaatgcagagcattaacatgagtaacgataggggtgttcacaaattggtttcgtcccgatttttatagtttttgaactaaaccagttttgaatattaaaaacaaaaccagaccaataaatttctcaaatcaaaccaaaccattaagaaatgtttggtttggtttgaaactacggtttaagtagaatttataattattcatattttttaagtaattgtactatttttattaagtttttaattttatttt

SEQ ID NO: 158492 - DNA, 766 bp, Cannabis sativa
ttatgaggagatgaaaatagagatgagatcatatttatagaaataattttgcatgagttaatttggaatgttaattagaaaaatttgaaagatcagaaattaaaaagacaaaaattatttgacgtttggaattaattggatatatatgtttaaataattatacaaaaatagattaaatattcattaatgtcattatatgttaatttaaaatacataataaatcacaaaaattaagaaagattagaaaaattaggaaaaaatagattaaaaaagaatctcagttagactgccacatagaaactttaaaaccttcctttatgttcaaaaaactgaaaggatcacaaattacttccatgattaaattgcagagaaaataaaacttacagtgagttagagaaagagagagagagtaaggattatgggtctcttcagagttgaagaaagcggagacggacttttttcatctgtattgcggtttcataagtgggacacgtgtcaatatgttattggcaataatatttacatattttattttatttcttcaaaagagattatatttttggacaatgtctcataaagagaagagaaaaaaaacacatcaaaaaggttgtacataaatttttgtaaaccgcccaacccgaacaacccgctcgaactaaaccgagaggacccgacgaaaatataacctgtccaatctttatactgggcaggttgaaaataatatgaacccgtccaatcaacccgaactaacccgaccaactcgatt

SEQ ID NO: 158493 - DNA, 966 bp, Cannabis sativa
ataattattaaataaatatttttatatttataggattgaaattagaaaatatggcattattgaaagaaaagatgatttatgaaataaagtagtaaaactgtaactagtggaatctacctagtgtgggccggctacttagtgtatttttgcatattattttatcttttttaattcatataattaaatcctaaatctaaaaaatactataaaaggaataagatgactctcattctcatctaatttaaaataacctagtttttattatttgtcagacaactaaaaaattgagagcctctttccttagtgatttcgaaatcctcttcttgttattcatcgattttgagcctttagtgatagagtaccatgcccactcatatcaagtcaaatactcaatcatagtgtggaagactatggcaaacaaaattgaaggagagaagatccaagttcagatcttgataatgctttgctacaaaaaggaatcaagggctaaatatctgaacgaaacgagtcattattattccgctaccatcaatgtaaatactcaatcatagtgtggaagactgtggcaaacaaaattgaaggagacaagatccaagttcagatcttgataatgctttgcaacaaaaaggaatcaagggctaaatatctgaacggaacgagtcattattattccgctaccatcaatgtaaggatttcttaatctcttatgtatttatttcatcgtattaggaaattcatatttagggtgttagattatagtttataatcaaacatacatgttagtagatttagatcctggtaaaataatttctaacaacatagaatacatgaaaaggtaattataagataaatgaataaattacttatagaagtataattaataaatatatgaaaatttcttatccatatggagatggtataattttgtaaggtcgtacaagagaattaagattatacaatatgaat

SEQ ID NO: 158494 - DNA, 577 bp, Cannabis sativa
caaggctcaacagatgagtaagaacgttctatactagggtgtagcctctataccacatacactacgtacctcatagtacgagtgttggtaaggtttttttcataccctgagtaccactaagtgatgtaccacacacactcagtacttctccgtacttatgttggtatcactgtactctcagataacattcactataccaatgcactatataccttaaatgtacaagtgttgatagtgcaactaacactttaagcatgcatatacacataacatatacatacaatcagatattgttatcacacattatatacagttcttaccttctttctgaattcaagtgtgctggctgacctgaacgaaaagtctcgagctagatggatgccctaatcaaaatatgaaactgggtaagtcacatgctcaaaacccttatcctgggaaacccgaacccacaatcctaggttctattataccccttagaggttacttaaactctgaaattagggaaacacccaaccacgacactgaaatggacaaaaattgagaaaatgaagcatttggggaccctgccaaaaccggc

SEQ ID NO: 158495 - DNA, 615 bp, Cannabis sativa
ttttgtaggatgtgttcttgtaatgaagtcatttaattataattttttacaattttttttacaatttattgtttagtaaatccgaacttggcacaaatgttcaactatttttgttcctaaaatgctcaaattttctgttttcctcctatagcttacctctcattcactttcttctttcacaattcacaatggccttcacccaagttctcgccttactcttcctcctcctcgctctatactgtgccactaacccatttaagcacaacgccatctccgatttccccgactttcaagctcacatgatcgaattgtgctctgctaggattttggggaattttcagattacttttgttgctatggcaggaagacctaaaggctagaaaaatggaacaaaggcaacaattcaaaaatagacgggacagtcgttgaaggaatcggtgagaaagacgttgtctataggggctatacatgagatcgatacggtggaattttttgattcggagaaagagaaattgataaggatgcggtaaagaatgaggatggaatggtacttttgcaacgattgaacgactctctcagaattgctcattcaggtctctccatatttttcaatct

SEQ ID NO: 158496 - DNA, 652 bp, Cannabis sativa
aaacaaagtttggaatttagttgtcctactgaaaggttacacagatccattgggtgcaaatgggtttacaagatcaaacgtgactcaagtgggaagacaataaggtataaggctagacttgttgctaaaggttatagccagagagaaggtattgattttaaagaaacattctcacctgtctctaccaaagattctttgcgaatcatcatggatatggttgcttattttgatttggaattaaacaaatggatgtgaaaactacctttctaaatggagatttgtatgaagatatctacatgactcaacctgttggttttgaggagcctgacaagtacaatatggtttgcaagctaaataagtctatttatggacttaaacaagcatcaagacagtggtacctcaagtttgatgtagttgtcactgcaaatggttttatggagaataaagttgatcaatgtatatatatgaaggttagtgggagcagcttcattttcctaatactgtatgttgatgatattttgcttgcttccaatgataaaaatatgttatatgagacaaagcatttgctatctgaccattttgatatgaaagaccttggtgaggcttcatatgtacttgggatacagatccttcgggatagaactaaaggtat

SEQ ID NO: 158497 - DNA, 941 bp, Cannabis sativa
  modified_base (211)..(218): a, c, t, g, unknown or other
  modified_base (392)..(400): a, c, t, g, unknown or other
  modified_base (490)..(521): a, c, t, g, unknown or other
gactcatatcttgagtcatgaagcacttgagctgcaatcagacttatcctatgaagaacaacctgttcagattcttgataggaaggaaaaggtccttcgtaacaagaccattaccttggttaaagtgctctggaggaacagtaaggtggaagaagccacctgggcattagactctgacatgaggattcaacatccagagctattcaggttnnnnnnnnaggacgaaatccttttaacgggggtataattgtaatgaccgctttagtaattgggattagtaaaggcaattagcactaatttttgttatttttatggttatttatgaaattaattatttgtggaccccaatattaaaaatgagtattagagttataatttctcaattctggagnnnnnnnnnaactctaggggtattatttatcttatatgtgaaatatgcaatttttgtaatttttgctcaacaacaacggaaaatgcaatggatggctannnnnnnnnnnnnnnnnnnnnnnnnnnnnnnnttcttagtgggaaatatttttgagaaaataaagtgttagggttaagcggtgttatggtgtttgaccattttacccctaattttggaaataccttaactttatgttaaagggcaatctagtcgttttgttaagtgaaggtttaggtggctgcctagcttagtgacacctagctaaactagcttcagcaagagattgattaatctcttttcatttgaagcaattaaggaaattaaaagaaaacctaaaattgaaggaaacctctcttcccttcctctctcccttcgaaccagccaaagcaaggggagtttattgctaaattttgattatttcagcaagggattcaagaggaattaagccaaggtaagcttagcatctttacctcttaagttcttgaaatttcatttggtttgaatatgtgat

SEQ ID NO: 158498 - DNA, 1141 bp, Cannabis sativa
aaatagaataaacttccctttagtaaaatgggcataacactctcaaattttatccagatgacttggttggacttgcattgaaaatatcttttcaagacggatctatgtctttctcatagtcatagctcagttctaaagttattaggctcaaaattggctcacaagacaggctagtacacttcactcgggaattaagtagtgtaattaagtgtgggatgttggagagctatctcacagcccatgtggcatcatatgcgaggaatgacacccttaaacacctatttccaacatttctcaccaatttcatgaattccaagccgagatgtggcatccattgtcaatgttctctaatttggtgtatttctagctgagaataactattttctcaatgtttgtgggattttggcctagaaataagtgagactttatagatatttatttatttgtacttttttattcattattgggaataagattatgttggaattttatgccctaataaaactcatttcaatataaatcttatttactatcaatagaagattagaaatcatttaagtttacgtgtagttttcatgattatagttttaatatagaatttctattaaatccagaacatatagttactcacaattacagtgatgtcattacagtggaaggtaattgtgattatatatttcaaactatttagtctcatgatttattagtgcactagatttacactaacatgataattaacaataaagtttacttatacaatgatatgtggaatgtcttttctaagacattagcaaagtatactagtatccgatgtattggctatatattggactgaacagatattaatagtggaaaagatattacaaacttaccattatatcttttctaagtcaatgtcacttagttgatcttagatcaaaagatcttaatcctgagatggttagattctggcttaattgtactgcatgtgttctttgacttgtttgttacaactgaccactttgattggcccaatacttacatcttgggaatatggtagcgcaattgagttgtagcgctaatcataaatatagaatctatagcttctatatttatttagaagtgaaatgttgatttccttatagcttggctaacagacata

SEQ ID NO: 158499 - DNA, 511 bp, Cannabis sativa
ctgataacaatacagaaggagccaaaaaaatatgttttaccaacttggaaagacaaccatcttagaaaaaaggataaatctttgggtcaatgatgttgctaaagagaaatgtgtgagttacactaatatttcattttttttcttaaaattatcacacaattgaatatttaacaatttttatttatggttaggagaaactcaccaaagaaatggaggaagagatggcgagaaatagacttcaaagccaatctaacagtgattctggatcctcggaggtgccacgtgacatccaatacaaggtcatgggcaaggtttttggtgagaggagtgactatattcgaggagtcggttacaacatagcaaagaaggggaaaagatcaacaacatcatatagatcttcaagccaaagtcaatctcaatctcaagcagggtctactctttctcaagatgttggtattatggctgagatgtttcagagattgcgtgaacgctttccaccgggacacgacac

SEQ ID NO: 158500 - DNA, 508 bp, Cannabis sativa
  modified_base (48)..(51): a, c, t, g, unknown or other
  modified_base (438)..(462): a, c, t, g, unknown or other
ccattatttcatgttttgtaaatttatctctaagtagtcactgtaggnnnnagtctaatagagacaaaaacttacaaaacacttatcacatgatatcttacggtgttaaacacttatcacattatacttttcttacctcaagttccgaatcaggtacgttggccgacctgcttagagaacgatcgataatctcgggcccttaagcttctccgctctgagaattcgctattctgctactaccggagcttagatcgctaagtttcgggttgaaaataaaaagaaatgaatataggaggcaaaagttttgtcgaagggggaggaacgagggttcgttcgactctgttcattctcttcttaagttatatatataacttaatatatatataacgttttactttttcttttttaacgttaatattattataataatataataannnnnnnnnnnnnnnnnnnnnnnnnaataataataataatatataacattaataaaaattttattattaat

SEQ ID NO: 158501 - DNA, 640 bp, Cannabis sativa
tcttgttgatgatcatacccgattcacatggatatatttgcttcaacataaatctgatgtttccactatcataccacaatttttatcttatattcaaacacaatttaattgtgttttcaaaaaattcagatctgataatgcacctgaattagtctttaaagatcttttcttaaaatatggcataatgcatgatttcacttgtgtcgaaacacctgaacaaaacgctattgccgaaagaaaacatcagcatcttttaaatgtagcccgtgctctatattttcaatctaaggttcctatacgtttttggacagattgtctaatgacagctgtgtttctcatcaaccgcactcccacaccaaaccttgggaacaaaactccttacgaattactttttgatgaattacctgattatactaatatgagaagttttggttgtcttgtgtttgcttcaactcttacagctcatagaacaaagtttgaaccacgagctcggacatgtgttttcataggctacccaaaaggaatcaaaggatacaaactctatgacataaactctaagcaaatctttatctcaagaaatgttgtttttcatgaaaatatttttccttttcactaaattaatgaaagtattactaatgtt

SEQ ID NO: 158502 - DNA, 591 bp, Cannabis sativa
ataaagtattttattttttattctgtttattttattaatattggtcttaatgaaaatgaaaataatgaggtcattgattaatgagttttttatatcataattaactaactgacatatataactaacattctatacgttaagagaagtaatcttaaaattttcaaaatacaacttttcaaacaaacaccttaatagtgttcataaacaattgcatcaatcaaataaatgtttaagggcaattacatcaatcaaaaatgtaaaaaaaaaaaactcaaaatgattgggaagtttttcttattcatgattaaaccacatgagaaaacaatttaaacacaagaaatgaggtttttataaatagatgttttcaagctttcaaaaaagaaataaacggactttgatgaatgaaataaactgtgataataataatgaatctgaactgatgattttataggtaacatactttgaactatatataatttgtggaaattacacaaaaagaataaagtgtttaattgattaaaaatggacaagtataaatgaatggaagctttggaagcaactcaagggaaaagaaactggtttaggatggag

SEQ ID NO: 158503 - DNA, 524 bp, Cannabis sativa
aatacaattataagataaatgatgcattaattataattgtataattattaaatatctaaaaattctttattcatatggagaaggtataatcttgtaaagacgtacaagagaattaagattatacaatatgaataaaataagtcagcagtgtattaaaacaatgagaatctttaatatagaactgttaagtactgttaagtacagtaagtacagtttactatacactatacttctagtgtgcatgattttgattagatcacatatgtggatagatatgtggtaacagtgttgtgtataatttaattatgcataactatggcaatatgtcataaacatctttcattaacatgtcgtttaccatgaaagaattattcatatcacaataatgaacattagtagatcaacctgaaacctgaatatacgtgaactcctatttgtgttcattgagttctttgattcactcgttaaagtttctcagagaaaataattcttacaacttttattttgggagcttaataacatga

SEQ ID NO: 158504 - DNA, 585 bp, Cannabis sativa
  modified_base (346)..(348): a, c, t, g, unknown or other
ctgaaacaaggaaaatcaagcgtaaaactgctccaaaagacaccaataaccgagaaaatgcttaactattagacccgagacataggctaaatataaccttacatcttgatgatagaaagtctacatctgggatggtttttactctttgaagtggagcagttgtttggaaaagcgctaagtaagccgcaatatcagactctgccaaggaggccaagtacatagctgccgctaaggttgctaaggaacttgtttggttaagaaagttcttcttaggacttgatgttgttcctggaatggaaactggttttactttgtgacaacactggtgctatagccaatagtaaannncctcgaagccacaagagaagcaatcacatagagaggaaataccacatcatcaaagaatatgtggcaagagggaacgtactggtggagaaagttgacactgaagacaacttaactaacccattcaccaaagttttggctgccactacatttgaaaagcacagattgaatttaggattaattgaaatgtacttattgttttatgttattgcaacagtgagtttgttgggctttgtgccc

SEQ ID NO: 158505 - DNA, 614 bp, Cannabis sativa
aactcagggatcaatttacgtggatatggcaaacatacgatcccattatcagtgtattcagcctcaatcccacgatccttgtattcagcattgatccccagatctttctgtttatacgcattgtaacgagatgggaaactcttcctcctcaagcttacttgccctataaatagtgatgcatattcactgggcaagagatcggtcgaaaagcagttaatctaagactatactattatctaggaattatatattcagagatactattgaaagagctataagaaaaggattctttctccttgatcttaagtcaatacaggtaacgaggattaggctattaccgaactactcggggctaaacctctataaaatccttgtgtcttattatttctttatcatatatctgatattatatatcgtttatcgcttataaaatagactcattgtcgttggctaaaacggaagtcgacagttggtaaaatcaattaaagaagtataacatgaagttaaacccgaaaaaatgttccattggagtttccttgagaaagtttttgggattcatagttaacacaaggggtattgaggcaaatcctgaaaatcaaggcattaatagacat

SEQ ID NO: 158506 - DNA, 634 bp, Cannabis sativa
  modified_base (575)..(576): a, c, t, g, unknown or other
ttaagattgttgaattcaaagaattctgtctaattccattaaatttactaacagatgtttaacgtgaagattgtccatatactaagttgtgtccccaatctttgccttgtaacatacatctatgtcaggcgttcgttagtaaaatgggttgagatggaaaatgaccctaaatttaaaaattaaattagtaaatatccattttttttttaaaaaaaattaacaaaatggctaaataataaattagctaataaaaattataaaaatacatttactacatattattttttttttaaaaaatatataataattaaattaagttatataattttttttagtattccatattagtatattgtaacaaaaataaataaatatattacattattaaatatatataatttttactaagagacatataatcatacaataataattaaatccttaattatgtgctaattctcatgatttaacaatgcgaacatattacacatattttaaggtctaaaattgatttctcgattttatcacaaataagatttattatttatttttccaataaataataattgattaannctcattaatctcttatttcactagaattaaaataaatattattttcactaaaataata

SEQ ID NO: 158507 - DNA, 711 bp, Cannabis sativa
aaggttgaaggctggaaattgcgctcggatgacatcaaatttctcccaagtagcttcaaactccagcaggtccttccaacgaatcaaaacctcgacgacttgatccacggaggaggggtcttgtcgcacgttgagcagctccccaggttcaacaatgagttccaagtcggaggacaaagtaggagggatagtcggggaagaatgggcttcaccaacagcagctcgcagttgtgacacatgaaaaaccgggtgaatggcagcggaaggaggtaaatccaaacgataagcaaccttcccaatgcgcttcaagactgaaaatggaccataataccttgctgccaacttctcattcttccggacagcgagagatttctggcgatagggtcgtaatttgacaaagactctatccccgatgttgaattccacctgccttcgtgagccatctgccacagccttcattttctgttgagcccgcaagaggtgcattttcaaatcatctaaaaatgagtccctctcttcgagtcattgatccacggccaacaccgacatggatccggtcgaatagcgaaccaaagagggtgggtcacggccatacaacactttgaatggggaaggggaagctccaacttccgagccaattcggtagtgataaagttgtgggtggcaccactatcgacgagaaccacgacttcttggccatgaattgaaccc

SEQ ID NO: 158508 - DNA, 722 bp, Cannabis sativa
taccacaagccataggtttagataatctcaaaactatgagactacgatcgagaagttttgttaagtcctttgaatagacttattatcgaaattttcttttttgtccttgtaatagaaaacgtttggttactccatgtgaatggctctttggctttgatacgtagttccttattaggactatccattgcttgtttaaactacaatgaatttttatcacaagtgttttccaagtcatgagagagtgaattccttaaaacccatccactacgacgaggtaccatgaacttctgtctaagaacattattggtattaacatcatcagttgtgtcaatacaacagaggtagtgagaccatcttatatagaataagatgatagaacacgttggagctgaataaaaaatatctcctctactttgctactttattttcatatttagtcatgttcttagaaaaatagtatttattgaaacaaacacttgcttatcttaatgaccataggatggtccacccctaatcactttagaatatctatcaaacttgaaaacctcagttgatatttctagcttttcttaagttcatgatcagggcatccttgaatctagtaatggtgtacactaagtatatgaccattccatcattctgagattttttttgggatcaaacttagatgggacgacatagaatgtcatttgctatctctaaggcatttccttagaaggact

SEQ ID NO: 158509 - DNA, 692 bp, Cannabis sativa
atgctcttatacacgagtacggcactttggctacttcctggatgatgcttctactagtttacatgacttcatctagttctctaagggtttgtatttgactaacacttgaaaatatactaaaatttagattgagatcatcttctttgggaatgcaagggtcgtatcgttttcattagttttcttaatgctctactcttacatgctagcatgtaggatgtctaatcacaaatctaatttccaccttctgcatactcatccaccattaacctaattattgtatcattttacaactaactcgggatgcatctaatgtggtgtatgttgtgcttctgtcattctctcaaccttaagtttccattgcagtacgttttctccttgcctccgagcagcaacactaacatagttgcttttctggttacaaattctgggcatatcctttgtttcatactctccttgacgttcgtcaaggtgtaggctactacatattaggcctaggaagctttcagtctctcttcgatccttgtgcgccgacagctctagaatactatcgcgcttgtaggatcaaccataagttctgtattaagaaataatcattttccgaaagccaactctttgaaccaatagctttgatcttctaatcctccagttcagtcaagtcttctaaactcagtttgggatcgtatctaggtatc

SEQ ID NO: 158510 - DNA, 597 bp, Cannabis sativa
tagttataattctaagaaaaaatgatagattctcatgatttgtgtgcttaactcatgattaattactgttcaagcttgatttttaaaatttttgcacatcatttgaaatatcatatttgctaatgtttggaaagataagtgcatgcttgacttttaatttaaaatctcaactactctagaacttatttgataattatttgagacaaaattgatgaattacacatgattttgagatatgatataggtaatttcaagcctaccctatttgttaaatccctaattttagccaatttaagcctaaatgtttgttgacatcttatttttttaaccctatacactaacatttgagcctaaaaaaaatctttattcatcctttttcataccatagtatattgatgttttatgtatttgtaaaggtgtgagagttttgttgaaagaaaaatattcatggttatgtgatgatgaagaaaatcattactatattttttataataaatatttgtaagttgtaagtatttcattgaaaaaaaaactaaaaaaataataagaaatacgtcgaaaaataaataaatatacttgcaacaatttaagtgtgaa

SEQ ID NO: 158511 - DNA, 691 bp, Cannabis sativa
agcctcacgcttgagttgaatgagttcattctcctgatgagctcccttagcccagccatcactggatttcctctttttctccttcacaggatgataaatgaaatcctttgggtagagcccatactccacaaagttgtcctctgaggtcaacaaagtgatattctgggtagcacccggcagctgagtgagtctttgagctctatccctgagagcgagcgtggggggtggacgctgatatacaggaatctgctggaatcgagtataagtggtgcccatgccatccaccatgcagtactcgtcaacaaaattcccaattttgctaacggcattgtccctggtgcctgtcaaccacttgaagtttggttgagaaaagtagaagtatcctgacctgccttgcttgggagttgacttctaatcaaaaaaccagctaaccttatggggagaaggcatatcccacttttgggtggcgtagataatgaatagggcagacatgtacttgatgcccttgggagtgaattaggtcggacagagatggaagaagtctgccaccttcctaaagtatgggtgcaaagggagcagtgccccttgtttagcacgagcacccgaccaggaacacatccccctctaagggttggaggctcgattgttcgaggcgggaacataacagtccagctcgctcaaatagctgccc

SEQ ID NO: 158512 - DNA, 503 bp, Cannabis sativa
tcaatcgcacattctctcttcccagcacggtggggctctgaccaccgtcaactacccttctcctccccagttctctcaatcgcacactcctcagctcactcagtcaccttctctcattctccttcgcgcacaaacctccgccaggccgcctttgtttcccatcagccaaagttttgagatcgcccaaggtagataggttttttttctatttcgtgcgtctctctctcgctctctcttgtggtgacagtgtttatttttctgtgcaccgatctcagttcgtggtgacagcgtttgaagctcgccatggttctcagctcggggtttgtttgaatcacgctatggatctcgcctcgtggttcgtttgaagctcgccatggatctaatttgtttaggtttttgttggttctgtcaatttctaggttatatttcttttttctaaatattgtagtaaaaatgtgtattttatgaatgtaataggttgtgggtggctgctgctgttgttt

SEQ ID NO: 158513 - DNA, 611 bp, Cannabis sativa
agaaaagcagagcctttttaggcacacaagtcaaagtccttacaatcaaaatcccttgtagcgatgttggattacctgaagggatcgagaaaaaaagacactgaaaataattagtttctctgcgatgcggtcaatccaattgatgtcaaaatatattttgtgggaaacttctaaatatattttgataatccaattgatgtcaatcccttcaggtaatccaatattaaagtttctcagcgcgatgcggtcaatatttatcatatatacatatccgatacacatacatatatatatatgtataattagtttctcttagccattaaaactaacaatttggtacattgattattgtttttgcagtgatagcaatgtgaatgagatgaattttcaaaagagttttgttctctgcactgtagtggtgggaatttaatgagagtatgaaattggtggtgtaatattttagttaaatgctaattttgattattaattataattcattttaatcttttctctcttattgttcttaataattgtataaagaaaaattcttattgataatattgaagatataaaaactaaaagttctttaagagctgtttttgtgattatta

SEQ ID NO: 158514 - DNA, 537 bp, Cannabis sativa
  modified_base (34)..(44): a, c, t, g, unknown or other
  modified_base (371)..(381): a, c, t, g, unknown or other
ctaatgtaatagactgggtgttgtacgctgttcnnnnnnnnnnncagcacggcactcacagcatgttctgtaatagctaagtatattcccagctcctcgccgcccaggggttttgaaagtacaggaggttttgcaagttgtgcctttagctcttggaaagctcttgcacattcttctgtccactcgaactgtttgtttcctcgcaggatattgaagaatgggacacatttgtccgttgattttgacacgaatctgctgagttcggcgatccgaccagttaagctttgtacttctttggttttttttggcgagttcatatccaaaagggcttgaatcttttctagattggcttcaattcctcgggcattgannnnnnnnnnnagaaactttcccgagctgactccgaaggaacactttaagggatttggcttcatattgtattttttgaggactttgaagcattcttccaggtcatctatgtggccctcagcctttctggatttgacgagcatgtcatccacgcacacttccatattt

SEQ ID NO: 158515 - DNA, 580 bp, Cannabis sativa
gaggaggaggctgcacccccaaactttgggggatacaatgaggctggggagccggtagactcgggtggcgacgtcctggttgagggcgtggattacgtcactgaggatcttactgcagcagttcctcaaaggaggcaaagtgccttgggtgctaggtgggtgagccctccgtccaaggtcactaaggcacgtttacgggatctcgaccaggttggctatctgggtgagctagactgttatgttcccgcctcaaacaatcgagcctcaaacccttagagggggatgtgcgactggtctggtgctcacgctaaacaaggggcactgctgcctttgcacccatactttaggaaggtggcagacttcttccatctctgtccgaccaaattcactcccaagggcatcaagtacatgtctgccatgttcgttctctacgccacccataagtgggatccttcttctccccatgaggttagctggtttttcgattagaagtcaactcccaagcaaggcaggttaggatacttctatgtttctcagccagacttcaagtggttgacgggcaccagggacaaggccgtta

SEQ ID NO: 158516 - DNA, 711 bp, Cannabis sativa
tgtattataaataaaataatagtactaaaattagaaatgtaatttgctattttaaaaatatatagaaagatagtgatattatttgtgacaaatactaaaaatagtaaaattaacatataaattacttttatgttagcatcttggcttcaacaatgtggaggtcgaatcagattggctgagtttggcctaatttttaaagatatttttgctatttgtaaccgtgttaatatttctaagttttttttttgtaatcgttctgcgaactttttagctaacaattttttaacatgcattgtctttggatatggcaagagtgtggtggtcgtgtttattgggtgctctttgataattggtgttgaaatccccttatattgtaattttatacgcttaacccctgatcttttttgagtagaaaaatcctcttaactttttttttttttttgcaaattcgagtcgccaatgaaatcttaccactgtgtacacttgtgtatatatgacatatttttattgactttgaaattttactgtcacgtgtacacatgtgtacaatcccagttaacatttgccagtaaaatttaattggcatctttaagtggtaaataaaaagaagttaagggggttaagtgtataaaaattaaaatataaaaagtaatttataaataaatataataaaaaaattgttattccaaataattattgcaaaattattaa

SEQ ID NO: 158517 - DNA, 690 bp, Cannabis sativa
gttgaaatgcttgctgtctgtgaatactgcatttttcctggtttttgcttttttttttgcctggtccgatggggtccgatgcatgtgaaagctggatgattgggatgaaagcccgattgggccgattagggtccgatgggtgttcgatggggggtccaaaaatgggttcgggcatttttttgatcgggtccgatggagggtccaaaaatgggtttataatcgggccaaaaatttgacatttgacattgatccgaacataagctactcaggattggttgatcttttgtatgaagaactggatgttgacaaagtgcagtataacttaaaaatggaagtaaattacaagtacatgaaagtattaatgtatcaccttgaagttattggaactgataagcgtgcaaggtactttttgtctacacttacgaagaagccacatgaatttactcctttgtttgtgacattgtttaagaagaatgtttgtgtcgatcctagtcccacactaagttctgttaaggaaactcgtagcgaggttgggagttttgttccagaaataaatctggaggtgttggttgtcgatgtactacctgaattaaacactatgatgccgagtgctgatattgtagcacaaatgcccttcattgatggtttttgtgatggtccagaccctgaatattatgttgagggcaatga

SEQ ID NO: 158518 - DNA, 759 bp, Cannabis sativa
  modified_base (175)..(178): a, c, t, g, unknown or other
  modified_base (531)..(532): a, c, t, g, unknown or other
atctaaccttaaatttaaaataagataaaataatcaaatttttaaaaataagaaaacaaattaagcacaaagatagatttttaccaatttttaaattcaaatttcattaatacgtcaaattaatttaaaaaatattaattaatttaattctcataattagatttgaaatatgaannnnaaaaatctaaatacaaaattacacaaaaaaattcgaaattaattccatgaaaaaacatgaaaaattgaaaaaattagaaaaaaaaaatagatttggtacagatggtatatgttgcataccatccgcgcgcgtcccaagtggtgatcagccaaagaaacacgcatagagaggttgcatgcagcctctgcgcgcgcgcaagggtcccttcaaacaagatcagcccatcttgaccgagaaatctcggacagggccttgtccgaaagcacgtgcacccctgaaatcaaggggatccgcgcgcgtaaggaaggtgtcaccacctcctgatttttccaatttttaaaaattcataactnnttcaaataaaatcgaaattaagttttgtaaaaaagtaaattgctttttctttttttcaaactatccaacaaaaataattttagcagaaaaatccaattattttttgcaaaaatttcgcaaacataaatcaatcatcaaaaacacatatatcaacatgaattacatccaaatcacacatatatcgttttaagtcgaaatttcttgaaagtaattcagttaccatggct

SEQ ID NO: 158519 - DNA, 962 bp, Cannabis sativa
ttggaaaaatcaattgaagataattgatgtggtagaacgtttgggattgtcttatcattttgaaactgaaatagaaaatatgatagaacaaatctacaacaaaaccaatatttttgatcttcttaaggaagatttgcatgatgtttccttgtgggttagacttctacgacaacatggatttagggtttcttctggtacatatttatatatatgttatatatattaaatgtgattatacaattaaagatgagatttttaaacttatacggaaatttttaattttttttttgttttttactgggggataaaattttcttaaaaaatactgtgtttttttttttcaaaaataccgtataagttttatactgtgtactataagtttcaactgttgttctatggttattttttagttgttctactattatttttaattgttctgttttgttattttacggttgttttaggttattttataaaaaagacagtgtttttgtaaaaaaaatttatgtatgtggcagtaaaattgaaaatttttacccaaaattcaatattttttataaaaactccttaagaattaactaaaataaaaactaaaaatataattaagtatacgtattgggtaatattaatttagtatatatatgtacaaaaatatcatgctaggaatgtaaatattatgtatatgtacatgcagatatatttaaaaaattcaaagatgaggatggcaactttaaaaaatgtttggtaagtgatactcttggtttgcttagcttatatgaagcctcacatttgagttgtgttggagaaaatatacttgatgaagcacttgctttcacaacaacacaactaaaagagtttttggcgaagaaaaaagaacaccacgatgacgatgatccattatcgaaagaaatatctcgagccctagagaggcccttacgaaagaccctagtaaatcttcatgc

SEQ ID NO: 158520 - DNA, 619 bp, Cannabis sativa
  modified_base (494)..(497): a, c, t, g, unknown or other
atattccaatatcaaaaagagaaaagaaaaagatgatggtaggcacaaaaagtggaagttctcaatctcttacaagtttttttttgggtattatggataattatgagtgtttgtttggtatgttttgcttatggtataatagagcctaaatgaccttttatctacctttcacctaagccatgacatttcaaccgaaaaagaccttttgattccaagcaggggttttcgacattagtggagagaggtaggtcatgcaagcatattgaacattggttggtggaacgttggtaagagtagaatgattatgatatgttcaaattgaagtgttttgcatctatacatgattttttttaacttgtgcatccgagttgattcctagagtagttgaattgaaattctagtttggccaattgattgaagttgaacaggtggcagttgtagtttaattatttggaggctcagttatctgtcgtgtcgttgttgctttgtcttannnnttagttttactcgagggcgagtaatgatctagtttgggggaattttttaggctaattttagtctaagtttcgggtcgtattttcggttatttttcactctttgtttctaattttagggctat

SEQ ID NO: 158521 - DNA, 533 bp, Cannabis sativa
tgtattttcacctgcctaacccgcgggaaacaattaaggaaaaatgaggagtcattaagctgcccgagggcctcactctgtgatcccgaaaggttaaggctccaaccctgtagaccagtcttcatagacctccgtgagcgaggtctgcacgaatggagaccacaatgaggtctccgcgagtcaggaaccctctcctctggaaggcgagactttttgctcccgcgaaaatcatgattcttccatcaagatgaattgggctggggcactcctttgactccacgaaggttcggtctgcatgtgccaacctaagggcccacggctcgctcttttcctatgtacaatgtcagaggttgtccctcaggccacataaagtatgcatgtccttgtgtaccatgcaaaaggatccaacgactaggattaggggtaattcgaatgaggaaggtcgtggagtgacacacgtccaaagcaccgtcagtacagccagtacaatctgacatcagtaaagatcacatatggaaaatatgccacctacc

SEQ ID NO: 158522 - DNA, 1381 bp, Cannabis sativa
  modified_base (45)..(55): a, c, t, g, unknown or other
tagaaattcatatttaggattttaaataacatacatggtagtaannnnnnnnnnnggtaaaacatattccaacattattaagaacttccacttgtccatttgcctcaggcctggatactgacaagaagcttttgataattttattcctctcgcagaatttagtgaacaagtcactatcaaattgggttccattatcggatactatcattatgggaattccaaacctacagataatgttcttgacgacgaagtcaaggactttcttgcaggttatggatacaaggggctcaacctccgtcaatttagtgaagaagtcgactgctaccaccgcatacttagctcctcctcacccagtgggtaatgccccaatcatgttgatcccccatataacaaatgggtagggcgaggtcatcattctaagttcggttggcagtatgcgaggtatatgtgaaaatctctgacatttatcacatctcttgacaaactcgtgtgtgtccttattgatcgttgtgcagttatatgcttgtctaatgatctctttagacaaactttacaaacccgcatgatccccgcagaagccttcatgaatttctctaatgatttcgtttgcttctgcgggaagaacacactgaagtagggtcattgaataccctcttctatatagttttccttcgatcattgtgtagcgaggcactgtatacaaaatttttttcatttggaagtttcctgtcaagtaaatagttaacaataggcttcatccatgttggagagctatctatcatctcgacgtcttctgtttcacatatacttgactcgctcagcatttctaccagaaccagatttagttcgtccagatcattctgcgaggccaattttgctaagccaacgacattggtgttctgttctctcggaatttgttcgattttaaagtaatcaaatatttccacgttcttccgaactgtctctaaatactttgccattttcaagcctttggcctggtattccccgaggacctggtttacgatcagttgcgaatcactatgacagatgagatttttgacttataatgcctctgctatctttaagccgatgatcaaggcttcataatcagcctcattattagatgcgtcagattggaatctcagagcatagtgaaacttaaagccttccgacgatattaatatcacccttgcacccgaaccctgcttgtttgatgcaccttccacatataacttccatgtttctccatctcgctgataagatgagtttttttctggagttaaaccttctatcaagaagtcagctaaagcttgacccttgatggatgttcgaggaaagtatgttatgtcgaactggcccagttcaattgaccattttatca

SEQ ID NO: 158523 - DNA, 502 bp, Cannabis sativa
  modified_base (60)..(65): a, c, t, g, unknown or other
aaaacgtgataagctcaatttgggtctaaattgagtctactttgatgagaagcacaaatnnnnnntctccttcagtgttgactgtggtctcctcttgttttaaatctcttggctcgagcccttgtcaccgcgctaactggaactttacttgtatctttagccttattgttcttgtcaacccttgcattcgatgaagaaagatgtcaattcatagaatggaggaactcagagatggaaattatgagggcacaatagacaaccattgatgatcgttctaggaaggccaccgtgttgataagaagggcctaccaggttaccaatcaccaaccaattgctgcatcaagtattcccttgaacagatcaaagggtatgtatctaggcatatcgcacggactcacagtggtcagcctgttgggttttgtgccctaaacaaaacccattttaatataatcagatttactaattaataaagatcaataatcattttatgttgcatggttca

SEQ ID NO: 158524 - DNA, 506 bp, Cannabis sativa
ttattcataaatttacaaattaatatttttctattattttaataaattttctttaaaaatatttatcataaattaattattttttaaaaacacataataattacattaaataattattcaattatttatatatatatgtattcataactatatatgtgtaaagtttttttttactttgtaaaatataggaaaaatgtttttttattgaaaaaaattattatgaattgaacaaaaaaaaaaacaggtgtgagattatgtagaagaagaaataagtgtgagattatgaatcaaattttttcataatgaattatttttatattccaattatataaacttgatgtcatcattgtagttcccattgatattcttaaatttttaaacttaacactcagttatcgttttgttagttgatcaataaagtgtcacatgtaaatatagtattggccaaactaataatttttttagaaaaaataattaaaattaattcatattattaaaaaaaatat

SEQ ID NO: 158525 - DNA, 626 bp, Cannabis sativa
tttattttagtgtatttataccgcggggtttggtaaaaaatcttaattaattgtcttatgtgaatattaagtagtgttttaggataaacacttattggtttaccgttgttgtgatatagggccgagatcatcagggatagttctccacttgggttggtcaacatgtatgaacctggattaatggtaagaaaagtatattgtattgcatagtatgttgtatgtaatacaattagtattgcaatgaattgattaatattgagatataattaatattgttatataatgaaaacattgattggttgagtatcgataatgtgatgatattatgtatgtgatatacgggatcacctgattaggtgatgcaattttcctggcgacgtattgggcgtcagtgatatataatgagtaccgagcgtatgtacgggctcacctgattaggtgatgcaattttcctggagacatactaggcgtaagtacaggcatcagtgatatatgatgagtaccgagtgtaggtatgagctcacttgattaggtgatgcaatttttcctggcgacgtactaagtgtaagtacgggcgtcagtgatatatgatgaataccgagtgtaggtacgggctcacctgatta

SEQ ID NO: 158526 - DNA, 564 bp, Cannabis sativa
  modified_base (98)..(103): a, c, t, g, unknown or other
gcttctccttttatcttttcaagaaaaatctaatcttgaattattatacaacttcagccttccttcttgaaagatgaagcttgttacataaaaattcnnnnnnactctcgcatgcacgttgtttttcattgcgggaaagatcactgggggtacgatatgtattctaccctccttcgtgggtttggaagaattgcttgaagtctatcctacccctcgtgatgcttttccccttgatcttttcaagtgaagtctaagcttgaattttttttacaacatcagccttccttctcggaagccaaagcttgctaaataaaaattcaactcgactctcgcatgcaagttttttttcgtgcaagaaagatcattggcggtacgatacgtcttcaatcctccttcctggacatggaaggattgcttgaagtctatcctacccctccttatgttttttcccttgatcttttcaagcgaagtctaagcttaaatttttaatcaacttaagcatccttcctaaaagccaaagcttgttacataaaaattcaacatgactctcacatgcacattgtt

SEQ ID NO: 158527 - DNA, 534 bp, Cannabis sativa
ctagagatcatcatggcatgctaattgaaggcaagacacttctcttctcgggtatagtttcaccagaattagtagaatctattggtgtacgagaagctttgagttggataaaaatacatgggtggcagaatgttatacttgaaaccgattgccttacggtggttcaagcaataagaagctcggttgacatgatttcattatttggccaagttattcatgattgtaaagaattgttatccgatttgaaaactatttctgttttatttgttaagcgatcagcaaatatggtagctcatatttgtgcaagagcttctatattttttcctggttgtactttcgatatggagtctgttccatttgacttgttaccatccttggtagcggattttaatggttaataaagatgcattttccattaaaaaaaatcaaatcaaagcctggctgaattgaaatgtggtggccaattattatgggaaagaataagtgttttgctgataagtttatagtatattagatttggagagtgcaaattgt

SEQ ID NO: 158528 - DNA, 625 bp, Cannabis sativa
tttttaaaataaattttttttgcacattttttgtaattatgttgtttttgttgtacatttatgaaaaaagccctaggattaaagttttaatattattataggggtaaataccggcataagtacctaaagttttgagtttgtaagctgcataaactcaatgattttttttagtggcataagtacccaatatttgtcaaactgtaatttttctctattttcgtcaatacaggttccgttttaaatttattacaaaaaaaaaattagaagtaactgatactacatattttttcgtccagaccaaataatctaaaatttgggtcttatatgtatcctgcttaagacaataacagagtctgtactgatgaaagtagaagaaaattatagttttataattgggtacttatgccactaaaaaattattgagtttatgttgcttacaaacttaaaactttgggtacttatgccactatttactcttattatatagccaaatgagagaagaagaaggggaagagtttgtttgtaatataatatacggttaaaatcttgttttaaatggtaaattaattatatatacatcaaatgataaaaaaaaaaaaacaatgaataaaaatgaaatagaaaa

SEQ ID NO: 158529 - DNA, 613 bp, Cannabis sativa
ggttttctgccctaaataaaacttatttcaatataatcaaatttattaattaataaaagatcagatttcatgttgtgcttaattcaaacttatgtccggtttgtgaggagaaggaggaatcccatgaacatctatttttttagatgtctgttgtctcgaaaagtcacggattcaactttttcgtggttgagttttagggcttggccaatagcttacattggttggtatgattgggttattttgacaggtcatgctaggatatatcggctcaataccactatcttggtggctgtaatctacaacatttggcttaacaggaataactgtactgttagtaattattctagatcagtttgtggtttagttgatgatgtaaacagttttattaagtacagattacaacttgtaaacaggcaaaacttgtcaaagcaggagagagactacctattgagattacaagataggtagttgtgtttgtcttagcttgtcttggctgggttgtaaggggcattgtgtgtggcttggtagcttttgctaactgttgtattttgctcttttgattaatgaagctttttcttcttgataaaaaaaaaagatcagaaatcgttttata

SEQ ID NO: 158530 - DNA, 503 bp, Cannabis sativa
ggtacttaaagaagacaacatgtgttatacttgcgtttagaaagtcacaaaaccaaatggaagggttttgtgacgctatctatgcaaggcagaaaaataaggtgacacaacgaggtgtcacatacatgaagaccaagctgttaaccctagctaagttcaaactgaacttggtagggataaacatatggagctgaccctagtagggtcattcaagccctcatagcatcatcaactatccttgggtaaataagagaatcttggtggaatttgttgttacatattcacttatttatcctaaagttgtataacactactcacagggttcgacaaatatacacttacatcaaatacaacaaagatcaagattaaagaacataaaatcagttacaactgaaatagttacaaaatcagttacaaatattacactagggctctgccctagatcagaatcacacatcagtataaaagaaagtattttttctcagatacagaaaaaaaaaaaa

SEQ ID NO: 158531 - DNA, 597 bp, Cannabis sativa
ggactaaacctagtgggccaaagggcaaaaaggattgtgcttctcatttgagggggtgattttgtaccctaggaacccaacaactaaaaggagaaaaagccaagtacaccaggagcttttcatcatcataaggagttgccatttttagtgaattaattgtagaactatagaggaggaagaagaaaaaagggggaccaaagtgcaaaggagaaggacacaagtttttgtgtttgaatttctcttaccttctctttatctttttcttttttccttttcctttgcttatttcttgtctttaaatatctcaaacttgttgaattgtaagaaaaacgggcaacaaccatggaagataattttttagcttggattttagtttttgatttgaatatgagctagaattttgaggcttgaatgtctatgaacttctatgttgggtatgattaatttttaagcttactttaacatttttggctttgttcattcaagtgagtttcttttattttattttattgttgtttcttggccatgaataacaattttctaagctagatcttgttctggaagggctagatctagtagttcaacttgaatggagca

SEQ ID NO: 158532 - DNA, 681 bp, Cannabis sativa
atttgtttttgttggatcagttcacggatctcggttcccagtaatttcagtactaatagccagggaattgttacgagacgggtgtctagggtttctggccgtggtattagataccacttggcctgaatcaattcggccagaggacatcaaggtggtttaggaattcttagatgtttttcctgatgaacttctgggtttaccactgcaaagggagattaatttataattgatctggcacctggagcagaaccggtttctaaggccccttacagaatggctcttaaagaactgaaaattcaacttcagaggttgcttgacctagggttttcacggcctagtgtgtcaccctggggagctcctgtacttttatcaagaagaaagatggatccttgcgtatgtccattgactaccgagaattgaataaactaacaattaagaataagtattctttacctatgatcgatgatcttttcgatcaacatcaggggaagacagttttctcaaagattgatctccgatcgggctatcatcaattgagaatccgagaggaggacattccaaagacgactttctacacgaggtataggcattatgaatttttggttatgtcttttggactaaccaatgctcctacagcttttgtggacctgatgaatagggtattcaaggatttcttcgata

SEQ ID NO: 158533 - DNA, 534 bp, Cannabis sativa
  modified_base (488)..(509): a, c, t, g, unknown or other
tctccactactaagttaactctaagtttaagttgcctttagtaagcatatacaagtaggaaatttttctaagatcgatgatgtatatcattatgggatagaatatctggaatatgatcgtttgtgccactcattttataaaagaaaatagagtgacatcatagcagatgatctataaaccttcttgtctaatgatatatgttaacaatttcttaataaaaaaacttaagaggaaaaactaaagaatttttttgattaaaataagaatctgatgatgtcctagtaggcaagagtcaaggttattcttattatatcaattctccattatgtcagcattgtaagtgttgagttttgtgccttaaataaaacttatttcagtataatcagatttactaattaataaagataagaaatcactctatgttgcatggtttacatgagttatttcatgattatgtttaatgtattaattctattaagtccagaacnnnnnnnnnnnnnnnnnnnnnnttgttcatgattatagtgtcgttag

SEQ ID NO: 158534 - DNA, 635 bp, Cannabis sativa
gaatatcgaacgataaataagcaaatatgccgaccaggagtactcaacagattcaagaacaagaatgttcaaattaaagtcaaaactcaagaagtttgaaatttactcgagttagggcaaaaaaatttatgaagcttagaataagcaagatgaaagatagacgttacgtagttcaaaaaacaagcattatggactgtaaaatcacatgaagctatgacaaagaataatcgcagagtttctgaacctagggtttcctaaatattttctacagtaaagtcgaaggtgcattcgaaatgtaaacatgtaaaaatgagcataaaggaaatcgaaaacttactcaagagtcacatatctgggttcgggcaacgtcaatccaacgagcagttttgatgaaggcacttcagcaaacttaaagccaagaacctctctttttgctctgaactcacttagcaaggaaggatggtgaaaatgagtttatgtgccaatactggttgatatttataggcaagtcacgaaaagaggtaatcatttcaaaaggaacctcaaacgccttagtttccctctttaaaagcaaatatgggaaataaaaaataatcaagtgcagtcgtcacccgtggtgagagaaaattagattt

SEQ ID NO: 158535 - DNA, 687 bp, Cannabis sativa
  modified_base (90)..(90): a, c, t, g, unknown or other
tatatataaataatattttattaaataaaaataaaaagtcacccataaatttttcataaaccaagaattttagttatataggcacacttnatatagaatagatatatatatatcgatggatatgactataagcggaagttataccgcctcggaagcgtgagggaatcgtttccctatattatatatattgtatatacaatatattattatatatattatgtaatcctaaatgtaatttatagagtttattatttaattttgttaagaaatgttatgtcattaattttttaaaaacaaattacaacttgtaaatatgtataaaattataaaattgttatataattaattatttgattatttttaaaaaaatgtagtaaaaaaaatagaataaatctatattattgaaaaaaaaatacatataattaaaatagtttttaacattaattatataaatgtaaatatatatatataaataatttttatgtatataaaaaataaaaaaaataaaaaaactttttcatgtaaatgattaaataagattttaaaatctaaattataatttttttagtaatcaaaatttaagttacaaaaaaaattataaaataaatacttaatagttaactataaaaaattaattaaataataaaattttaacatttaaataattaaaaaaataaatattaataa

SEQ ID NO: 158536 - DNA, 618 bp, Cannabis sativa
aatgagtgcaaaaatcttaaagatgagatcgaaaacttgatccgattgggtcacctctatgagtggatcaagaaccggttgccccatctcaactcggttctaacagggggtccattgccccaagggacaccaggaagtgcgcccagagcattggcactaactgtaccctcgggaggaccaatccctcagcagacccctggcctgccaccaagacccaatggaagagtggctatgatctctggtgggcctcatattagagggaccactcgaaaagaattaaagcgctatgttggggccattaaacacgatgaggtgtgggaagtcactcagcttccagctcaaaagccccaactcatggatcaaccaattactttcacggaagaagacgcaaggatggtgcgttttcctcaccatgaccctctggtcatagagactcccattgccaacaaggtcgtggctagaatactaatcgacaatggaagttccgtgaattttttgtttgaggaagccttcacagcgataggcctcatggaccgagatctgtcgccaaacggttcccagctcacgagattcaatggcaccacgcttatcctgatgggaaaagtgaggttgctagtc

SEQ ID NO: 158537 - DNA, 621 bp, Cannabis sativa
ttttgatttgatacattgtgatatatggggaccttaccatgttgtctctcactctggttatagatattttctcactcttgttgatgaccatttaaggtttacttggacatatcttctaaaacaaaaatcggatgcattaactgtcatacctcaattcatcacatatgttcaaactcaatttggttgtatgattaagtgttttagatccgacaatgctcccaaacttgtttttagagatttatttaccaaacatggcatcttacatgattttacttgtgttgatacccctgaacaaaatgcagtagccgaaagaaaacatcaacatctgcttaatgtggcctgtgccttatgttttcaagctcacttgccaatcaaattttggaccgagtgtatcatgactgctgcctgcctaataaatcgtactcctacaccaaacttaaagaataaaactccctctgaactgctctacaaaaaggaaccagattacactcatacgcgagttttaggctgcctggttttttcttccactctacccgtgcacagaaccaagtttgtgttagcttttatgccctaaataaaactccatttcaatgaaatctattttattcaacatcaataaag

SEQ ID NO: 158538 - DNA, 614 bp, Cannabis sativa
tactctttcccccaatcttgtaactgctgcccacactgaaaaatcttgtccgaaatagacaaattcgaattcgcctcccaactatctttcacaatttgcacacacagcggctcccttagccaagcgttttcaaaacgaaaatgcttcaaataaggttgaaccacaccacaggaaacatcaagcagaataggacagtggtccgaagttgaaaaatctatattaaaaagcttagcaaaagtgaaaagatcaagccaagattgactcaccaaagcacggtccaatcgaacctccacccaactgttcgtacctcggcctcgctcccaagtgtaggggtatccaaccagctctaagtcttgcaattcacagtcaaataaagcttgttgaaaaccaagaatgagacgttcagggtaacgattacctcctcgcttatcatcatgggagacaacattattgaggtctcccatcacgcaccagggaagagaagatcgctgcttcaaatcacgcagaaggtcccaagtttcctgcctccgtcctctattcggctgcccatacatcccagtgaacctccatggaggtttaccctccactttaacctccacatcaataaaagaaga

SEQ ID NO: 158539 - DNA, 529 bp, Cannabis sativa
  modified_base (46)..(58): a, c, t, g, unknown or other
gtttcagatttcttttgcattagggaaagaaaactatatctagagnnnnnnnnnnnnnaagtgacaaagtactcataacctcctctggcttttacatttggaggtacacagacatctaaatgtactaacccaagaggttccttggcacgctctccctttttcagagaaagaacgcttagtcattttaccttctagggaagactcacaaattgataattcaccaaaggtgacatttttcaatagaccacctttggttaacctgtgaagtctatcatagcctatatgactaagtcgtaaattctatagatatgttttatcattattatcaatcttatgctttttaagacttataggtttagcaacattaaaaggttcattcatgagcgcaattggtatatctggtcttaaaacgcaaagcccttattctatgtgagcaacaaataattgaatgcaattatgagaaatagaactcaaaaaattcaattgataactttgtgtttgtaaacatgaaactgttggaaattatttt

SEQ ID NO: 158540 - DNA, 545 bp, Cannabis sativa
atggtgatatgtattagtttagaaataaaatattaagtatatgtaagtatagaaaattaaatttttcttgggaaattatataatttttaaaaatgagctttaataatttttatttatttttctctcacattattttataattttaaatgtggaggttgactaagaaagtataataggagattgtaattagggctaatttggcatagctatgctgtaggaaaaagtagctgtagctgctgtggggaaaaacagatgtagcagaattgtagaaaaaaactgaactgagtatttggtaaattataaatttcaaagagctgttgttaagattctattataataatgataatattttaatctagttcattataattacaaatatatataaaaaaatatgttatataaaatttttattttctatatatttttagttattttttctataagttaaatttatatgtatttgataaaaataatttttaataattttaaattatatttttatcacttgtaaaagaaaaaattgtagtttataagaaacttaggtt

SEQ ID NO: 158541 - DNA, 553 bp, Cannabis sativa
caataatgacaacaattacatacaattggtaatccagcaaagcttaagatgctacaaggctcatattctccagcaaatacaattaaaacttttaactttttatagaatgacaaaagtaattaaaattcatgatacaatcaacttgatttggaataatttagtgtcgaataatttataactataaactgattaagttagagcattagtgaagtggaccgttgtacaattaatttagaagggcttatacatcttttcctgacatatcagattacacaccaaataaaaaagttggaattaaaggaggttccttgaaataatttagtagtaatttacaattaataaaaaattaatctaatactattcattattaaattaaagatatataatcaagtaacacttaaacttgctaatttcataaaattagtgtcagacatatttaaaaatcataaagaaatataatatataataattaataagaaaagggtaactccccaagcaccaggtaacattttcttaaaaattaaaaaaaaaaaaagaacaccgggtactaata

SEQ ID NO: 158542 - DNA, 582 bp, Cannabis sativa
  modified_base (529)..(529): a, c, t, g, unknown or other
cgggttgaatgtgaagataagacacgacttaatgatcactactgatgacaacaccacctatgctgatatggtgggtaaggcactgcgagctttgggcacaatggagtgcaccttagggtcttgagagactccagttgttggtcgggctcctactcctcctatatcaggctttagtaggggaggtagtggcttgaccactaatcagaaaagaaaggcacatgttgcatctagtggttcaggtcagaagaagaggttccgagggaaccagggtcgaggcaatcgttagggtagctctgaaacccgatacacttacccaaaatgcagcagttgtaagaagcatcatctgggagagtgtagagggcaagggtgcttctagtgtggtatgccagggcattataaaagggattgtccccaactcaagactgaagcacagaagactgcagcgaaacccgctccagcaaggttgttcgcgataacttaggcttatgcagaagccagcccttcagtggtaacaggtcagctctcggtnaacaactcttatttctctgtgttgtttgactctgggccactcattcttatgtg

SEQ ID NO: 158543 - DNA, 766 bp, Cannabis sativa
attaattaattctaaaaaatgaatatttacctattagtaatctgttattacaagtcaaaaaaaaaatataaccatatggttacaataaaaaattgtaactattgaataatcacttttttgctcaaatatatatatatatatgatgatatattatgttatatattgagagaaagaaagaaagaaaaagaaaaagtcatcagtacaaacaaatgcatggagaaggagaaatatagtgtcagaaacaaaaaagagaaaaaaaaaattagagtgtgcatcagtgtaatattgaaaaaaatatatgcatttcttattatttttattttttttacatgtatatgcatttgttattggtatgcctgttacaataaaattgaaggaacagtatttgtgctaattaattgagcaacagtggcaattaattacaaattttagttgtcagatgtaattttttcaatctaataaatagtccaataatatgttacgatatgtttttgagttaatacttattgccaaaaaaacaggtatgactacaataaaattgtaaaataaaatatttttacaagtacttttttttattagtcatatgcgtaataattataaatattaaaaaagtttcaccgataatatttcaaataaaaataaagagctagagatttttcaaaagggtaaatattattttggactctctgttttgcaaaagttaccgattagaccatttgttttgttaaatgacaaaatggaccttgtattttctaaaatagtaaaa

SEQ ID NO: 158544 - DNA, 538 bp, Cannabis sativa
agaccccaatgaacataacccaagtgataaaaccaagcttcatacacagaaacgcatttcaccattaaaggttcaagattgagttcaaaaactcaaaactcgactaacccttcaaacagccactaagttatgcataaatcaacttattccaacatattttaaccacagataacacaatcaaacaatagcaacaactacaggaacaaaactcatcattttaccatgaaaactaaagttttgagttcaaaactccatacttagttaaaatcaataaacaacaataaaaccctatttgaatcaacatattaagacataattaagctttagaattcaacactaaacacaaacaactttccacagccaccaaatcctcaagcatgcaaaatttcacaactcctaaacttcaagaaaacaaggaacaagttttaaaaagcttaccaagaacttgagcttactaaaatcttgagaaaacagcttgaattaccaaggaaaacacaaaatctttgctgctccaagaggggccgaaagagagagagag

SEQ ID NO: 158545 - DNA, 528 bp, Cannabis sativa
  modified_base (475)..(485): a, c, t, g, unknown or other
atcagatacatacttcctcagcattgatacgtgaaaaacattgtgcattactaataattctggaagtaaagctagtcgatacgctacttgtccaaccttcgagtatttcaaatgggcctatgaacttgggacttaacttgcccctctttctgaagcattttacacttttcattggtgaaatttatgagaaaacatgttctcttacctaaaactctatgtctcggggcttaggatcagcataactctattgcctacttcgagaagtaagcatctgtgccttgatcttttcaatagtatcactagtcgtttgaactaactaaggacccaaatactttctttctccggtttcatcccagtgaataggtgattgacacttcctaccatacaaaaactcatagggagtcatctctattatactctgatggttgttgttataagaaaattatattaatggtgttggatatattttaccagnnnnnnnnnnnactaacaagtatgtttcattaaaatcctaatatgaattctaaa

SEQ ID NO: 158546 - DNA, 560 bp, Cannabis sativa
  modified_base (503)..(511): a, c, t, g, unknown or other
ggagaaggagttgatgaagaatgagttacaaccatatttatatatagattaagagaaaaataaaaagagggaaaacgattaatggaagttgaaaaaaaaaaattgaagaacaaaaagaagagtgaaaatgaagttgtgattgtagagagggaagtgttcagctatgaaggttattattttttaaaaaaaaaaactgaaaagaaatggaaaataaaaggaaaaagaagagaaaaaagagagagaaatgatgtatagagtgattgatgtaatacatcaatcaatcacgtgttaaaaaaggttgaattgtatgtgcatgtggtaaaatagtaataaaatataaaagatgagtaaaaaagttggtttagtcgtgtataggtatttatgtaataaatttatcattttagatttttggtgtaaaaatttcttttttatattatatttttattaatttattgttaattttttgttataagtattttattttggggcttttttatttttannnnnnnnnacagttttttttttttttttcattttttgcaacaaaaaatcatatagaa

SEQ ID NO: 158547 - DNA, 605 bp, Cannabis sativa
ttttttttttttttttttgctagggttttcttttcaacaatcttatgccatatttaattaattaaaaaaataagcataaaaattcaaatattctaatactactcattcatgggtaataccatataccatataccagaggtatatgttggtcggttttgtcagattataacatatttttatgaaccaatataaatatggggttgcaaatatttaatcgtaacccgcacaattaaaaattaaaaaaagtttaacccacccaatgattttgtcggtttggtcgagttaacccgtctaaaccgtttttcatttttttataattattattgttagtttctagtattcaaataattagatttttaaaaaaaatatatattatttatatttcaagctaaaaaatactacagtttaaattaattttgagaactttactataataatattattgagtaaacataaaataattgaataaaataacaaaaaaataagtaataatatggtatagattttaaacttcaacttcaagatccaaatacaataaaaattataaagtctaagttttaagctaaacattaaaatgttcaaattttaaatacaaaatagtttaa

SEQ ID NO: 158548 - DNA, 533 bp, Cannabis sativa
  modified_base (52)..(54): a, c, t, g, unknown or other
  modified_base (299)..(311): a, c, t, g, unknown or other
tttaccaaaacaataaattatataaagtgattttgtttctgcaaagaatatnnncgtttttattttattttttatttatatttcaatgtcattcaaacgctattcgattcttgcatgcatcactttgttcttattgtgtttaaagtaaagaaaaaaagttatatagtacataaagttgtaggttatattagctaaaatgagaatatatagtactcttgataagaccacacactagtgatccattaagtgaaacgtactgacctaatataataataattataataaatataataataatnnnnnnnnnnnnnataataataataataatttatgacattgttcttgtaaccaacaacataacaaattaatattataataacaatccatgatattaattatacattacaaaatattaactcaaattactgattacataagtttaataagaaaaacactgatatcatggattagttatacattttcaatacaacaataattttattagttcaacacaaattaggaataacacaaat

SEQ ID NO: 158549 - DNA, 606 bp, Cannabis sativa
  modified_base (49)..(52): a, c, t, g, unknown or other
cccgaactctataacctaattactctaaagagtatttaagaaaattttnnnncaataacaattatcttcaaaggaaaactaaattatttatgttataaacttgtttattaaacaagatttttggtgtaattcaaatcaaagcaaaaaactcatatatataacctaagattttgccaacaactacttcaaaacaaatgtgggataaaacccactaatttttcattcacaaaacaaaatagttgactaagtcaacttttccaacaatcccccacatgaatgaaaaatgactcgagaataaccaacaaatagttagactttgtaatagagttcaacgtttgaaacctgcataggataggtaggttttaccctttgaaccttcccatctgtgagtacatttactttactagctgctcagtagacgcgatgtctttgaactgttctgccgttcatgtaaacgatgatataccacacacagaaatctctcctggcatacattagttctcactaatatgttcgttttggccctgaacatttccctggttctgcaagagatattatagaaattaagccttaatcaattcctatagaagtgacccatcttctctc

SEQ ID NO: 158550 - DNA, 552 bp, Cannabis sativa
gctctaaaagagtagattgcatggtaatattagccaattcccccataaccaactcaattttagctcgggtcatctcatttgctagctgctggagatttgcttcacagtgttcaatcgactttgaccctttctactcatggcatcaacaactatgttggccttaccagggtgataaaggatctcacagtcataatccttcaccaactctagccaacgtctcgtctcatattcaagtccctttgggtaaagaagtattttagactttcgtgatcagtgtatatctcacatttctcgccatataggtaataccgccaaatctttagcgcaaataccactgctgcgagttctagatcgtgagtagggtacctctgttcgtactcctttaattgtcgagaagcataggctattacctttccagcttgcataagcacacagccgagaccaagtctcgaagcatcaaaataaaccacagactttttcttatctaaaggaagagttagtactggagcggtaatcaagcgctgctttaactccaggaaacttttctcacac

SEQ ID NO: 158551 - DNA, 510 bp, Cannabis sativa
ggtggctctcgcccctgctgtgtaggcaaaaccagttgctgcagtttaccgaatggaaccactgtatgaaaggttccgcaagcaggcacctccagtctttctgggaggtcctgatgtaataaaagtcgagcagtggctgacggttattacaagaattttgaattttatgggcgttaccgacaatgacatagtggtctgtgccacattccaatttcaggaggatgccttggtttggtgagacatggtgtcccagacttgtgatattacgactatgacatgggaaaagttccaggagttgtccaacgcaaagtattacaacaaagcagttagaagtgcaaaaagaaaggaatttactcagttaacccagaaggagaatatgagtgttactgaatacacaactcagtttgatcaattggctaggttggcctcagggatcgtgccaaccaatttcagcaggaaagaaaagtacttggatggcttgaatccgaaaataaaacatgatctcatgat

SEQ ID NO: 158552 - DNA, 656 bp, Cannabis sativa
  modified_base (53)..(64): a, c, t, g, unknown or other
atagaactcgaaaaattcaattgaaaatattgtgtttgtaaacatgaaacacnnnnnnnnnnnntactaaaatttaaaataaacaaaatattgtctaaaattaaatatttatcctgaaacttgaggcgagcttttcccttagcttggaccgatactaattcgccatttcaaactttgagcttcaactcccctggatttagataatcctaagtttcaagcagctgtaatgaagaacaaagatggttagtagatccagaatcaacaatccaaatgaatttgtcattctccaaaacacatgattcaaaaataaaagcgttaccttcgtttcaatggtctagaagtctgggacatctttcttccgaatgtcccttctctccacaatatgaacatagaagtgtatgactgctcaatgtttcagtccttggttcaatttcaattctagctctcaaaattaaacttgaagaagcagcattgtcagaagcatcattctcaatttctctcttccatttttgcatgtttgtaaaactggagggaggcctccttgtaggcaaagttcgttcgcaagcacgcaattctgcgttcagcttgtctacgtcagatgagttaaaattgttgatcatgtatgatacaacaaatccattatactcaggtggaag

SEQ ID NO: 158553 - DNA, 611 bp, Cannabis sativa
ctttttggggtgcccaattcacagcgcagcccctttctcttaccgcttcgtcaaaactttcaggcaggtttttaatcacatctccgccaatgcccgagtcagttcgaactacccacaagaaaggtcgcttgctgttggctaaaccccatgccgtttctactatctctttttcatccataaatgctatgcttcccaaactaacatagatgacagagttatctgtttgtttatcaagccatgagatgcacttatggtcctcttccaacaagttgttacaggatggtgggaccattttgtgcgtagggccaattgggaagaatggaatatggtatccttcgctgagctgtgctaactaggcatgtcaaaaagatctatttagttggagcgggttggagctccgactcgacggatccgggaccgggattcgggatcgggactcgggagtgggacccgagacctgggacccgaaccgaaactcggacccggatctttacacaatctattaatagatgtcaacatcaaacatagtattgtatttaataataatacaaaattaaaatggatataaaattataagttaatattaaaattcttaaaaaaaaaaaaatagt

SEQ ID NO: 158554 - DNA, 549 bp, Cannabis sativa
tctttgaagtgtgagtgcttacttcctcccaaagtaaggcttatacaagtcttctcccgaagaccactcttttgttcaatcagttcgttctaacaactctaagatagagtaagagcagatatgaaaaatattaaaacctagatgaacaactaggttctcacaaaaagaactctcttctcataaataagaataatgcaaaaaatgaaaactagaaaagttgattcgaatggctgctctctaggttccatttatagaacatagaaaccctagagacagccacaaggtcgaatctacagctgtacaaaactttcctaagataaacttgatttgcagcaacagaaacagattctgacgcagcaaattagactagaaaaggaaacttgccataaacgagtccgatcttgtattgggtcttgatacttgtcaaaaacactgtgtataatttgattgtatcaagatacaatcgaatttaataaggaaaatagcaagagtcaaagtttcctttaacaacaaactttctataagagaatttcttttcttacaagaagt

SEQ ID NO: 158555 - DNA, 503 bp, Cannabis sativa
ggttcggcctgcacggcaggagcaggagctattggtcttttaggggcaggaattgcaggagcaccttgctgtctcatccgccgaatctcttcatcttgctcattgatcctggcttgcattgctgcaaacctattttcccaatcttgggcagctcgcgtagcttgggcaacctgtggcagtttaacatcacccctgccacgtgccctacccttgggacgtctacctcggccacagatattaaggggaatctgagccccctgaccaccactggatccaaccgaattaccctagctcctggtgtatgcctggcgtccatactaattagaacaacttgcgtaaccaagagctagtttggtcagaccatgatcagagaaaagcttactaatgccgcttttttggaaattaaaaatatgtgcttattcaactatcaagctactaacatacttcctaatggacttttcttaaacaaactattaaaataaactactaaagcaataaaagct

SEQ ID NO: 158556 - DNA, 611 bp, Cannabis sativa
atactgtaaataaaaaaaaaaaaatgagacctccacccataaaccgaaataccagaacagctgaaaaacaaccattaattccgacaggattgagcaaaaaaaagtgaaattaacgtcaaataaataataatggaaaaataacagtaaaataacactaaaaaaatcaaataaaaaatggacaaatagataaaaaaaattatctcctgcacagcctcaacaccaaatgcaatagcgcctatatttgcaagtccagacctaaaaaattataataagaaaaactactaaaacaaaattaaaataacacaaaaacaaatgtaaaataatgaagcagatataaccatttataaaaacataaaagaaccacacacctcaaaactcttctcacagtgagctcgtcaaatgtatttataggagaatcagaataaaaaattacgaaaatagccatagaaaaggaagaagaaaaatatttatagtctccatcttttacacccacggacagaacagaaccaccacagcaacacgataatacccaaaaaaacaactattaattttgaagagatagaataaaaatagtgaaatcgacgtcaaataaataaatcatagcaaaacaa

SEQ ID NO: 158557 - DNA, 944 bp, Cannabis sativa
ctaaagtatttcgagatgcaaatggatctgcaaggaatacgaggagatgtgtgttgcagattttttcctgctaccctctcggaagccgctcatcaatggtatttcaagctgggacctgataaattcaactcatggaaagccttctcttcagaattccctgcacaattctcctcctctcgccaacttctgttgcatctaggagacctggtcgatgtcaagcagagaccaggcgagcctctctgagcatacatcagcagattcatgacgaaagcgaccaaggtctcacgggtaactgaagatggaaaattgtccgcgatactggggggcattgaagtcctcggtgaactttggaaggacataaggaagaacggcccaatagactcaatgagcgattttctcgaccgtgctaaaggcttcatcaaacttgaagaggctattcagcgatcagaaggtgagcaaaagccgggcaagtcaaaagctcattccaatggaacatctgcccaactcccccattacccaaataattcaagctcaaatggtaaacgttccaacaacaacaataggcaagggaatgggaagaagggaaagttcaccagcaaaaccaagcaagctccctaggagaataaagtaaagtacactgcacttacaatcttgactgaggatatagaaagtgtctacatggccactcagtcgctagttccgtacaagaaacccgcgcccatgaagaaggatgttagcaagagagacatgaccaaattttgtcgatttcacggagactacgaccaggacaccaatgaatgcaacaatctgaagcgggaaattgaattcctggtaaggaaaaataacctgcacttacaaaattatgtcaaagccaatcagaatcagaggaacgataataaccaagacttgctacctccaccggtagatggacatctgcaagtcat

SEQ ID NO: 158558 - DNA, 529 bp, Cannabis sativa
acctgagacctaagacttgaacctggactaggaccggcatcgggacctggacctgaccttgtcctaaaccctcaccggatcctgacactcgcaacccagaccaagatctagaccctgacaaggactcgaacctaaacccaaacaaagatagggatcgagccctggacctgaacccagaccgcgacctggactaaaaccaagactcaggacgtgaaccggaactttgaactagactaggacctaggaaccggacttggatggggcacctagaccaaggacctaggccccgaaacccagaccttgatctaaattcgggacttcaaactaaacaaggacctgacctagatcggggaatatgaagtcggaccaagacctggacatgaaatctgccccggaccaaaactaggacaggatcctggacacgaacacataccaggaccaaacccaaaactgaactaaaactcagacacagacccagaatcagacccaaacatagacctgcaccaggacccgaactcgaacccagacc

SEQ ID NO: 158559 - DNA, 655 bp, Cannabis sativa
ttttcttatgcttacacaacctatcccatgatagccaatgaattcctttgccaattttctctgaagattgccaacaaaactttgtcatgatcttctccatctctcgggtgatgtcaagagttagcaagaaaacgctcatcgcgtagctaggaagggattgagcaactgttttgatgagtatctctttccctgcacgtgacaggaattttgtttcccaaccttgaatgcgtttgcgaactctttctttcaaataacctagcacatccgacttgttgcgagacatggtactaggcaatcctagatacaaactattgactcccgctataggcataccaagtaaattgcttatgtcttcacgaaccgtcaaagttgtgtttgtgctgaaaaaaattgaagatttggagcaatttactttctaaccagatgccgattcaaatttgctcaatactgttggactcttgttgcctcagtccgagtggccttacagtagagatagctatcgtcagcgaatagcatatgtgaaattcttggcgcttcgtttgccactttgccaccatgtaatagacctctgttttcatgggattatgccacttacaaatttaaaactttgggtacttatgccattatttaccctaatatctatttacatatacat

SEQ ID NO: 158560 - DNA, 656 bp, Cannabis sativa
aattttagtaatgtattttaaagatagagtagagaagttgttggtaggggtgcacatcgggtggattttctagatttttggatccagattttggaatcttgggactgaatccacccgtatagaggctgaatttttggtccggctgtgtgttgagttcgtgttgggacaggttcaagtgggttgggttgggtttcgagttgggctataggcttcaatttttactttttaaatatcaaaattttaacaaaaaaacttcaaaataatacaatatcacttttgccagctcagttcgccattacgctagtaaaagtaacttttaccagcacatttcgcaaactgcgccggtaaaagcacatttatgtgttgaaaaaagttatttttgccaacactttacattttgtcctggcaaaagttctaataccaacgttgatttgccaacacattaaaagtaaattccattttaccagcacaataccaaacttttaccagcacaaaaaagtgctgacaaaagtgacatttcttgtcaagagttatataatatattaattattatcatacacatacacaaacacaatacacaattatacacagtaatacaacatattatcattaatttttattttacacaaatacattaattaattatacacaatctg

SEQ ID NO: 158561 - DNA, 691 bp, Cannabis sativa
caagtggttgagcagcacggatgacaaggccatcagcaaaatagggcattttgttgatgagtacttcatggtgaaggatccgagcatcacccagactcgatttcagcagatctcatcatatcactgtcctcccctcacccttgctcttagggatagagctaaaaaacttgcccggttgccggaggaagacaggaatatcatccagttgacctccgatgataatctggtgaagtatgggctttaccctgaagacttttctcctaagtctgtggcggggaagaagaggaagtctggtgctggccggcctgaacgaactcattcggagaatgagttgattcaactgaagtgagaggctaagttgaagtgtggtgacagggccaagcaatatgctcaagagcctttggatcttgaggatgaggcagaggctgaggctgagcaggtgaccccattgaagaggaagaagaaactcccggccacgccctggcctgttaaacatgctattcgcataagggagcccacttcacctgttcgaccatgtcccccctttgccgaaaaagggaaggttgtcatgtctgaaataaaatcgatgcaaggtgatgatggacttctgaatctctgtgcgggcggtcaccttgcattttacttcttttttgagcttcttaactttcatgccttgtgttttctgatggct

SEQ ID NO: 158562 - DNA, 656 bp, Cannabis sativa
  modified_base (30)..(32): a, c, t, g, unknown or other
  modified_base (476)..(485): a, c, t, g, unknown or other
ttttaattaatcacgattttcattaacctnnntgattagcaacgagctgcacaatgcgtttaaaatcacgtcaacacgcctatgctagttagggtgttacattgaggctcaattgttcgagtggcaacataacagtccagctcgctcaaatagctaccctggtcaagatcctgtaaatgtgcgcctcacctcagggagggctcacccacctggcacccaaggcagtttgcctcctttgaggaactgcggcaccaagctcctcagtgacgtaatccatgccctcaaccaggacatcgccatccgtgtctaccgactccccagccttgttgtatcccccaaagttttggggtgcagcctcctcctcttcctccgcctcggaaggactgtcaggacggacatctccttgttcctctatgtcttagacctcagcatccccttcatgatccccctcctcctgcatgggtggatcctgttcnnnnnnnnnnaaggtggcgtgctgggccacgtgagggtcatacgcgttgatgttacgcattgtctgtttagtgtgagccatcatcctgtggttggacgggaaatttgaactaaaatttatgtcgcttgaagagggtggactagaacaaagacgagggtaatcctcgtacaggagttgaagc

SEQ ID NO: 158563 - DNA, 518 bp, Cannabis sativa
aaaattattgttaaaaaaattactacacatataataatatttatttttttaaaaaaaatactacgaatgagatacggtgatgacataagtttaaaatatagtgacgactataagtgagatatggtgataacaataatttagatttttttagatttctttagtgtcctgtatagatttatcaattgtttaatattttatttcttataacttctaaaaatatatattattggaaataaaataatatacagtgtactttttataaagattcaaaaataagtatataagttaaataaggcttctacattaataatattaaatcctaagccttatataagttaaataaggcttatacattaataataacataatataaattaatagattattgatatagcgtattggtaatatttttttacttattatcttttatttaatttttattaatattgtgagtaaaaaatttaaacaaccgctcgcgaagcgcggtttgtttcctagttatttaataactaaaaatt

SEQ ID NO: 158564 - DNA, 507 bp, Cannabis sativa
ctaaagatttggcggcattacctatatggcgagaaatgtgagatattcactgatcataaaagtctgaaatacttctttacccaaagagatctgaacatgagctagagacgctggctagagttggtgaaggattataattatgagatcctttatcaccctagtaaagccaacgtggttgctgatgccttaagcagaaaggggcagagtcaaataaatactgtgaatcaaatatccccgcagttagctaatgagatgacccgagctaagattgagttggttgtagggcatttagctaatattaccctgcaatctactcttttagagcgaattaaagaagtgcaaatgcaagatccaaaattggtaaaaactcgagatagggtttcggctggaaaggctagtgatttttcagtggatgaaacgggaatgttgcgatttgggaatcgtgtttgtgtgcctatggatggtggtattaaaagagagataatggatgagtctcatacgactcct

SEQ ID NO: 158565 - DNA, 534 bp, Cannabis sativa
tttagtaatttggattagtaaaggcaattagcactaatttttgacatttttataattatttatggatttaattagctgtgggccccattgttagacatgggcattagagttttctcaatttcggagattttattaaactctagatgtattatttgacatatatgtgaattatgttatttttgtaatttttgctcgacgacaacaaaaaatgcgatgcatggctagtttgatcacatgggtaagtttaaaaccttattttttaatggaatgtatattggagaaattaaaataccggggttaagggggcttatggaattcgaccattttacccctagttttgagaaatgcctaggttataacctaaagggtatttatcaattttaatggtgggttaggtggctgcctaaattgttgacacctagcatattaatttctgcaaaggttaatggattaaccattttccatttagaggaaattaaagaaaaaagaagaaaagccaaaaaattagagagttcattctctctctctctctct

SEQ ID NO: 158566 - DNA, 600 bp, Cannabis sativa
gagatatcattgctactccagctccggatctgttttcgttggaggcatcgtccacaaaaactttccacgctgcattttgtggtgttgatacgtttgcactagcttctgcttcattgcactctgttatgaagtccgctagcgcttgtccttttatagaagtgcacggtatgtagtgtatgtcgtactggcttaactccatagcccatttgaggagtctttcagacgcctctggcttctgcagaacttaccggagcgggtggtttgttaatactttgatgggtgagcctcaaagtagggtcttaactttattgaagccatcaggaggcaaaaaactaatttttcaatcattggatatcgtgtctccgcccctatcatgcacttgctgacatagtacacggggtgttgagttttttcctcttcccggactcgggctgcgctgaccgcattctcggagacggctaagtatagtagcaagtcctctccaagaacgagtttgacaggattggaggcttggccatgtgttcttttaattttctgaatgcctcctcgcattcttcggtccattcaaatttttgtcatttctttagaatgttgaagaag

SEQ ID NO: 158567 - DNA, 563 bp, Cannabis sativa
ttgatttgattgtacctcgaataggcatccatgaagcttaatatctcatgtcttttggttgcatccagaacttgatctattctcaaagtgaaaaatagtctttagggcacgccttatttaggtcagtgaattcaatacatactcgccattttttgttcagcttaggtactagtaccgggttagatacctagtccatgtagaaaacttcaattatgaaattgttgttgcgcagcttttctacatcttcttttagttctagggctagttctttgtctaacagacttttttttttgttgaacgggccagaagtttggatcgatgttcagggcatgtgaaattatagaaggatcggttctgaccatgtcctcttgcgactaggaaaaaatgtctaggttttctcttacacattttatcagtgctgattttacttcgagcagcaaacctttcctaattttgagctttctagtcagaacaattgagtcaatttcaatttcttctaattcttccaccagcccaacatttgtatttggttccccaagtcagggatccacatctttgtcccc

SEQ ID NO: 158568 - DNA, 547 bp, Cannabis sativa
tcaatcctggacagacgggaagcatggtgaatggtgaaacagctcttgttactgaaactgcgcctggtgtgcaagagactgggaataaaagttccgcacacagccaaggcattcataacacgactattccgcctggaaccaactcccagacgaccatcggagacgcaattgaattgtaaaatctctgtgctgcgcttagactcatgcagagtcatagcaacactttgcatcatgatcaggatgaactgcgtgccgcagtgaatctcgcgtttgatgaacaaaggcatatgttcgctgaatggagagacaaagagattgaggcattaagggctcaccatgcagagatcgaagatcgtagtcagcaagctactgtgctggtacgaagagcctaccagactgtaggtcagcaatcgccgaacgtcattcccctgagagaaacggaggaagacccgacgatgaatgcctcccagacaaccaatggtcagttgtccaatccccggtcacgagttcccctcgtgggccaagaggtaggcgggcaaaccttgtc

SEQ ID NO: 158569 - DNA, 505 bp, Cannabis sativa
  modified_base (121)..(137): a, c, t, g, unknown or other
caagactaggaccgtagaccaagacccaggacgcgaacccacacccgtagcctgatctggaccaagacggatatccagactcgaaccaaaactcagaccaggactcgaactccgatcggannnnnnnnnnnnnnnnnaactaagaattgcaaatggaactagaaccgaaataggactaggaccaggacaaggacctgaacccaaacccgatcccagatcaaaacccagacaaagacctaaacccgaaccgagaataggacttgaacccgaacctagacgggacccaagcccacacaataaccaggacctggaccaagaattaggatagggagatgggaaacagaactaagaccaagacctagtacctgatccagacccgaacttgaacctaggaccaagctcgtgacccggcaccagagatggaaccacactagaacccgagattgggttccagatctggatcccgggcttggacaaaacccgtagccagtgtctggatttggga

SEQ ID NO: 158570 - DNA, 543 bp, Cannabis sativa
  modified_base (27)..(28): a, c, t, g, unknown or other
cggtctcggcattcctgctgaaccgcnngatgatgagatcctttcagagatagcaattattttgaaaatctcttcacctcttcccatcctacagaggacaacattaacattcccctggaaggcattgactcaagggtgagcaatagtgacaaagccatgcttagtgaggttttctcagagatagaaattcaaaaagctttctttaagctcccctcggacaaagccccaagagtggatggtcactttgggggaattccttaatttgtggctttaatatttttaaatctgttgtttaattttttaacaagcagagatctctggtgtgtctcctgatgtgtcactttttttccttgctctttgtgcatgaataatgtctagagattggtttcttctctctaaatattgtttgagcttattaagaattttgtgtcttctaatgttatggttgttggcaaagtgtcattggttgattgtgcgtatgcactcaattggtcacatgttattgtgcttgtttctggctctactgctacacacactactagt

SEQ ID NO: 158571 - DNA, 672 bp, Cannabis sativa
  modified_base (234)..(245): a, c, t, g, unknown or other
taacagggtgagttccttgaaaccctcccactacgacaaggtaccgcgactttctatctaagaacatgagtggtattgtcctcatcggttgtatcaagacaatagaggcagtgtgatcagcttatatagaataaaatgatagaaaatttttggaaaaattatctcctcttactttgctactttattttcagacttagtcatattcttataaaagtagtatttgttgaaacaaannnnnnnnnnnnttaatgaccataggatggtccacctctaatcacttagaatagctatcaaacatgcaaatcttagttaacagttctaacttttcttaagttcaagatcaggacatccttgaatctagtaatggtttgcactaagtacacaaccattccatttctaaatttttcctatcactacggtatttccctagaaggacttaggaagctgctagtaactaataatcataaaccttatactatcatcaatatgcaaatcgaatttctgggaatgtaagtttggattcaattcgaagttcaactcaatgatctttgaaatttttgatatccaccaaatattccaccacccctattagttcgcaagatctttaaccatttaccttaatatttttccaacattgctagaaattcatgaaatttctcaaacatttcaaat

SEQ ID NO: 158572 - DNA, 592 bp, Cannabis sativa
  modified_base (425)..(429): a, c, t, g, unknown or other
catacagtttgaatccattaacaaaaaatggatattaataacttgtgaaagttgaacagtattctattcttgaaactgaattaaaaatttctatttggaatctaaaatttaaattcaaagacttaaatttataccaaatatttcttgagttattattctctcttggaccaccactactaatctaactctatattttatttgcctaaagtaagcatatacaaataggagaatctaagatcgaggatttattttatttcgagatagaatgtcaggaatatagtcatttgtgccatttaattttataagagaaaatagaatgtcatcataatcaaatgatttataaaccattcatccaataatatactatttaagcaaattcgaaatgaataagccaagagggaaaattaggataatttcgattaaannnnnaatccaacgatgtcccggtaggcgagagtcaaagttatacttattttacacgaaattttcaactacaattcataacagaaaacaacatggttcaatataaattcacacacaattcagaaattattaagcatttagcaaacaacaaagatatgtgaaaatacaa

SEQ ID NO: 158573 - DNA, 762 bp, Cannabis sativa
aatatgcccagctgtccgaaagaccgtacgctacaagcctaaccgccccgacatgtacaatccttatctgctcgctctcacggctgctcaaccttaacctacacatgcaaataaaatttgtgagtcgaaagactcggtaagaaaagcataatcaataacatagcaataacccaaattatagtcaggcgcccatacacccaaccataaccatatccccgtgttcaacatggtaccgagtctagaaagttcgtacgacaatactatcaaccataatatcagcctataatcagtacactagtcatactctagccatactaatgtgatagcgtcgattaatatctaagccaaacatacaactactagtatctaatataactctacgtatattgataccactatcgatataatctaacaggcgtaataaacatgtatgttaaacatgtaaacacatatgcacatcattatactaatcttatcttgtttctgaatttaggtgtgccagccaacctgagtggaacagttgctcgatgaattacaggccctaaatcacataatttgtaaaatagataagggacacgctaaatcacttattgacaggcccggccctgggctaaggcagagtaggtccaggcctagggcccccgaagcccaaggtcccaaaatctagtttaagtgttggttgtttgggctcaattttgtatatatttgattagtctactaacaaagtaacaattatgggaatataattgtgtacaactaaga

SEQ ID NO: 158574 - DNA, 581 bp, Cannabis sativa
  modified_base (27)..(40): a, c, t, g, unknown or other
aggatgttaatgaaacatacatggtannnnnnnnnnnnnntggtaaaatatttccaacattattaagttatgacgtcactagttatattgattcacgtaaattaatatttaattacgtccttaagatgaccagtaagttgtaccatgaagagccgtaattgttatttctattataaaagtcagcttcatttattgttttgaggatacatctcgtatattgtattacagagtttcataccaggcctagagttcaaaattatatttcaagccattaagaaaattttgcaaaaagtttaactatagaatttatggctaagaactataatagttctgatagaagctagcatattaacattaagtacttagccataaaaaggcgtgataagtggtcgttaattagcacacaatactgaattgcgtgaccgcaatatccttgactaaaggcatgtcgcaccacaaatttaagaatagtacagtaaatatgggattcagttacccctatgcaatttttggttgtacaactaaaattattcaataaaactctaattttaatattgtctcatattcatgtacaccttaat

SEQ ID NO: 158575 - DNA, 878 bp, Cannabis sativa
ctccgagcaagttttagaccggtaatgagggattcgtactctacttcattgttggaggctctgaactcaaatttgaccgccccatgcaggtgttgcccccaggcgtgacaagggcgattcttacaccgaatagttgatctgtacctgacccatctacgtgtaacttccatgtaggtttatcttcattggtgcttggctgaggttcttgcattggctatgggttgccttttgaaatgctttcttcttttcccgtacagtcaactacaaagtctgctaaagcctatcctttaactgctgttcggcgttgaaaaattatttcgtattgacccaattccaccgcccatttgagtaaccatcgagaagcgttaggtttttgtaatatttggcataatggttggtcagtgtatacccgaataggatgagcttgaaagtagggcctcagcttccttggttctaagattaggcagtaaggaagcatttctatcagcggatatcgtccttcatcttcagcgagccttttgctaatgtagtaggccagatgctggatattgctttcttctctgatcagtacgacacttacaacgtgctctataacagctaggtatattcctaattcttctccatccagaggttttgagagtataggaggttttccaagttgtctttttagcttttgaaaagcatttttgcactcttctgtccattcgaatttcttatttcctcccaggatgttaaagaaaggaacacacttgtctagtgactttgaaataaatctactgagtgcgactattcgaccagtcaagctttggacttctttggtttttataggcgatttcatatccaggagggcttgaattttttctggatttgcttcaata

SEQ ID NO: 158576 - DNA, 595 bp, Cannabis sativa
  modified_base (75)..(91): a, c, t, g, unknown or other
  modified_base (432)..(435): a, c, t, g, unknown or other
gctaagctcgcgcttaggacccatccactttaagaatctaaatcaaaaaattacatttttaaatatatatatatnnnnnnnnnnnnnnnnnaaaatattatttatctttatagtaagagggttatgaatactaactaactaaatgctcgagaaccacaattttctgaacaaatcaaaatggatttcattttagaatctccagttaaatagattttttaccgaccataaaggtccccccaactgagcatgaagaagaagaaggaggaggaggaggagggggcgacggtagggcaatgagagagagagaacgagaagagaagaagaaaaagagggattggggttttttttttatttttatttttttaaaattgtatttttaatttttaattttttaattttttaaaaaaaataattaattttttatttttaaannnnttaattttttattttttaaaaatatttatttacgtggaccaataaaattgtgtccttgtacactgcgtacacgtgaacattccaacttggcacttaacacccaaaaatgaatggaaaaggctaagtgctaacagaacttgggtttaggaggttttaccac

SEQ ID NO: 158577 - DNA, 584 bp, Cannabis sativa
gcatttgtctgtggctcaggaaataaactggctccgggcggcaacctttccggttaagctttgtacgtctttatacttcttgggagaaggcatgttcaggagggcttgaattttttatgggtttgcctctatccctagctgggtgacaataaatcccagaaactaacctgatttaaccccgaaagtgcacttcttcaggttaagtttcattccacatgtctgaaccacttcaaagcattcctcgaggtcatctgcatggcttgcacatgcctttgatttgaccaacatgtcgtccacatacacctccatgtttcgtcccagaaggcctttaaatatccggttaaccattcgttgatatgatatgttgcaccagcgtttttttttttagtccgaaaggcatgaccaggtagtagtatacccccttatcggttttgaagctagtgcattcttgatcctcaatgtgcatcttgatttggttgcagccggcataggcatccatgaaggacaataactttaatctggaggtagcgtccaccattttgtcgatccgcggtagggggaagcagtctttttggcaagccttg

SEQ ID NO: 158578 - DNA, 591 bp, Cannabis sativa
ttgtttcatcttttttgttttctagcggtcaattgttttagttttttaattttttttttattcttttattttttaatatgccattaggcttttttttttttttttgtcagcccttttgactttctctagctctgttttagttttaattttttttttttcttttgtttgtttgtgtcaacaacttaagtttttttttttatttaattttaccatactttttaaaaaaattataattgcatcataattatttggaattaagaatagtatcatcataatttaatgtggtctattatttttaaagataatgtggtctattttaatgtgtagaaaataatttttaacgataaaatatttgaaatgaaaagcaatattgtagtttatcttatattttgttaaccaaagaaatatatttaaaatttagtatatattattaaaaaatgggcaatttacactaatgtatacattatataattttattacaatatatgtgtataagagcatcttcaaagagacaccaaatttggtgttacactatcaccaaatttggtgtcaaaaattatttctactccaaccacaacactaaaaattaca

SEQ ID NO: 158579 - DNA, 765 bp, Cannabis sativa
gttatgcagaaatataaaatacaatagggatatcatttgctatttgctgaatatgaaaaactgtcttggagtaacctagtttgggatagacttattgttccaaagcataggtttatcctttggctggtgttttgggaaaggctgaatacaaaagatagactaagtaagtttatggccaacatggatgcaaagtgcttattctgcaacaaggaagaggaaaccattacacacttgttttttgagtgtgaatacaaccgaagcttcttgcaagaaacgaaaaaaagttcctgcaatggaacacaccagcaatcaacattcagcagctacttcaagcttgcaacaacacgaaaaagattatcagcggctaggaagagtatggtgaagactgtacctgcaagtttggtgtactatgtgtggaaagaaaggaatgaggtgttatggaatcaacaacaatggctcatcaacaccacggtcaagaaaactcaacaaatgagtaagcttagaatcaaggggctgcttcctaaaaaagctaaggatgaagataaagcatggatattaatgacttgaattgtatagaatcaaaatgtaaatgttttgttagtaaattgtaaagattagtgatgtaaaagtttggttggagcaataaaatttcttattcatcaaaaaagaaaacctaacaaaataccctagtgataggaaaatttcagaatgatggaatggttgtatacttagtgtaaaccataagtttgcatgtttgatagctat

SEQ ID NO: 158580 - DNA, 543 bp, Cannabis sativa
ttacacttaaatctttatatcatatatattgatctttttatgtatgagctacatgattttattgagtatttttttcagattcgtttggtatgtcgtattacatgtataatattatattaaattgtattttatgcaatatttttatataaaattatatgtagtattaatttttacggacacataaatatataatatttagtataaattaaaatttaatatagtattatataaaaatatgatgtatatactctaatttaatataatataatacaatataatacgacctaatacaccggactaaaccaaccaacataaatcttgatacaacagtcaatatacaattaaagataagatttataaaatgggaaatttacatggtatactaacttttgctatttttttttcaaaaatactgcctagcgatattttttacttctttactgtgtttttttataagttttatactgcagtatactgtgttaagtttttactggtattttttagttgttctactagtgttatttttgaaaaattttccgtgtg

SEQ ID NO: 158581 - DNA, 885 bp, Cannabis sativa
aacttctttatagtaaaagataattaatgagaactatggggaccccctgtttcaaaatattacaaactagtttattattgctttttcaacataaactttgcaattcctaaatactatgaaaattgagcatcctgttcactgggcattgccactgcagctgatatgtacattgctgctgcgacctcgaactcatggctgttcaacctttgccttccctttacctgcaccacaaagcacccgtgagtcacagagactcagcaagaaaagtgagtaaaacaataaccgataataatcatcaattttatctcatatcaacatgcttatacatttacacaatatcataaacacacaatcctggtactttataaagtaccctcataccacttgttaaccacgagttgaatatgtcactatcgttgcctgatgaagcaatcgataagtaataaacctatctgcagtttcaggagtaattactcataacggtattaaccgtctccaaccctaggtcataacctaggctcaacaaatatctaatcaaagtcttgataataatcaaggccataaccattcaaccattgatatttagccacacacggtgcttaccacttttcttacctcaattcagaactcaagtgtgcgggccgaccttagtgaaacgatgctcgataatctcgggtcctatgtcacgacaaaagtaaatcaataagggtctattccaaaacactatctaaaacatgtataaaataatctagggttttctactgaatcttatggtgaaaagcccttaaaataaaatacatattttttctctaatctatgtctgatactgtagagctcttcaaaagcttcaaaatggtataaagaatgtctaaaacggacacccga

SEQ ID NO: 158582 - DNA, 567 bp, Cannabis sativa
ataataaatgtctaacagttggtatcagagcgattttatctctgccttgattgtatttgagtttcatatatatatatatacacatatatacactcggtatttatatatatgttatatatctgtttttcgtatatacattcatatatatatatatattcatatacattctgtttatatatccattcagtttatatatatatattcatatacattctgtttatatatacattcagtttatatatatatatatattcatatacagacacatatatatatttttcttcttttcatttcattacgtatatatatacatatgtgtttatattatatatacatatcatatttgtttatatataaatgctatgtacaaatatatacatatatacatttcatgtatatatatacatacggtacatttttatttttctgtatatatatatatatatgtttatacatgcattattacattctgatcaatacactcatatattaatatagattgttctaagcatgaaaactcattttgaaaaacaaagaaatctcacaaattttctggaaaaagttttt

SEQ ID NO: 158583 - DNA, 516 bp, Cannabis sativa
  modified_base (475)..(483): a, c, t, g, unknown or other
gattcaaaaactaaagcatcactgcttaatcgtttttgaattgttgttattgctggttcaatctgttgtgaagtaagatctgaggaagtggcatcactttctctaatcttctcaactgagcttgaagcagtaggattgttggagttatgaactctttgctttttagattgaacaattcctagcttagctgctttgtggaatttcatgttgatcatgagcaagtgtgaagtattactctgacaaggagtcttattcacactttcaagttcattcctaaaggcaatttctagatgagtgttgggatgtgggttgtacattttggcacttcaaatatcaataaatagaagtaaactttttggttcaataaattcttacacatgttcaaaaaataaaaagtaatcaaatatgtttgcaaaataccaaaaaactagacatatttattattttccaaggtttccaacataatgaaatacannnnnnnnntaggcgagagtcaaagataacataagttgaata

SEQ ID NO: 158584 - DNA, 539 bp, Cannabis sativa
tatgtatggagctaggaggagggtatcacatttactttactaataggatgtctctctttcactaatcaatatttaaagaaattatagcctattctttttatacgattattttatagtagacatcttactaacttttaaaaaattatgaacaatttataataaaaaaattgtaaactttacttgtttactgaaatttttagaaattaataaaacagaacttaaaaaaataaaataataaataataataaacttttacatagtttgggcgttaacaatctttagtccacgagttagttgtatttaccttacaaacgagtgtttgaataatacaagcgtttacagtataaagcctatttctgcactccttttgtttctcttgaagaaaaaaaaaagctagtaggaattttagtagagatgcagctagtataaaattactcaccctttgtacataaaaatgagagtatttatatgcatacatgtgttgggttttgtgccctaactaaaactctatttcaatgtaatcttgaatattcatttat

SEQ ID NO: 158585 - DNA, 624 bp, Cannabis sativa
aatattaagtataactaccatatacatcattcattttctcataaaagtatttaataataaaatttccaactactataaataataataataaaaaaaaaaaaaacaaactatctagtattttttttgcactcttgcctagtgttataaatataagttagattttttgacacgatacgaaatcggcacgaatttgagagttaagaggcacacgagcaacgtagcacgtaaaaatatgtgctcagacacaacacgatacaaaaaaaatatgagattaagcatgatacggcgaaaaatatgatcttaagtatggcacgacacgatatgtaaacacgaatagattagctcgaaagcttaacactttaaaaaatctgataatttaataataatgatagtaataaatatttatttatcaattaaaattataataatgttaaaattttaataattataattattttttttatatgcttgtgtgtaactatattaagtaaatatcaaagtaattaaaattatgaaatgcatatatattttattaattagctcatcaattgtattaggataaatattattttggaccatgtgttttgcaaaagttactagttagactatttattttgttaaatg

SEQ ID NO: 158586 - DNA, 720 bp, Cannabis sativa
aaggaaagattagcgtacaatttggaataatctctacttgacttggtcgtcgaccaatagagatctattttctttataagtaaaatatataattatataacaaggaaattaaaatgcaacttaattggttatcgtttaattgattattatgtattatattacaatatttctctagttatatataattaacttgatattatatacttaattaattacctaacggactagtactggttttcacttatataattatattataactaatatatatatatgttctgtactatagagctgtggcctgtgtgcctatatatacaagaacctaattatgtttcctcgaccatttatatatcatcaaagcatatatattacaatctaatataatatatggccacaaataatgttctgctacttttctttgcgtcttttctccttatgacagtttatactgctgctcatgcaagaatcttcttaccaggtaaaataacaattgttatcaaattaattaaccaatatatttatagcttcctcggtatattttggtcagtttatattacattttattcaatttaatataaaaatacgaaaaatttaaatgtaacccttttccaatcaagagaaaaaaaaaagggattatttcacaaaaacatataaaaacaacaaaaaattacaacaatacggtttcacagaatttttaacatttttacgatttttttgatt

SEQ ID NO: 158587 - DNA, 625 bp, Cannabis sativa
gattttgtagctccacccctttctgataactttctggcgatatcgtgtaccgttttgacaaacagttagcatgggtgtgatctactcgtcgtagtggtattttgatatacactacccctattttcagcaacgtttttcggtacactaatttttactgccactgataattaatgtgcactacttaggtgaggtttctgaactctaaactttaaatataatcatattataagtcgttggacttgatttggaatgtaaaatgcaatgatgataattatttagccatttgatggtataagttagagtaatatctaagattggactaaacaattggagctcgaaacttaagagcttaagatcgtcttttggacaaggtttaacgacttgggagaggtagggactcaacttaattattggacttaatttttatatgtgttgtataacattagacatattctaaatttttatgatttgcaaattatttgaaaaattgaaaacttaattcacatatttttctgcactctttaggggcaccgagtgccaaatatatttttgtacaaatatttatacaggttatgatttttgagtttattcaaaatacaatcgttatgttgccgaattttctaga

SEQ ID NO: 158588 - DNA, 558 bp, Cannabis sativa
ttcttaatgtcttcttgaagctgagcaatatgtttcttcacgagttcaacctcctgggaccctgcagcaaaagccttcgagaacatgaccataaattgcgtagctagctgcgcggagcgaggcagcagctcttcagtaggagtcttgtcaatctttgactgtaactcatcgctgacaaatctctcctgaaggtacaacacatggcgagctcgaacagcggggtcgatcacgactttcttccctttctcttgaatgcccttagcaagcctcttggaagagtctgcgacaggagtaaccaccacatcgcttttcctcttctgagaagcgataggggaagttgatgttgtcccaggcttcaacttgcggttaagaacaggagcagacttcaagaaagttatttctgcagttacaacaaaaaataaagggttaatactaacaaggatgaaatcttaaacaccctagtttacgtatgcgataaaatacttgatgatggtcgaggagtttgcttggaaagacgtttatcaattcgctcttgttgcttttcagaaggttccttat

SEQ ID NO: 158589 - DNA, 505 bp, Cannabis sativa
agcgagttaaacacctcgctgtctgtcatcttaacccaccaaactatttatacttagtttgtatactgtatcatatacgctaagtatttttattgttattatatctcctccacgcgacgaggttaattgcctcgtcacgcacacttgcgttggcatggtttctcgtcgatacacaagttaacacttagtacatttttgtcttgcacgagactgttcagccagccgagttataaacataccctgcaaattgtatttttaacgagttatcccatgccaagtgtacttacgattgtgtgtttaagtccttcgttcttcccggcttgacatgtttcttcttctaatgtgcttatcgaattttgagtataacacttagaaaaatttggagcaaaaccatgtaatgctccagtgaatctagttctacatttgatagacctcccgtgacgtatgtgtaagctcaaaggagtaggaagtctaacaaggtgtctgccacagggaataatgtggc

SEQ ID NO: 158590 - DNA, 582 bp, Cannabis sativa
tttcttttcaggaagagtcacaagtggagttggattaggatgggaagttgaagcattagagattaattcttcatttgagagtggaattgtatcaaggaatgaagtgatgttgtatttccatcgttcagtggagtcttgttttactgccttgatgtaagctagtatctgtttgttgtcatggagttcgggaaattcgttaggaatgttgtcacttgcttataaaataacaacttaatttattattaagagaatgtttgaaagactaagttgattattttatcttaagtaaaaatatatttgtgaattgagtgggaaagccttaattttggtattcatcagtgttgttgtgttacatgagaacaatgtttctgcaatttccccaaatacagttgttgtaagcggggctgatgaatcagtaagttgaacatctattctgcatctacaagatataagtgttagtaaaaatgtaatttaaaaagaaaaaaacttaagaaaatgattaagtcatttaattacctaggaactgctttgagttcattatttttgcaatgtagacagtgaaaagtttccccatattcagat

SEQ ID NO: 158591 - DNA, 601 bp, Cannabis sativa
agatttcaattcgacacgtcaaacaacgaggttgagtatgaagccttgatcgctggattgaagatagatgaagtgttgaaggttaaaaatcttttatgccttagtgattcacaatagattataaatgaagtactaggggaataccaggctaagggattaaaaatggcaaagtacctagagaaggtttggaagaacttggaaaagtttgaatatttcaaaatcgagcaaattccaagagaacaaaactctaatgctgatgccttagaaaaactggcctcgcagaatgaactggatgaattgaagttggttctagtggagatgttaaacgagccaagtatatgtgagaaagaagaagtcgagatgatagatagctcgcctgcctagatgacacctatagtttttaatcttctcaacagacaacttccaactgacaacaatgaggcacaaaaactcctgtatttagtgtctcgcaacacgatagtgaagggaaaattgtatagaaggggctattcaatgcctctcctacggtgtgttcttcccgcaaatgagatcattagagaaatccatgaagactttgtggggaccatgcaggttggcaaag

SEQ ID NO: 158592 - DNA, 617 bp, Cannabis sativa
tgtgtctggctccaggcttcgaagaccccgtagttatggttgggcgtctcctcgtcccgaggcgaccggtggtaggtctcggaggtcgtaggcttgatacccgccaccaccacgatctgttccagctggtgagggcaagtcagggtagaatgaagctcagtcgcttcccacccgttggcacgggacttgtgctcctcttgggccataggacccttcatgacctcctccagggtggcgagatgcttctcccctttcttcgaagacttagaaccggatgcagacattttggttctgaaaaagattgaaaaaatccagcagtccggccccaaaccaaaccctaattcaaaaaagggaaggggggtcccctaaccgctggaaagaggctccctccggacacttgtcagaaagaaagcctcaaaaggttttccttgacacaagtcgggtgcaagaatcccacagatggtgacattacgaataagcaaagagaaaagggaaaaggagtaaaaataaaaaagatgaagtctactctaaacccttgagtgtcattacgtgagaaaaagatgggtcctcgacaaaaatacgatgaaaagaagtaattcaaacacaaaaaaggagga

SEQ ID NO: 158593 - DNA, 536 bp, Cannabis sativa
accttggcgctctgataccaaattgtcacgccctaactaattaggcatgctacccaagatacttaagaaaacctaatcccttaaatcggattactaatagaattagcacggaattaaacttcaattacaaatggaagaaaagtaaacttgtagtaatttaaactttacaaactaaaagttttatgtattgggatcccaaaaatacttacgaataatattacaagttcattttcactagccgacctaggcgacaaaacagagtcacaaaatacatcactggtagaccccaactcgcttggtctagtatggcccgaacatgtacattcaccgtccaactcccacactcatggctgatcaaaaatagctttatcctttcctacacagtagagcacccgtgaaccaatgcctaacaagacaatataaaaatatcaatcacatgtttatcacactatataaacagtaatgtcattctcatatgcctgtatgacacagacatgcatgttacgctcacgtgcctatttatgtctacgtagcgt

SEQ ID NO: 158594 - DNA, 1044 bp, Cannabis sativa
  modified_base (640)..(645): a, c, t, g, unknown or other
  modified_base (746)..(749): a, c, t, g, unknown or other
gtttaacaagtttactcatcatttaatcacctcttggaagcagctgtctagggattttaagaaatagttccagaaagctagggatagacgacccgaagcggcctcgctaaccaatataaagcagcagctcggtgagacacttaagacgtccttaagttgttttagcacggctgcggctagggttaggaatttggatgatagcacacaacttacagcccttcaggcagggatctctactaatccattgaccgcatgaggcgagttgtggaatgacttacaaggtcgtccagtaagaagcatcactgagttcaatgaaagggctcatatattcgttcgaaaggaagaagcccaaaaagaaatgaatttttttaaaacaagctcgagaagcaaacccagtaatgtttcaacaagtaccgtttccacgggaactgataactcgggggcttctggttcgaagagaaaggacagtaccaaggaaatgtcgaaggataaaaagaaacagaagaagcatgataagtacgtgccagtttattctatttgtactgagcttaatgaaactcgagagaacatttacctcgcacatgagcagaaggttgccttcggcaagcccgagcccatgaggaattcgaggagcaaaagnnnnnntaacaagtattgtaaattccataaggatattgggcatacgaccgacgaatgttgccaactgaaagatgagatagatagtctcattgctcgaggccattttnnnnagtacgtgaaaagacagggccagggatacaaccagcccagtatgcccaataacccaaacaagtaggggttacaatctcttcctgttgaaggagaggacattctggttattttgggaggcccacatatcacaggggaaagcaataacgcccaaaaaagatatgtgaaagttataaggaacgagcagtcaacatgtgccctagaatcttccaagaaggtgaaaactgaggaacctcccattgtattcacggaggaagatgagaaaaatgtgaggtatcctcacgtcgatccattggt

SEQ ID NO: 158595 - DNA, 509 bp, Cannabis sativa
  modified_base (50)..(51): a, c, t, g, unknown or other
  modified_base (457)..(467): a, c, t, g, unknown or other
cccaagcaaggcaagtcgaggtacatctacttctctcaaccaggcttcanntggttgacgggcacggacgatacaaccatcagtaagattgggtgctttgctaatgagtacttcatagtggacagcacgggcatcactctcatttggttccagcagatttcgacctatcaccgccctcccgtcacccttgctcttagggatagagctcaaaaacttgcccggcttctgggggaagacagaaatattatctaggttacctctgaggataactttgtgaggtacgtgctctatcccaaggactttactcctaagtccatgacggggaagaagaggaaatctggtgctggcccgaccaaacgaggtcatctggagaatgaactcattcaacttaagcgcgaagttaagtcgaagggaggtgcaaaggctgagcagtacgctcaggagcccttgaatcctnnnnnnnnnnntgaggaagagcaggtgactccactaaagaggaagaagaaact

SEQ ID NO: 158596 - DNA, 565 bp, Cannabis sativa
ggccactcattcctatgtgggcccaaatttatgataaattgggtatactatatgatagttatgataaagggtttggaaccctacttcctaccggagaattttttatctccaaaaggtgggttaggtttatgttaataaaaattgaggatagggagttgagtgttgatttggtagattttgatgttatacttcaaattgatttcttttccaagtactcagttagtattgattgtaaacagaagatggtgatcttcaaacacgagggagaggaatcgtttgaattagtgggatcagtttagggatcctgagttccaataatctcaatatttaaagctagagaattattaaaagataggtgcttagggtttctggtagtgatattggataccacacggcttgaatcattttggccagaggacatgagggtgaatttagatgtttttcctaatgaacttccaggcttaccgccacagagggaaatgatttagcacctatagtagaaccagtttctaaggcaccatacagaatggctccagcagagcttaaagaattgaagattcagctt

SEQ ID NO: 158597 - DNA, 751 bp, Cannabis sativa
ccctagaggttactcaaactctggaattagggaaacacccaaccacgacactaaaatggacgaaaattgagaaaatgaagtgtttggggatcctgccaaaacggactagccggttttaggggtctggtaaaacggactagccggtttgcaccagtccaccccaaacatttcattctttgctcaattttccaccaaataccaccaaactttccagagtacctaatgaatgcataaacaacatattccagccagtaattcataaaataactcaataaaacaaattatgccattagagatcaaagcattgaactcaaagctcaaacttgcaaaaaacctaatccaaccatcaaaaccatctacaaaaagctaataccaacttaaatgaaccctgtaattcgaattacacaaaagttaatccctaagagcccctaatccctaaaaaatcataaactcaacctaaacttaaattcaagaactaaggtaaagagatgttagggcttaccttggcttgatttccccttgaattccttgctgaaagcactaagaatcagcaaccaattcccgttgctttggcttgttcgaagagagaaaggaagggaagagaggtttccttcaatcttttgatttttagcttattttcaatttttctttctaaatgaaataaaggtttattcatttaaaccttggctgaaacttattttgctaggtgtcacaagactaggcagctacctcaacccccactttacaaagt

SEQ ID NO: 158598 - DNA, 689 bp, Cannabis sativa
  modified_base (136)..(136): a, c, t, g, unknown or other
  modified_base (224)..(226): a, c, t, g, unknown or other
  modified_base (430)..(438): a, c, t, g, unknown or other
tattccaataattcaagctcaagtggaaagcgttcaagcaacaaccacaagcaaggaaacaggaagaaaggaaagttcactgataaatcccgatagactccccgaaagaatcatgccaaatacactgcattcactnttctgactgaagatatagaaagtgtatagatggaaactcagtcgttgatcccgtacaagaagcccgtgcccatgaagaaagataccannnaaagggacatgacaaagttttgtcgattccacagagactacgaccacgacactaacgaatgttacaacttgaagcgggaaattgaattcctaataaggaaaaacaatccgcacttgcagaagtatgtcaagaccaaccaaggtcaaaacaaccaagatttgctacctccaccaatagatggacacttacaagtcattattggannnnnnnnnatttctggagattcgggcaaagcttgggagaggtatgcccggacaacacagcacgaacaagtagaagtcatcctagccgtggaagaaaggaagcccaaagaagtgcaaagcttaactggacggatcaccacactcagcagatttgtgtcaaaatcaacggacaagtatgtccaattcttcaacatcctgcgaggaaacaaacagttcgagtggacagaagaatgtggaagagattttcaagagctaaaggc

SEQ ID NO: 158599 - DNA, 510 bp, Cannabis sativa
ttttgtaaaatgattttgtaacgctgtaatgcttaggcatgttataatgactttttaattagagtgtatatttttcttaatcaaagggctttttgaaaattgtgataaattaaaattttgatttaatttttaactttaaactatatacatatatttatatacaaaattggaatccctttctttttaactttacattcaaaatagcttttatagacaagtcgcacagcgaccacaaaaatgaagcccaagtcatccagagactgaacttttcaagtcgcatcgtctcgacatgtacaatcatctccgagctcaaaactcactgttgttcagctttagccttccctttacctacacatgaaagcaatatctgtgagccaacagatagtaagaaaaacatataacatacattatattatcgacttgtattaaggtacacatacacctatccacaaggcttaacagatgattaagaacattcttaacaaaagtacgacctttgtaccacatgca

SEQ ID NO: 158600 - DNA, 623 bp, Cannabis sativa
cctataaaggtctattaaaaaattgcattttattaaaaagcatcgcctattttttttactacaattttaaaccgtcaggaatactaaatttttcccgacggttttaaatagtcacttaatttttttagcgacggtccccgaaaaaaatcgtttttaggaccgtcgcgaattctaatatttgtagtagtgtggaaatgagaaatacaaagttatgatattgacttctataacttcatggatctttgttgttgtaaaaaactagatagacggttgaaacaacatcagactcggataagcagaatccagtgcaccaggccatttgtcaacctaggcactgggtgcttactcttgagctcctaagatctcatatttgatactttcaagaattctgaacttgagtatgaggtctcctaccctatttttgaccccattctgtggattcattggtcgaaaattagattcgacatttgagcaattgaaggcactgtcccaggttggcactaggccccatttcctagggcacgtgtttgtgatttttttccttgagttttcttgaattttctttacttttgatgatgaaaaaaattcccagaatactttttggtgaacttgatcaacctggg

SEQ ID NO: 158601 - DNA, 596 bp, Cannabis sativa
aaaaaaaaaaaaaaaccaaacttatttatagttataaactcatatcttaacaaataaagaaaaataattaaaaattcaataaaaacataattttattttgaaaaaagttagaaattaaactaaaaaatgttatatttacttaaacaaatctacattttttgagaaaaacaaaatagactcaagtcaagtttgttcccgtaaaatttagtttttacaaaaaattaatttttaatatattttttttaatatctaaatgaattttttaataaaaactaaaaaaaaaattaaatcgctttattagttttaaaattttaatttcttttttaattttcttaatcattcaaaatgatttttttttaagatctaaattaattttttaaaatttactaaaaaagatgttgaatatttctcatttttatttagaagggtacgatttgatagttgtcaaagtttagggagcaaagttgttaatttacaaagacgtgtcagcatttaaatggaatcacggacggaacctaatagaaggactaaatttctgcaaatgtaaaagttcaaggggattcttaacaattcgtatattttaagaggcaaaatca

SEQ ID NO: 158602 - DNA, 540 bp, Cannabis sativa
agatggctaatgacatttcaaatgttgttccttctaaatcagttcctaagacacccgtagaactatggaatggttgtatacctagtttatgctattatagaatttgggggtgcgatgctcatgtcttaaggaagaaagaaggcaaactagaagcgcagacggagatttgcttgtttgtcggaaaatctaaagagactaggggtggactattttatagtcgaaaggatgataaagtcaagctctcccagaaaacgaagcaacctcaaacttgaatagaaaaactcatatttaattcttttagttataaaaatataatttaataccatttaaaaataattaattatttaaaaatttattatacaagaagaaaattctaatttatgtaaaaagaagtctaatttttgaaaaaaaaaaaataaagtttcattgtaaatattataattaaatgacttaattgtaaaaataagcatattagggatttatataagaaaatatttataaatattaattgctaaaagaggtcttgttaaatattcaatt

SEQ ID NO: 158603 - DNA, 621 bp, Cannabis sativa
  modified_base (70)..(72): a, c, t, g, unknown or other
ccatcaagaaaatagtaatattcttgccccgccaatctgtctagcatttgatcaatgaagggcaagggannntgatcttttcgggttgctttgttgagtttcctttagttgatacaaattctccaaccagtgactattcttgtgggaatcaactcattcttttcattcttgatcacggtcattccacctttctttggaactacttgcatcgggctaacccacttactatctgagatgggataggtcactccagcatctaaccacttgactacttcttttctcacaacttccttcataggtggattgagtctacgttgtgcgtcgatcgttggtctggcattctcttccatcaggattcgatgcatcacagttgaaggactaattcctttgacatcacccagtgtccaagcaatggccttgttgtgagctcagagtacccacaacaatctatcagtttccacatcagaaagagaagccgacacaataactggcagctttttgtcttcacccagaaactcatattgcaagtgactaggaagcaccttcaactcaagctctggaggtttttcagtagatggcttcagctcttttggaactactcccaactcctcataatacctt

SEQ ID NO: 158604 - DNA, 536 bp, Cannabis sativa
taaaaattaaagattacgtgagtagatatcggcccactgtggttgccatatcaagctgccgcaatgaaagttggacgtcaaccagtagcagtcgaagacaaacaactaaaaccaggattactatacccggaacccctgtatgtgtcagggattgactctgaatattgaaataattgtgggagtatgttggggattgaccctggacatcaaaactcgttttatcaaaaccagatgctcctggaagattgataaaataaataattgaactggggaagttcttttgagattaatgattgtaaaatcacattactgatgaaatattttgaattccagttgtgaataaaataatcatttctttcaaacaagtaattataaagtgtaaaccctttaaattacttgaggggcatatatgtatgattaaccggaactgatctagaaatacataatgcaaacccattgtttaaaaaaaaaatggcctcgaccaaacctttttgacgaaagaggggtcgaattgttataactccctgaccaaacct

SEQ ID NO: 158605 - DNA, 542 bp, Cannabis sativa
ttcaactctgcttatgtggtaaaataccatgatgattatacttatgtaagtagtgtattcgattcaatctatattattttaacttatagtgcattcaattcatattattttatattttggatttaatttaatttgtatgataactcaaataccaattattttagattggttaatttttaatatgaaattatttaatattaattaaaatgtatattttttacactaccaatatctcgaacataaaaaagtccttttagatttttcaacaacaaaataaaataagttgttaaatgtcttcaacaaattaaaataaataaaccaaaaataataagggaagattaaaaaaaatgtatgcagaaagtaaatgattagctttacttagattttgttttctcttgaatataaatatatgcatttgatatatttagttttgaaaaatttatgtatggtatattaattttatttaattactttaaaatattaagaataattatcttttttaccccctgtacttatgacactatactattatgccccttaat

SEQ ID NO: 158606 - DNA, 645 bp, Cannabis sativa
  modified_base (572)..(577): a, c, t, g, unknown or other
aggatacaatcagagccaagccttagctcctgcatattcgcactatggcaacccctcagggatgaacggacaaatctcgtctcactccgctactactgcaagcctaactggaccttctcaaggctcctggagcaagaggtcctcaaaaggtagcaactggacggaggacaagcgcaaaaaaatatggtatactccccaatatacccagtacacggagctgacggacacacaagaacgtgtgtatttcgccacgaggaaaaatacacactatcggaggccacctcctctgtatagggatagttcccgaagggatcctaataaaagatgcgaatacaacaacgacattggacacagtaccaatgagtgcaaaaatcttaaagatgagatcgaaaacctgatccgattgggtcatctatatgagtggatcaagaactggctcccccatctcaacccggttccggcagggagtccattgccccaagggacaccaggaagtgcgcttggagcattggcaccaactgtaccctcgggagggccaagcccttagcagacccctggcctgccaccaagannnnnnggaagagtggctatgatctctggtgggccccatattggaggaagcattcgaaaagaattaaagcgcta

SEQ ID NO: 158607 - DNA, 555 bp, Cannabis sativa
  modified_base (367)..(368): a, c, t, g, unknown or other
  modified_base (406)..(407): a, c, t, g, unknown or other
  modified_base (433)..(434): a, c, t, g, unknown or other
  modified_base (514)..(530): a, c, t, g, unknown or other
atagttccaaatacttaataaaatctaaaaggagccaagataaaaacactgtgagcatcatagaggttatcatcagtttcttcgtttatatagtttaaggcacgcatctgattttgccagaagcaagttaaaaaatataattatattagcaaaactatcccacaacaagagttattctaaatgatcaagcattacaattaagtatcactatcagatatatatgtatcactatcatcgcatggtgaaatgcaattctctaacttaaattcttttttatggttaaaataacagattcactttttttcaaaagattaattattaaataacattaaatcaataaaatcagttacataatcattttaaattnntcagttacataatcattttaaatttaaattaaattttnnattttaaatttaaattaaattttttnnatataaaatatttacataattttatttttattaaaatcaaaaaacattaaaaaaaagttacccaataatttctcataaannnnnnnnnnnnnnnnntagccacattttatatagaatatat

SEQ ID NO: 158608 - DNA, 586 bp, Cannabis sativa
  modified_base (530)..(538): a, c, t, g, unknown or other
attatttcacacgtcctgaatatcgatcctaacatccggccagttcagaaaaaacgaagattgctggataaagaacgagtagtagccttgaatgatgaagttgaaacctgcgcaacaacagcttcatcattgaagctttttacccagcttgggtcgcaaaccccgtactcgtgcctaagccgaacaagaaatggcgagtctatatcgatttcacggacctcaacaaagcatgccctaaagactgttttccacttccaaggatcgatcagctcatcaatgcaacagccgggcacgaaatattaagcttcatggatgcttatttggactacaatcagatcaaaatgtatccgccagaccaagaacatacaagtttctgaacagatatgggtctctactgctacaaagtcatgccgtttggtcttaaaaatgccagagctacataccaaagattggtcaataagatgtttgaagaccagatcggaaagaatatggaagtatacgtggatgacatgctcgtcaaatccagaaannnnnnnnngcacatagacgacctggacgaattcttcaaagtcctcaagaaatacaa

SEQ ID NO: 158609 - DNA, 701 bp, Cannabis sativa
gaacttgattctggttatagtaatacaaaaaaagttccatagcaccacaagtgcgagtggtgataggctaaaattccttcaactcatcccaaagggatttcattttggtgaagtagaatgacacagattggtcaccttgttgtaatcgggtcaattgagtttaaagttgaaaaattagagggtcattgccttcgttaaatctctcagcaagatcattctacatatcaatggccaaatcaaagtacatgatactttgagtaatttcttgagaaaccaaattaagtaatcgtgacataaccatattattgcatctaagccaagaattgagaagagtattatcaattttagggtgagggagagacccatcgatgaaaccaatcttgttcttggccactaataccatggtgattcctctcttccaagattgataattgctgccattgagaacggtagacaccagcacaagtctgggatggtcaccagtgctaaaaaagaaaggactagaattatcatcattgagaggacgatcagctggaggagcagtgtggtgttgatcgtcaacaatggtagattgatcttaaagttcaggatttgaggtgttttgtgatggaggcctggtgtgatttctgcgacgaatggctgaggagttgagattaggagcaacaggatgttcagaggtgatgtctgctgcagtagtatca

SEQ ID NO: 158610 - DNA, 654 bp, Cannabis sativa
  modified_base (42)..(43): a, c, t, g, unknown or other
tttattttttttcaatgaaataaagaaaagtggaatgtatgnncctgcgtattccttttgcatcatacatgggagttagattaaaatatataaattatgatacgtaaaggccaacacttttaaaaatagcatataactctaaactaactgcaaatatcaaaatttgaaaatacatttttattattataataaaatatatggtatttttgttatagaatactatcactttttgttaaacatggttttcaccttttatttttggaatgagtttcaaaaattctgaaaaaaaaaaaattcttgaatatgtcgtgagttttggaatgttataattgaacttgaaaaaacatatggtttttttgttatagaatactatcatttttttgttaaacacatagttttcaccttttatttttggaattttgttgcaggatacgatgatgatgggttaatgctaatcatgcggtttatagcaaattggtcagtttattttgccaaattaataaatgcaattgatattcttcttcatcattatcgccatcataaaaaatccattctcattattcagaacacatctttgaagttgaagaggctctaatctcatcatcaaaatcgttagtcaatcagattttactctctcttgctcgcccataccac

SEQ ID NO: 158611 - DNA, 502 bp, Cannabis sativa
tccagaccctgaatgttatgttgagggcaatgatgacgtaagagacgaccaaggtacagaggtccctactgctgtagctttgaacttgactccactatcgtaccaagtaccacccaggccaccgacacaaaaaagaatgccctatagagaaaattgccaaacacttggtactagtagtagtcgtctaggagaaaccagtaatgctaaaggaaccactgacagtacaggtcctaataattctagagagaccaatgatactaatggtcctagtgatgctagagggaccaatgagacggtatttagcgatccatttttattcttcgacaagtaacagtaaattcaaggagaaaatgtttacaagagaagatatcgaggatcatagtcattatatatctatgggtggcacaccagacggggagttacatgtaagaaagttttttggagacaaataacatttaaagatggttgttggcttgtatgcaatgaagaaagggtttgacta

SEQ ID NO: 158612 - DNA, 571 bp, Cannabis sativa
  modified_base (387)..(394): a, c, t, g, unknown or other
catccacataattattattatttagaataattagcaattttgtcccttgaactttcgacaatattgattttggcccttaaaatatacggcttgttaagaatcccccttaaaatatatagaaatttagtccttctgttaggttctgtctcattattccgttaaatgctgacgtgtcttttttaattagcaacttttccccctaaactttgacaactatcaaattgtaccccctcagtataaaaataaaaaacaattcaacatttttttaagtaaatctcaaaaaattaacgtagatcttaagaaaaggttatttgaatgattaagaaaattaaaaaataaacaaaattttaaaactaattaagccatttaaaaaattatttatttttnnnnnnnnaattcatttagatatttaaaaaattttaaaatttatttttataaaaattaattttacgggaataaaacttgagtatattttatttttatcaaaaaatgtaggtttgtttatgtaaacatgacatttttttagtttaatttatagttaattttcaaaataattttatatttttattta

SEQ ID NO: 158613 - DNA, 1283 bp, Cannabis sativa
taaaaggttgctagaatgtttgccattttagatgagttgactactctattcaatggatgatgctatgactctcgcataaacgagacaaggtatcagtttgttgaaaaccttggaaaataagaatatgtttcatttttggtatttttataaacatatttgttatacttgttattttctgaatttgtgtatgaatttattgaaccaaatgatttacttctgtttattgatatgtagtgtcaaaatgaacaacccacaccccgaccgactcctagttaatgcctttgcaaatgaagtctatagtgtgaaaatgctccctggaaagagcattaactcaaacttgttaatgatgaatctgaaattccagaaagcaaacttgcttggaatcgaattatctagagaacaattggttcgaggtttatacttaatagtcttcctcctgagtataatggatttgttgtatcttatatgatcaacaattttaactcatccgacatggataagctagaagcagaattgcaagcttatgaaggacacttgattgcaacaccgccccccggatttgcaaacttgtgtaagaggaaaagaattaaggatgaagcttttaacaatgctgcttcttcaagtacaattgatggtaatacacttcaatgtttaaattgtaatgagaagggacattaggaacaacgatgtcccagacttttaaacaaatcgaatgaaagtaatgcttttatttttgaatcatgtgttttagagaatgacaaatccttgtggattgttgattctggatctactaaccttgtttgttcttcattgtagctacttgaaacttgcgattatctaaatccagaggagttaaagctcaaagttggaaatggcgagttagtgtcgttccaagctaaaggaagagcccgcctcaagtttcagaagaaatttttagttttagacaatattttgtttattcctacttttagttgaaacttgattagtgtttcatgtttacaaacacagttttataaattgaatatttcgagtttagttttaacaatttctcgtaatggattttaattatgtgttcctcacatggaacaagaactttatgttttaagaccggaaatacaaatcgcacttaacaattaacttttcaatattgctaaacctagaaactataaaagaaaagtgattaataatgatgatgacacttatctatggcatctacgattaggtcatataggctatgacagacttcataagttaaccaaagacggtccattgaaaaatgtcgt

SEQ ID NO: 158614 - DNA, 843 bp, Cannabis sativa
  modified_base (710)..(711): a, c, t, g, unknown or other
tgaatttattttaagttattgcttccttttttatttttcattaagaaatataaaagaaactataaggttacttttaattttgaaaattttatttggtgaaaaacctataattattttcttgtaagtttttaaaaatcggtcaaaaatattctcaaaagaaatttgtgagaatacaattaggtaactaaaatgttacctatttaatactagtcagaaaaaatatatgtttcctacgtatcaaaatgattattaaaaatagatcgtaatagtacaatttttaagcacaaataattattgttgtgattggaaaagtataatagaaaattagcaattaatcaacattgctttataaaagtaaacttatgtagcatacaatttagtaacttttaaatattaaaaagttaaaatatatgtttaataaataataaaattggttggtatattttattttatttaaacttaaacttaaattttaatttttttttgttaattaaaccaaaagaaagtaagtatgtttgctttggtgtaatcaagattagaatggaatggagattataattacaatgtttggttgaggcttttaacttttataatacttttacattgtaatgagtattacactacttggatgaattctcattacatgaggattacaattaccaatatactacaaaaaggcttttttacccttctctctcttacctctttannaaatgtagttgacaataaataaaagagtaatttgcggttaaattcttttatgttttaatttttacatacttaacctttttatctttttttttttgtggcaaaacccctttatattttagttttaatacactt

SEQ ID NO: 158615 - DNA, 923 bp, Cannabis sativa
tcgagtcggtaggcattgtcattgatcctttcaagcacttgaaatggaccatctcctcgaggtagcaatttggaacgtctttggactgggaatcgttcttttaccctcaattcactcgtgttttcactcaaattcgatggcttttaccctcaactaagctcacacctctgcctttttctactcatattcttctataagttcttcaaaaactaatcaaacagtacaagagaggattcaagtagaaattccaaccaaacaaaccaaatgaacactgataaaaactaaaaaaaatgatgatttttggaacacttgtgtggggtttgggcaaataagcctctagactatggagactaagaaaatacaaaaaaaaaaaatgaagagaggtttctggattttttttcaaactaattgacagaaaaatttggagacaagaaatcagccaaaaaattaagagttttgaatttttgattttttttaagaagaaagaaaagcaaagacacgatgttcgacacaggaaaattatcagaatgtggttctaacagttttcagatttcacaaagaaaaacagaagagatgaaacacgaattgacaggaaagtagaacacaagttaaagaagattatagaacatgaattgaaaagaaaaacacaaaagatagatcggccaaacctgatgatcctaagctctgataccaaatgatacgaaccacaccaacagttgtgatgaaacccgataccaattatggtagcctctaagaattctcaaaatttggatgtagaatcgcgacccaatgcttagttaagcgtgaaccttggtatgtaggaagatgccacaaacggtgatggaaatccgtttgataagtcaggttgaacgccacaaggaatactccttgataagttcaaatagttctcttaagaactcaag

SEQ ID NO: 158616 - DNA, 887 bp, Cannabis sativa
gtaaagaaaatgtttaaagaccagatcgggcgaaatatcaaagtgtatgtggatgacatgctcgtcaaattcagaaaggctggggggcacctagacgaccttgacgaatgctttaaagtcctaaaaaaatacaacatgaaactaaatcccttaaagtgctcctttggagtcagctcgggaatgtttttaggcttcatcgtcaatgctcgaggaattgaagacaattcaaaaaaaattcaagccctcctggatatgaactcgccaacaaaaaccaaagaagtgcaaagcttaactggtcgaatctccgcactcagcagattcgtgtcaaaatcaactggcaaatgtgttccagtcttcaacatcctgggaggaaacatacagttcgagtggacagaagaatgtgaaagagcttttcaagagctaaaggcacaacttgcgaaacctcccgtactttctaaacctatggacggtgaggagctgggaatatacctagctgtcacggaacatgtcgtgagtgtcgtgctaatcaaagaagagaacagcgtacaacacccagtctattacattagtaagagactcatcgaggtcgagggccgatatccgttgatagaaaaactcgcctactgcctcattctagcaacaaggaagttaagaccttatttccaagctcatcctgttcgggtatataccgaccagtcgctacgacaaatactgcaaaaggcagatgcttctggacggttactcaagtgggcagtagaattgggtcagtaagaaatcaaattcgaccccgaacagcaatcaaaggccaggtcttggctgactttgtggtagaatgcacaagcaaaaaagaaagcatactagagagcaacctcgagccagcacctcag

SEQ ID NO: 158617 - DNA, 686 bp, Cannabis sativa
  modified_base (182)..(199): a, c, t, g, unknown or other
  modified_base (649)..(657): a, c, t, g, unknown or other
taatataaaatttgaaaagttgtttagcatctttgttgaatagctatttaggtttgttgaaaacttaatttttcaaatttgtaggtttaattttgaaatttattatttaatttaattttataattttcgaaaataatatttattatttaaatttttcgaaaaattatttaattatttaattnnnnnnnnnnnnnnnnnncctatatccaactatccaatttgttgcatgtgtgtgttttatatattttttaattattaaacttgtttttataaaacttattattgtttgatctaaattgtgatggttaacttgttgacaaatccaatgatctaattttaaccaatggttcaattgtcaataggtcacatatataatttgtaacaggtaaattttacaattttctttcatttgtgtataaacctagtaacatgataggatccatccaaatcattgtgctttgtgtgagcctatatgtttgttttggacttagatgcatatagggagcctatttaatttttgtaagtactaggttgctaaatgatattgttacatttgatagattttatttaggcccaattagtattgggcctatttaattaataacatttgattcaattaaggttaaattcatctcctttgggccttgtnnnnnnnnnagggggccattagtagtgggtacgatata

SEQ ID NO: 158618 - DNA, 583 bp, Cannabis sativa
tcctggtaaaataattcccaacgtgttcttctaaagtgaaggttggtagatcataaatagcatgaatagcggctgtggaagcaggcactttaacccccctaactttcaccttgtcatcctctctttctggccagttggctaggaattctaaagctaaggtttggttgctgcgctcagtgacatccacaaacttagtccactgcctatttaggatttgttctctgatggatgcaaatacagcaggaatgtttgcagtttggctcaggttaaaaatatctatttccctatctttaatgaagggcctatctttcaatttcaaaaatcgctcttgggcctccatattcgcaaacctcgctctatcaagattagagcgactcctaggtgggttggatgatgaagctccccctctttcacctactctagctcttttaggacccatctcaccaaatattctaacactcaagatttttaaaaattttggcagcacttccccttaaaaatccacttctcgggaagtaacccactcacaaataaaccaattcctaatcacaaacaactctattgaacaatgtattgagcaaaa

SEQ ID NO: 158619 - DNA, 588 bp, Cannabis sativa
ccttgactcttgcctaaacgagacaacgccagattctcatcttgatcaaataaaaggttgctagaatatttttcattttagatgaactgactgctctattcaatgaaaaatatctttgactctcgcctaaacaggacactgtattagtttgttggaaaccttagaaattatttaggattgtttgtttttgtattttcacttgtcattcctacttgctaagtgcttaataatttctaaatgtgtgattttgtattgaaccttatttgatttctatttattgatatatgtagtacccaatatgactatgaacaaccccatggtgtcaatgttgactgacaacaagctctttggagctaactttgtcaaatggaaagagaacattaatattgctctcataggtgaaaataccctgtttgtgttgattgaagaggctcgtaagcagctaggtgagatgcgccaaggagtcaaggaaaagttcgagccttggaagattgctaacaataaagcttgatactttatgttgtctagcatggtcgacaccttgaagacaaggtttgctaatactctcacgactgcagatatcatgaa

SEQ ID NO: 158620 - DNA, 515 bp, Cannabis sativa
  modified_base (209)..(209): a, c, t, g, unknown or other
  modified_base (324)..(330): a, c, t, g, unknown or other
  modified_base (389)..(394): a, c, t, g, unknown or other
  modified_base (460)..(468): a, c, t, g, unknown or other
ttcaagatacttaattatttctatcaatttaattaaataaaaaattatatttaagttggaaattttttcaatttcagatcaacttaaatatgtatgattttcaggatatattttaatttattttaataattattttcccacctaattttgaattgcatttatttattttaaatgcagatattttaaaatttttcaattttgaaaattanattaaagttgaaaattaattttatattagcttaaatcaagtaattttcattaatgatttatttaaaataaatagattaaaatatatttttttaattagaaaattagtaattagtnnnnnnnttatctagatagatattttctaggtagattttttggtatttttttagatatatttaatnnnnnnagaaaattaatatttaagttgatcatgttttagatacttaaatatttgatatttttcttaagagannnnnnnnnataggaaaattatatttatgttaaaaattaatttatttaattttaga

SEQ ID NO: 158621 - DNA, 509 bp, Cannabis sativa
aataataattacttagtaaaattatattaaaattttaattttactaataaaaattttgtgacataaatacttaaaatattaaatttgttcctaacaaattctgaaattcgaaaaatagtagcatacaccctcatttatggtttaatttttattctgatatgtgtgttaagttctgggttcaaattttattgtgtgtgtttttaatgtttgagttttagtgttttactagagttctaatgtttgactttgtgtttatgagatctatttttatttatttatttatttatttttataaattttaacaacttaaaatttgatgttgtttctattgattattgagattgagagtttgatttttcatacgggagttaaagtttgtcttttcgtttcattgattgaaaaatattaacagagcgtttatgaaatgagaattttgaatatatatgaaaatagaattgaaaaatagcatttgaattgagaatcaaagtttattgttaatctccttacaa

SEQ ID NO: 158622 - DNA, 549 bp, Cannabis sativa
  modified_base (83)..(94): a, c, t, g, unknown or other
aaataaatcatgtgaaccatgccacattaaatgttatttctgatctatattaataagcaaatctaattatattgaaatgagtnnnnnnnnnnnnataaaacccaacatatatatatattacataatcgggattctgtgtttaaacttttatgaatattatgaaaatacttttataacttgtcacacaacgactacaaaatatatcccaagatgtcccgagatcaaacactccaggtcgcaccatctcgatatgtacaatcatcacccgagctcggaacctcactcccattcagctctgcctttccatcgcctacacatgaaagtagaatctgtgagtcaaaagaccatgtagaaaaagcatacaacagatactataataccgacttgcatctaggcacccatacacctatttgcaaggctatcagatgtttaagaacatccttaacagttggtgctattgaccataatatcacccactaccagcactatgatcgcgctgcgggaccagcactatgttcgtaccgctatgatagcatcaatagcacccaa

SEQ ID NO: 158623 - DNA, 729 bp, Cannabis sativa
gaggtgctgcccaatttttttcttttcttagcattatttagaaaaaaaaatcagaaaaaaaagaaaaataatccgaaaaaaaaaagaagaaaaaaaaaagaaagaaaaaaaaatattctattattgctaaaaaaaaatggcacctaaaagaactaggcatgttgaggagggttcgtcatcaaacccaccaactacgggtttcgactacggatttcgatagaacccagtttgttaatgaggaggcccagaatcgttttatgaggataaaaaatagggcttacattgaagaccagggtaatgaattccctacaaatcctttgagacgtcaaccacggttcgagacaattcgagcccaaattgagaggatgaagtgggggatttttgtggatgctcgggggcgggctaatgtgactatggcctgtgaatttcttgccaatttgcccgagcgccggaattgggaggtaaaggtgcgtggaaagaaggttcccgctactgctgatgcttttaatgtgatgttctctgtccaagattattctagggaagagcaacgcctccgaattattgaggaggaagagcagtttgatatggttgatgtggctgagacggtgggatttccagggttgtggttccacgacaaccatggccaagaggggtcgccaaacatcctatatcggtgtgaattaaacccagtggcgaagacatggctgtacttcgtaagtgctcggttgg

SEQ ID NO: 158624 - DNA, 605 bp, Cannabis sativa
  modified_base (554)..(559): a, c, t, g, unknown or other
aaatatatttattagctaaacctttcaagatctcttaataaataaataaaccttgaattctcttttcttctcaattgtgccctttcttggtggaaattcacaaacaatacacagtcttatttagaattctaattaattaattaaaactaattaattgagactacaaaataatattatcttagtgtaaggaccatgatcctatgtaatcaagctcctaataagtagatttggaatttactaagtaaatttcctaacttgtttcaagtttaactaatttatatgatatatttttttttaaatattttgttagtatttgatttgatatcatgtataatgttatttaaaaaatttagagtttatttatgtggcataaacataaaaagcaacagaatttctaccagtagaattataatatataattaataggggtgaccattcaattcaatctgcactattttgctcatagtgcattcgattcgcactaactgcggattttattttttggatccaatccaatccgcatgttgttgacattgtcccacatagaataaatnnnnnngaattgagccatatataagaatatgggctactccactcattgccaa

SEQ ID NO: 158625 - DNA, 556 bp, Cannabis sativa
  modified_base (37)..(80): a, c, t, g, unknown or other
actttatatgtgtttaatttattgttttagaaagttnnnnnnnnnnnnnnnnnnnnnnnnnnnnnnnnnnnnnnnnnnnntcctggtaaaataaattccaacgtaaagtatgccggataaagcccgtactccataaagttcgcctccgagatcaacaaagtgatattccgagcagcattcgacagtcggagaatcctctgagctctatccctaagagtcagtgtaaggggtggacggtaatatattgggatctactgaaagtgagtataggtggtgtccatgccttccacgaagtaatactcatcaacaaaacctccgaccttgtccacagtgcctatcaaccacttgaaatctagctaagagaagtagaagtaccccgacctgctttgcttgggggtagacttcaagacctcgtgcggggacggcacaccccatccttaaatgccgtagaggacgaacagggcaaataagtacttaatgcccttgggagtgaactaggtcggacaaaggcaaaaataatgtaacaccctaactattttaggcgtattacgtgatt

SEQ ID NO: 158626 - DNA, 674 bp, Cannabis sativa
  modified_base (49)..(57): a, c, t, g, unknown or other
aaggaaatcatcgtttcacttcttcgtctagatagaagttatagattcnnnnnnnnngtttagcgctcctactcaattgtactatcatgttcccaagctctacgtgtgacctgaacaaaattgtagggttcgaataacaacttaagcaacaaaaatatcttagtcatgattaaacctaaccatgtcggattaagatcttttgatctaggatcaaccagtgatattaacttagaaagatataacggtaagattataatatctttaccaagatcaatatcagtcccagtccaatgtatactctatgcatccgatactagcatacactacaacaatgtcggcctttagcttcccttttttcaacccaatttataaaaaaggaagctaaagggtgtgaaaatatcttctttgacatttaggggcagttttttagtaaaaaccgtaggtatagaatatatatatctatgctgtcggttggggattggggaaaatcagggtttttttaataaccctatggcatcggttattgggtattaactgacgccataggtgccacgtgttgactaaaggcggcacctatggcgtcggttaatacccaataaccgacgccataggattatatatcagatccttggcattgtcttccttatttcacttcttgctgaacacgaagaaca

SEQ ID NO: 158627 - DNA, 504 bp, Cannabis sativa
gcaatgcatcttgtttcatctactaagattctcattcaaaaattaagagaagatggatggaatgaattagtgttgatgaggtgaaatctttttgtgaacctattgatatacttgtgcccaaattttactgctcattatactgccagaagaggaagagctcgcggttaataaggtgtcattacagtggagcattattatagagttgatatcttcaatgcagtgatagactttcaattgcaagaattaaacaacaaattcaatgacaacgcagtagagttactcattcttagttcagctctagatccgagagagatgcatgtatcattctgagttgatgacatttgcaaactggtataaaaaatttacccaagagatttcacataatacgaaatgatacatctaaggatgcaatttgaacattttgatcatgtgcgaaatattcctaattttatagtcttaacaactatctctgatttatgtcagtggctggtaaaaactagaaaa

SEQ ID NO: 158628 - DNA, 650 bp, Cannabis sativa
agatgagaaagggatctatggattttatgcttatgaaaagatctaattctgaacgcatcgttatgagaatcctctaacaattgtaacttagtaagttgatcttactagctctactcatgagttattccgggattaacctcctagttgcgtggatataccccgagacttgcaagcattgatccttgatattaatgggtcctaggctacttgtgttgattcaatcatttctcgactgaattttactggcgatgtctctcaatcgttgagactaattgttgactaatctcgaaagtgagtggtgggttgtggttggaatgatggttcgtggatggtggtgagggaaattgggagagggagaaagagatgagtttaggaagaagaaattaagaaggaaaaaatagattactttcaattttttttctgatttttttaattattttaattttttttccgatttttaaaatttttaaatattttttttaattattaatattaggtgcactaataaaaattgtccaagtgtaacttctatacactgtggttgtccactttggtactgaacagacgaaagtggacagaaggagtacagagtaaaacgattgtggaggttgaggagtttagccctaatttttctaatctaggagattaat

SEQ ID NO: 158629 - DNA, 701 bp, Cannabis sativa
attggtggaatcgagggagaagctaatctctgaaattttgacattatttgattttactccttaaaatatatgacttgttaattttgttttaaaaatataacagttacataattatgtctcttttgttaagtttcatttcttttacagttaaaagttaatatttttaccctataaactttgatcaatacaaaattttgctcattaaaaaaaataattttaaaaattataatattctattaattctaagaaaattaataaaaattattaaaaaatttgataaaaatattaagttaaaaaatctaaattattcctaaaaaaaaatatttttaaactttattttatttataaacacgtatcttaaaaaacaaaactaaatttattagaaatctaataaataatttaaacaaactatttttttttttttaaaaaaaaagaaatcaaacttatttatatttataaacttgtatcttaaaagataaagaaaaataattaaaaattcaattaaaatataaacttattttgaaaaaagttagaaattaaactaaaaaaaattatatagattattggaagaaaaaaatggcctcaagcttgttcccataaaatttagattatacaaaaattaattttttaatatgatttttttatatctaaatgaatttttgaaatcgcttaattatttttaaaatttcaatttctttttt

SEQ ID NO: 158630 - DNA, 509 bp, Cannabis sativa
aaagtttggtgattcaaactttgaacggattttttggtcaccttcggcgtctgtttgacgagacgttttcaccactaaactcagcttgttgaggagaacaacctacactaaaccatttttgtcgattcgctactttttccggtgacatttttgtagctccactcctttccagcgactttccggtgacatcgtgtaccgatttgacaaacggttggcataggtgtgatctactcattgagatggtcgttttgatatacactacccctattttcggtgacttttctggtacaccgatttttaccgtcactgattgttaatgtgcaccgcttaggtgaggcttcggaatcccaaattttaaatatagtcatattatatgtcgttggactaggttttaaatgtagaatgtgatgatgataattatttaaccatttgatggtataggtgagagtaatatgtaaggttggactaaaataattggagctcgcgacttaagagcttaagatcgtctc

SEQ ID NO: 158631 - DNA, 732 bp, Cannabis sativa
tattatttagcttatatgtgaaatgtgtaatttttgtaattttcgctcggcgacaacggaaaatgcgatggatgactagtttggttacatgggcaagcttagaaccttatttcttggtgggaaatactttagaggaaataaaatatcgggattgagcagggttatggaatttgaccattttacccctagctttagaaataccttaaagtttaaaactaaagggcaatttagtctttttgcaaagtattgattaggtggctaccttattatttgacacctagcaaagtaatatttttcaaggattaattggggaaaatccttttccatttgaagaaaaaattaagaaaattagaaaatagagtttttctcttgaactcttgaactctctctttctttcgactgagacaaaattagggcaaggaccaacttttccttcctatttctctgagatttagcaaggattcaaggtttttgcaagtaaggtaaaccctagaaacctttatctcttgagtttatgagttttagttgagttttcattggtttcaagttatgattttgaataatagtggcagttaggtttaggtaagtttaggattcgaattataggattcaattgagttggtattagccccttgtagcaggttttgatggttggattgggttttatgcaactttgagctttgagttcaaagctttgatctataatggcatgtttgttgggttttatgccct

SEQ ID NO: 158632 - DNA, 556 bp, Cannabis sativa
tcattgttatcactttttttttttttgactaactggaaaatttcattaatcaaagaccaaaacaagctacaacaaggccacacccaaccgaccccaacaaccaccagctgccacaagcagccactacaacattcggcgtaaaaacatacatttttcagcttgaataatctttctattctttaagctatacaacctgtatttaactatttctttaatctcatttacaattttcaatatagttaaacaactactattatgcacacaaaaattcctatttttccaaagcaagtaaacagtggcagcatagagcaaaacgatcacaccagaattcttgttagaaaaccagcagcgccacctgttgtagtccaaaggccaggctgcaacaccacaccagtcaaagacctgcttcacaacctccctagagacacagcagttgaagaaaagatgatggtggctctcctcttcaatgctgcaaactgggcagaaactagagtctaaaataatgtgaaatttatggaagttatctctagtgagcaagtgtccatgaaccacctgc

SEQ ID NO: 158633 - DNA, 509 bp, Cannabis sativa
tggttattagacggggatggggcggggatgggggtataaataggtaacggggatgggggcggggattgcattccccgtacattaaccgaccaattttcatctctagtattgacttattaatacattgtgtaaaattataatatatttcaataaactcgaccccaataccgactccagatcgggtcccggtcccagtctaggttcgggtccagtcaagtcctactcctaagtccaaggtcttggtccgagtcggagattaggattgaccccagattctttgtaaatactataatacaaggtaatgcaaactatttgttatataataaataatacaatttagattgtagtaaaatttttagacctcaattgtttataggtcatgtctcagtgtactcctcctcaatataatcctagccagccaccaagacttctccttcctcggaaacaggctctccgacctcattatagccaccaaaaggaagtacccaaactttctcatcttcttctcc

SEQ ID NO: 158634 - DNA, 509 bp, Cannabis sativa
gaaagttagcttccatggtcaaagtaacttgggaagagttattattttcttcctctaatatccacacgtcaagattaagagatcagagcaagtctccatcatgagtagcatcctaaaagcttggggggtaaatgttatccgcgtttccagaatgggacacatggattccatattagcattccagacccatcagtgggaccctcaataatggaataagtgggccaagcccatccagatgtgtccttttgagagttatcttggttctgtactcgggataccttttgccttcaacaaatcgagcccagaagacagtttcagagtcatgagcctggaaggggaagatgcatcattcatggaagactctttcggtttcccaatttgtttccctctataaataaggaaacaacaactgtcaaattgggaaataatatcatatcgcaattaaagaggaaacttcccataacaagcgcactgcagttatttcagaatattctcccattatgatcgga

SEQ ID NO: 158635 - DNA, 799 bp, Cannabis sativa
actggagcggtaatcaagcgctgctttaaccctagaaaacttttctcacatcgatcagtccaaacaatcttcaggttctttcgagtcagctctgtcaagggtacagtagtctttaaaaaactctcaacgaaccaacgataatacccagctaagcccagaaagctgctaacttcagtagctaactttggtgtcggccaatcccgaacaacttcaattttggtcggatccaccgtgatcccatatttatcccctatgtgccccaggaaagagacacaagataaccaaaattcatactttttgaatttagcatacagcttatggtcccgtaattttcgcgaaacctatctgagatgcaactcatgttctttatctgattcaaattacaccaagatgtcatcggtaaacacgatcacacatctgtttaggtaatcctggaatgtctgattcatacaatccatatcaaatatactacgtagccttggcccatcattcaccctgacggtgattcttacatttcggacattcaagatatgacttgaaagaggatccgtgaccttaacgaccacttcaatttccccgatgctttctattaacccctgatactctggaagccttagccttccgtttgtgatcagggttgccattgtcgttccccttactgacattaccactagcaggcgaatttgatgtcgtgacggcatcttttgtggtattctcttttactacatattgctcagcctcctcagaaatcaaggctagctctatcactttcttataaaaagtgtcatgtgaagtggta

SEQ ID NO: 158636 - DNA, 738 bp, Cannabis sativa
tgggggaattagggaaaccatctggatatgactctgacgaggagcttaagccgtatcatccagatataatgaataccccttttccttcatcattcaaaaacccgcatgtctcgtcatatgacggaaccactcatccggtctcacatttgaataactttaacataataatgcgagcgagtaatgtgacgaacaatttacgctatattttgttctccacctcacttgtttaagcagcaagtagctggtttaacaagtttactcatcattcgataacttcctgggagcagttgtccaaagatttcaagaaacaattccaggttgctagggataggctacccaaagcggcctcgctaaccaatataaagcagtagtccggcaagacacttaaggcatacttaagtcgttttagcacgattgcgactagggttaggaatttggatgacagcatgcgactcataacccttcaggcaggaatctctactgatccattaaccgtagggggcgagttgtgggatgagttacaaggacgtctagtgagaagcatcactgagttcaacgaaagggctcaggtgttcgttcgagaggaagaagcccgagaggaaatgaatctgttgaaaacaagctcgggaagcaaacccaacaatgttttaacaggtactgtttccacgagtattgataactctggggcttctagttcgaagagaagggacaaagttaaggaaccgtcgaaggataaaa

SEQ ID NO: 158637 - DNA, 624 bp, Cannabis sativa
  modified_base (26)..(52): a, c, t, g, unknown or other
ctctttctctcttcatcttcttcttnnnnnnnnnnnnnnnnnnnnnnnnnnnttatattattttataacactaatatatagtaaattataaaggaaaattacttcatatactattttttaagttatttttttttcaaatttacagttggagtttctaaagtagtttctccgatagtttctatgtgggttgttatacgattttttgttgcgatttaggttgcagcgttagttgcaatcggagtttctatatagaattctgtaaaattgcaaaataaaactgttttgaagtgtaaaaataaaaaagtctcaattataaatatattattttattttatattattattaataatttatttattaaaaacaaaatacacaattttattaattattatttagaattatttgggtgtactcttaatgggtattaaccatgaataggtaaaattagaaaattttgagtttttatgcttgatttttctattgaattaaaaaaatctctgatttttatattatatgggtcgagattgttccatcggtataaaaaaaaattaaaaaaatattttctagcaagaaaaataagaaaaaaaaaagttaagtttaagttaaaatatttttgtatgaaca

SEQ ID NO: 158638 - DNA, 515 bp, Cannabis sativa
atgtcaagtatcacataattataattaaagagcattactattgggcaccagtggtgcccaaaacctttcataagtggcaccctacgattggttagtgatactccagtaatcttatttttttaagttatatgaaacaagctacttaattacactaatagtggtatgataccaacaaggaagattgcctttagcatttctcatagctaaaatatcacatttttttttctttttttaattaagatatttaaaaaataataatcacttttttaaaaacatattaattaataataacataacaaaataatgacttttctcgatctaatgtcttaaaaaaatatttaaaattcgaaatgaaatctaagattaagatatagatttgagaaatacaatagtgacgactacaattaaactatggtaatgacaagggatgtgatacagtgatgacaacgggtgagatacggtgataaaaataagtgagatacaatgagatgacaagtgagatataatagtaataa

SEQ ID NO: 158639 - DNA, 523 bp, Cannabis sativa
aagcccagcaagacagttaaaacataacaataatatactcatcatataatataaacagtaatgccatttaaatctatctgtgtcccacacacctacatgttgggctcacatgcacgtttatgtttatgtttacgtgacgtaaacctacgtgttactcgcacacgtctatttatgtctacgtggcatagacctacgtgctgctctcacacgtctaaatataataaggccttagaatgattcatgtcggttatggttaccgagtccaacccgattatgccttgaacgcataacccttaaatctcaatataatcatatacttagcatggcatagcatttacccaacttatatcactagggtaataaccctaggctattaatcgctcatattagggtaataaccctaatcccagttataattactctattatatcatattcaacataagcgcctccgcgcatactctacgtgcaaactactatcttacctgttttcccgcaataacagagattccaaacccctgggt

SEQ ID NO: 158640 - DNA, 594 bp, Cannabis sativa
ctttatatatgtttaagtttcatcgttttagagaatcatatttaggatattaaaaatatacttgttagtaaatctaggtcctagtaaaatataatctagaaactagcctcagagccatggtaataatttactttctagaaatatagatttaaacgatgtatgtgtgatttgggtgtcattcatgttgatctatgtgtttattgattattgattgatgtttccaaattttttatgaaaaataattggaatctcgttatggaattacttttcttggatattttggaaaaaaattaagcaattcacttttttacagaagttaatttcgattttatttgaattagttattattttttgaaaattttaaaaaaatgattcctacatgagcgcgcggacacccgagtgtcactggagtgcaagtgcattcagacatcggcctatccgaagggacacgcccagaaacttgtctgaactcccatactcgagcgaaaatcatgcaagcagggcccttgtgttgggttttatgccctaagaaaaactcaatttcaatgtaatctattttattcaacatcaataaaaaaacagaagtatttttca

SEQ ID NO: 158641 - DNA, 637 bp, Cannabis sativa
ttattattcatttttggtgttgtgaaattcgctcgacaacatttggcgccgtctgtgggaaacgagaagtacttttttactaatttagaaaaaaaaccataatggttggaaaccaagcaaacgggggtcttaacaacgaatccatcaacatcagaatgatgaacgttccgctgtcaggaggcagagtgcctcccgtagatgtcatcaacggcggagtaggtcggggtaatgtaagacctctcaacctattccctaaaactactggccctcacgctggggaaacgtctacaccggcagccacaacgggacattttccaccttttactctagcgatggtgtccgaaggtattatccaactgaccaccgatcagtacactgcaatccaagaccagctgcgtgctctgcaggccgaggtggatggacaaaacagggctcgacgtcctcctcgagtacccgctactcgcacagaaaatcctcaggtaactaactctagacgtcgtaataaccgtactcgcagggaatgaagggccaacccggagggactcgacttgaatcaaccaacatcaagggaccaatccgcaagatatcccaatcaggaggcacagactgaggaagaccctgaacgacgcaatcctcg

SEQ ID NO: 158642 - DNA, 531 bp, Cannabis sativa
agtttattataatcataaatctatataaaaaattatgttatataattttttttatttttttatatatttttaattattttttcccacactataaaattatacatatttgataaaaataattcatgataatataaattatatttttataacttgcagtttataggaaactctaaattgatgtgatttattgataataaaaataaaaaatataaatatgaagtatttttttaaaacaaaataaaaaataagagattttaatattatttattttaaatatataataaataattaaatatgtttttagtaaaaaaataatttattatagagtcttttaatcaaaacaattttttctaaaagttaggttgtactagctatagtttcttcataatttattcaataagctatttttaactgcttactaaccacctttttatcacaattttctttaaagcagtttttagcttttttaaaagctgtgccaaactggccctttctctgtacagctacaagtcgcagcctcatatatgaata

SEQ ID NO: 158643 - DNA, 549 bp, Cannabis sativa
  modified_base (36)..(42): a, c, t, g, unknown or other
aggttgtttctttcttggaaacaatttggtttcttnnnnnnntaagaaacaaaattctatttccctgtccactgccgaggctgagtacattgatgctggtatttgttgtgctcaattgttatggttgaaacaaatgttgattgactatggatttgaattgggtgttttaactattttttgtgataacactagtgccataaatattttcaaaaatcctgttcaacattcttgaacaaaacacattgatgattgatataaggcatcactttattcgggaacttgttgaaaataaatctttgcagttagaatatgttgatactgaaaaataattagctgatattttcaccaaggccctagactcaagtcgctttgactccctcaaaaaattattgggagtttgcattgtctaatctctcttgtttttgtacaatattgttaagttgttctttgcttgcatctaattgtgtttgatctttatttgacaaatcttgtttatgcttttagattataattagatattatcttgtacttatcatacttttgaggttg

SEQ ID NO: 158644 - DNA, 582 bp, Cannabis sativa
agtgtgaattctggttatctcgtgtcttcttcttggggcacatagtggataaaaatgggatcatggtggatccgaccaaaatttaagttgttcgggattagccatcaccaaaatcggctactgaggttagaagttttctgggtttagctgggtattatcgtcggttcgttgagggtttttcaaagattgcggtacccttaacggagctgactcgaaagaacttgaagtttgtttggactgatcgatgtgagaaaagttttctgaaaataaagcaacgcttgattaccgctctagtattaactcttccttcagataaggaaaagtttgtgatttattgtgatgccttgagacagggtcttggctgtgtgcttatgcaagctggaaagataagagtctatgcttctcgacagttaaaggagtacgagcaaaggtaccctactcacgatctagaatttgcagaagttgtttttgcgctaaaaatttggcagcattacctatatggcgagaaatgtgagatatacactgatcacaagagtttaaaatacttttttacccagagggacttgaatatgagacagagac

SEQ ID NO: 158645 - DNA, 567 bp, Cannabis sativa
tgcatggtgtgccaaagtccatagtttcagatagagatgcgaagtttacctctaaattctggcaaagtttgcaacgggctatgggtaccaacctaaaattcaatacaacttaccatcctcagactgatggacagtccaaaaggacaattcagatactggaggatatgttgcgagcctgtgttatggatttcgtaggctcctagagtaagtacctaccgttgatagaattcttgtacaataacagttatcaaagtacgataggaatggctccctatgaactgttgtatggcagaaaatgtagatcgcccggtcattgggatgaaagaggggagaagaaataccaaggtccggaatcagtacaacggactaatgaagctattgaaaagattaaaaccagaatgctggcctctcagagtagggaaaagagttatgcagatccaaaacgcagaaatgtagagtttcaagtaaaggatcatgtgtttctacaggtgtctccaatgaaggggatcagacgtttcaggaaaagaggcaagttatgccctatatttacaggacctttcgagattc

SEQ ID NO: 158646 - DNA, 565 bp, Cannabis sativa
tggctttgttgggcaaacaaggttggcgctttttaacaagacccgagtccttagtgtcgcgaatctttaaggcaagatacttctccaatggaacatttctctcggcctctttagggaacaatccaagctttgtgtggcgaagtgtttgggaagctcaagctctagttcgtgcgggagttcgttggagtgtgggaaacggagcttctattgatgtactaaacgaaccatggctgcctgatcaacataatccttttgtaagttcctctcatccagctctccatcaagcaaaagtgaataatttattgaccatggacatgagttcatgggacattgagttactgaaggatttatttgaggagagagaccatgatttgatcttgcaaattcctttaggcatccatcaggattcggataggctgttttggacagaggaagctaatgggatgtactcggtcaagagtgcatatactcttcaacagaaactgagaggtggaggcactgagattgcagcctcggatttttggaaagcattatggtccttaaaactgcctcccaaaataaaaaa

SEQ ID NO: 158647 - DNA, 604 bp, Cannabis sativa
ctttgataattaccccgtagcatcctagaatgatgccaacaactttttttttagtttttttttttttgagtaggtaattatcatgtcatatcgatcttcatcataatttttatggtttttttcttatatatatacataattcatattttacagtttaacagttttatactaaggtcagatattaatttaattgttgtttatatatataaaaaaaaatatactttagaataactcactatacatatatgtacacacatattattatttttttttcaattatttaaataataataataatataatctcacttaaaaaaaatataaaatgacataaagttgtaagagtagcttattaatatggatggtgcttataaacaagctctttatataatgtataagagatatacttttgctttttcgttttcactcgtctatgtctgataataataataataataacaataataataataataataacgatgaaagtgggggccggcatgttttgttttttatataatggtgaaatgaggactgtataaaagataccccaagcctctagtatatatcatgcaccgccaagttttgttatggtgcctattaat

SEQ ID NO: 158648 - DNA, 960 bp, Cannabis sativa
attatacttagatggatttgaaaaataaaatgaattatttccatcttagtaataatattcaataaatatttagaaaattattcaatttaagttgtatcaagattaatttaaattaacaactgtaaaggctagggtttcatctcagtcgacgccttccccttcgcaggcggcgccttccccttcgtagtcaacggtgttggtcagtacgtcggcgatcgctcttcccagtcccagtcgaaggtagtgacagtgctggatagttccttccatctctcaatcgaaggcagtgacgggatcttgcttccatgtgattccagccacttccagtgatgacgacagcgacaaagttgtagtgacaacgatgacgttggtctctgttattgaagaactcgggtattgaagttgccgcttccatgtgatcactttggtctctattttgaagtccttggttgtctgatgatcacgcaccatgatttcgacgatgggattctgcagcgacgtaggcagcgacaaagggatcttgttttgagtttggtttaatttctctgtttaattttgttgcttctatttttactgttagtatttaattctaattaggtttttatggggttagattcttagttattttactgttattagtttatctagtaaaatttttgtcttttgtcttccgttcggttctgttaccgtaagtcttgtcttttgtgacatggtgtgattgttttatggtctgagtttggttctcagttattggtttgagattattctaattttttccattgttttctagtttgagagtctaagttttctaggttaagatgttttatggttgtcgggtttgagatggctgaaggcatgtttgggtggggttttctggctcgcgactgccatggtaatatcgtggaggctttcaatcggggtcatgtagggagggttcaacctgaagttgctgagatggtt

SEQ ID NO: 158649 - DNA, 769 bp, Cannabis sativa
ttttttctttctaatttctttgttctatttagcttgtaaattgtaacacaatgtgaacattaatttcaactaactataactatctccaatgtaaaatataaaatttgtgttaaatttagtactagtatatttgattaactatttataattatatttcaatacacaagatataaaataaatacaaaaaataattattattgatcattatttatgttatattttattaaaaatataattttttttattattttatttttaaataataataatatagcacataaagaagttaaagttatgtaaaagttaataaactataataataattagtggtactatacagtaaataaaaagtaaaatttattgtgggtcaaatttaatataatattatatcttatgtcaaatttaacacaagtattttttttcacaagtgtgctgaaatataacaatatactatcttttcagtattttattagaagtgctctaacaaataattagtttaagggacaaaatgcttcttaattttctgtcacattttttaatacaattttcttttctcgttagtttgtgattaactctatttaggcagttggatgatcagtaaagctagccaccacttttaaaggggcaaaagtataaataatttttcaaaacaagtattaataaaacatataatttggacataggagcaaaaataaaaacaacatatgttaacaatactaattaatcttataattgttaaaataacgattactcataatcattaaagcca

SEQ ID NO: 158650 - DNA, 607 bp, Cannabis sativa
gtttttaatgtgcacttattaacttgttttgttttctctgtatactttgtttggttttaggttatatacaattgataagtcccttgattcaattgtctatgtaaagaaaacgaaaagggtgaaggtatgtttttaaattttcatgttttattttgtttgttgtttttttttttattttactgttttttcttgttttagtgttgtttattttatgttcaatgttttcaggacattattccttatgttgatcctggagttcagcagaacgattctaatcaatttgaaactttttccaaaaagttgaaggaccaggtatataattggtttctttttccatatttgtgttaattcatgttcatttattctattttttgattcttttctttaattcttgttgtgtttataattggttttttaaccagttttaatattgtattttttattttgttaacaggttgagcctggtaatgttgcgtttgttggtgctgaatctggaactagttcagaagttccgattgatgcacctaagaaacctgagattaagaaatctcgcgctaagaagaagaaggtgagtttattaactggttctgttattgttgttgttttt

SEQ ID NO: 158651 - DNA, 513 bp, Cannabis sativa
ttggcccttatcctttctggaataattgaaactttttcttagataaataaaatctatgtctagaagttgagaagcttctatatatgtagccattcaaaaaaaaaatgcatcaacatcctactaaagtatgttgcttgcactagagtaatttaaatcaccaggtataccataagccataggtttagataataccaaacctacaatactaggaacagaaagttttgttaagtccattaaataaacatattttaaaaatttcctttcttgttcttgtaataaaaaactttttcgttactccatatgaatggttttaactatagttctcttggctttgcttcatagttccttaatataactatccattacttgtttaaactatttcatcacaagtgtcttccaagttataatagggtgagttccttgaaaccctcccactacgacaaggtaccatgcctttctgtctaagaacaataaatggtattgtcctcttctgttgtatcaagacaacagagg

SEQ ID NO: 158652 - DNA, 513 bp, Cannabis sativa
tttcgacaacttttttggcgccggcagcaattccgacaacttttccgatatcggcagctgctctgacgatttttctggtgccgacagtctacttcagtaacttttccgacaccaataccaaataaaactacaaaaacaaataaaaatattaaatataggctttgaaaacctaatttacatatatatgacatatcaaatatcataaaaatacctaaaaatagaaaaatgttatataaattggtcaaacttaaaaatgtcatatttaagtaatcaacttttaaaatttcttagtgagtataatttcttcttttgttatatgatagtgtatattattgttattggaatattatataaatttttaaaaatttgtaaataatttatagtattacaaatgtaatgaattgcttttaatgaaatattaattttttttttaaaagacccaataaattttttatttattgaaataaagtagttttattttttattattttttttaaaagaaaaattagctgt

SEQ ID NO: 158653 - DNA, 821 bp, Cannabis sativa
ccctaaagatccatttgcatctgattagcctctgtccaggtggtctcctgactactatccatgtcttgttcttgaccagtgattgcttttcctcattaatagcctgcacccacttcttgccatcttttccattcacagcttctagataggatatgggcactgtgttgtcaacttcatctgtgacagacaaagcatatgctgagaaatcagcatagccaaacttctcaggtgccttgatttctctccttgtcctatccctggcaagttggtagtcatctaggttgcttgttgtctctgtttctatctcctgatctgtagaagcttgattcggattctcagttctttgttcaagttccacttgaacactcctgggaacagcatttgagctcatggggatttctctggtgatttttagtggcatttcatcttctctgaagatgacatctctgctaattatgcatttcttgtacccttcctccaagcaccagagtttgtagcccttgattccatcagggtagccaagaaataagcatttaagtgctcttggttgcaacttgtcttgcctaatgtgagcataggcagtgcaaccaaagactttgagatgttcatagctgggtgcttttccagtccagaattcttgaggagttttgaagtttaaagctgtagatggacatctatttatcaaatagcaagcagtttttagagcttctccccaaaagtgcttggccaacccagcccctatgagcatacaccttaccctttccaacagggttctgttcattctctcagcaaggccattttgctgagggttcttgaccact

SEQ ID NO: 158654 - DNA, 552 bp, Cannabis sativa
  modified_base (527)..(527): a, c, t, g, unknown or other
taatgtcctactcagaggaatgccgtgtgtcgtgattataaaccactaatctcgttaatcaaggtccataagccaagtgatttaaaaagaatattaaacttggttaaataaataacttgcaataaacattgacatttttactataaaccaaaataataagttacatatctgggatctcataaaaatttattttcaaaatattacaagttatttggtataggccgacctaagcggaaaaatggaatttctaaacacttcctgttggaccgaacccatggttgtctaacttgactggaacatgtacaagtcatcctcaaagtcctcgatctcatggatgacttgatactacattagccttgcctacataatagagcacccatgagccgaggcccagcaagatagcaaataatataatatgataattataataataattacacttcaaatagtaagccattgcatatatataaactgtgcgatcgcattttatattacattactttatataataatgtcattataataantgtctatgtagcatagacctacgtg

SEQ ID NO: 158655 - DNA, 812 bp, Cannabis sativa
  modified_base (191)..(194): a, c, t, g, unknown or other
caaagacaaagcgtccccaaggaccaatctcacacaacccacaagcaaatatatagacaaatgacatgcaatggcccaataaaggcaacaaacaggcatcacaaagaccatatagaagcatacacaagaagcatggataaacatcattttattattatatggccttgatagggcaagggagtacacagctnnnnccctatcatgctggtgacaaggtgcttcataagtcaccaggtcacctcccctaaagagcttattgggggttttaagggatttccaggaacatacatgattatagctctctatacatatttgagtggaaatacaaaagaaagaaagctaaacaacaaaagactccccaccccaatgaggcgcttggtgcaagacttaactaatgatcaagcaccaaagcatgctcatgttacaaaatggccccattgtgggtgtgccatggggcagcacgccacacctggcaggacattgatgtgcatcccccatttgtggacaacaaattaagtaatggagtgggtcttaacaacccacaaaaatagaggaaaaatatctatttttgaggggcaatctagtcatttgtattcattaattaaatatttaaataacaattttattttacctatttctaaggatattaggcatgtaagctctactatataaagaacattaacctatctctaaaaccctaagttattacgcttctaagctccctccctatgctcttaactctaagtctaaaaaccccaatccactcttctctctctcttctacacgccccaagggctctctctctctctctc

SEQ ID NO: 158656 - DNA, 521 bp, Cannabis sativa
tttgaatcgaattctggccaagaacccatggttcttgaataatgggattctaataatggagaaatttgaagggatgcctcaagattggaacatggtactcaccaaatttcctctgagtggacgcatcttgaatcttcctacccgatcgattacacaaggaaacatggatagattggctggatttgcaggacaaattatctctgttcaacaagcagatatccctaagattgcatcaaaaggatattttacattcaaggtttggcatgacattgcgacacccctatgtccgggctttctatttccatgtgaaggtcgaaagatctggcttccttacaggtatgatcgattaccctttatgtgttttaaatgtggttttgtggggcatgatactcgggtttgtgcagaaatcattcaatgtaaagaccgcctatgaatagtactttatattattaattatttaaggtttatgtattaataattatggaatgcatgttttagaaatatattttatatatcatata

SEQ ID NO: 158657 - DNA, 688 bp, Cannabis sativa
ttttttgtttttctaattgatttctaatatatgtatatatataaaaatatttatagtattaccatttaaatgaatagatattaatgttactttggttgtctgtttaagttttattttgaaaaatatacattgtaggattttcttaattactatccccataaattgtgttttctattcttgaaattgatttttcttgctgcatcatctcacctaataattaataatattttttctttaatttttaatcgcatcacttttaaataacatagaaaaaacctagcataaaatttagtatacgtgcctcgcacgtaagtttttcctagtatataataatatatcaataatagtaatataataacatatatatatatatattgttaacgctttatatatataataatatatcaataatagtaatataatatattaatacattaataatattattattaataataacaataagattaataataataatataataatattaataaaaataattattaatagttatcctattattttttagatactaagaaatttttacttctaggacactaagccaaatttcatatacttctaattactctaatacctacattatcaacttatcacgatatttccatcaattatatcaattaaacccgttatgatatttctggtccccgatcgagtctccaaggtc

SEQ ID NO: 158658 - DNA, 593 bp, Cannabis sativa
gtaaatctcatgttcgacgaacaaaggcgtatgtttgccgaatggagggatagagagatggaggcattaagggctcaccatgcagagatcgaaaatcatagtaggcaggctacgtgctgatacgaaaagcctaccaaactgtaggtcagaaactgccgaacgtcattcccctgggtgagacggacgaagatccagcgatgaatacttctaatacggcaaatggtcagccgcccaatccccggtcatgagttccactcgtgggccaagcggtaggcgggcagaccttgtctagtaattcattaggagaagtcatacctgatggttccaaccagataaatggtgccattccacccgtcaaccaagcgaatcaattgttgaggcagccaggcacttctgtattcgaaaggttgggaacaacccatgacctaaggaatgatctaaacagaaggaggggagtagacgatcagaatgttacaacaatcttgtagcccaggacccgtaatcaatttctcgctcagaaagatgctgatgtaattcaaattgactagaatgctgagcaggttagccaagccgtacaggctcagctagacgaa

SEQ ID NO: 158659 - DNA, 501 bp, Cannabis sativa
aactaagcgggctttacactgagtattcccaatgatttgcttgatgttctcatatcgcttaaagattctgatgaaagcccacttttgtcgaggaacaaaattcgagcacaaatcatggtaaattaagtcaatatgatattaatcagtatatatatatatatatatatataaaggaaagtttaaagagaggtgatgtggcatcttgtgtgagttttctttgcttttctttttttcttattttttcacatattttaatattttttatgcttttggtaatatgagtgtcatgctaaacaagtcccacatggtttaaaaatcattgtggtgatataattttacattatatagatcattattcttttactttggtttgttttaaaattagtattatttattttttataagggtgattgataaagttaatcttgctcaattagttgtaattttgtaaatgcaatatttttttttttttttgtttttttcaattaaaaaagcatttgc

SEQ ID NO: 158660 - DNA, 530 bp, Cannabis sativa
ttcttgaatttaatacatttagttaaattgaaaaattaaaatatctaagttgattgtcatcattatacttaaatatttattgatttttcaaacaaattattcaagtgaaggatcaaataatggctagggatttttcaaagggcagctaaactaatatcttggagtaaatactcgttgttctcccataatggagagcaaaaatggtatgcctcttccatatttggaagaggtatcccaaaacataggtacattacttggctagcgacctggaatcgcttaaagactaaggatagattgatctatgaaggtgtttcaatagacgatcgacgcttaaaaagtgagtcacatgatctttattcttccaatgtgtgtgcaacacaacaggaaatgcctccatagtttgaaggtgtgctcaagacgaggtaccaatctcagaaaacaagtgtatatgatcacctttaatacttgtgtgtattttgtttgcaaggctaggaatagatgcctttgttttattagttaagcctactttt

SEQ ID NO: 158661 - DNA, 588 bp, Cannabis sativa
tatccacgataccgacaaaaatgtacacaaatttaataacggggatactatatcttccattaccataaatgagaagcgactgtagctgagagcaatccaagaagagaagacaatggaagaaaagatactatatctttcattaccataaatttacaattcattaagagaaaggcaataaagttaacatcaaagtgtgagtgtgctacaagaagagaagatgatcaaagtctgtaacgccctaatgcttaggcacattacgatgactttttaattacagtgcaaacctttctaatcaaagagttttctcaaaaattgtgataaattaaaattttgatttaactttattttttttaaaatatatacatatatatacaaaattgggatcccgttattttaaaatttatattcaaaatagcttttacaaacatgtcacacaacaactacaaaatgaaacctaagtcgtcccgagaccgaactctgcaggttgcactgtcttgacatgtacaatcatcctcgagctctgaactcactactttttagttttggtcttccctttacctacaaatgaaagaaatatatgtgagccaa

SEQ ID NO: 158662 - DNA, 550 bp, Cannabis sativa
  modified_base (221)..(223): a, c, t, g, unknown or other
  modified_base (278)..(285): a, c, t, g, unknown or other
aacccatagtgaatgagtgtcatgtccatacatagcaagtcaagtactcaatcatagtgagttagacggtggtaaccaaacccgaaagagagaaagagatccaagtttgaatcttgataaatgctctgctacagaagggaatcaagggctagagatcttgaacggaagaagtcattatattctgctgcaatcaatgaaaggttttcttaaacccttatgtnnntatttcattgttttagagaatttacatttaagatgttaattcaacatacttgttnnnnnnnntagatcctggtaaaatattctcaacattttttccgttgaaaatttcccttgaactattgagattgttgaatttaaggatatttgtctaattttattcaattttactaaatatgtgattgtctattcaccaaatcatgctctttagactttgatatctactaatgtcttccaaattttgacatgtactaaattaaaccccaactttcatccatattggattttctttactaaaatttttttaaaaaaaaaaaatccttaagtagga

SEQ ID NO: 158663 - DNA, 598 bp, Cannabis sativa
aaaattagtgaaaatatataatattgagttattagatagattattacaattttaaaatgatatgaaccttctaataaatatatagtgctatatagtatacttccttaaattaatagaaatacttatgtcaaaattttaataaagtattatttgtcttaaatgaataaaatagttaagttaaaatattaaaatattacttgacatacatatttctctattattaaaaaatatttatttcattatttttgttttttattatattatttatttaattgtcatatattatagagtaaatctatagtacaccttctaaaaagatgtttcagtagattccctatctgtattagcacccaagagaattttttagtttatttttttatgatcgtatatattatagttatttagaattacttgtacattttcaaaaaattctgagtggtttataatgttgaaaatacgatttacatattttattgtacgcacgactgttttctcttatacacatgttaagtaattgtttaaaccttatttttgatattttaaattatttataattttttaaaaatttacaagtgatcctaaatagctacaacatatg

SEQ ID NO: 158664 - DNA, 607 bp, Cannabis sativa
aattaaatattgagtttcatataattaacttaagaaaataatttttaaaaaatatcgctaactaatcgtgaagtgtcacctatatataaaagatgctagacactactggtgtccaaaaacaatgctcataatatttctatttattttttttctcaattctctcatttttttttaattatttttacaaagttacatagacgttattgtggtatagttgtttcaaataaaaaggtctctgcaatggtcacttctgggaagctattcactcactattatcgatcctggaaggtgtcttgtggaatgatagtcgagttcggaaagaagttcccggatgagtatcatgtccactccgggtccagtcttcaggatagctagctcttccctggaaagaagttcaagctgactagttatccctactggattgagagttttgaatagtcgacttcggtagacttatatcttatctggaagcgtcttcagctaaggtctgtgatcctcgagcccagaagctcatttatgttcccggaggccctagtgcttatgctaacatggagacttcgctaaatgaggagttggttaagttagttatttctaactaacttaacaa

SEQ ID NO: 158665 - DNA, 513 bp, Cannabis sativa
ctacagatcaactatccggtgcaggaattggccttgtcacacctgggggcaacacctacacgctgtactcaagttcggattcaaagcatctaacaacgaagatgagtacgaagctgtaatcgctaggctaagactagcccgagagatgaaggccgaacacatcgaaatctgcaatgattcacagctggtggtaaatcaagtatccggagaatatgaacctcgggaagaaaagatgatagcatatctaagcaagatacatgatctgctcgcacaattcaaaagctacggtctcagacaaattctaagagaagaaaatacaactgcatacgcgttagctcgattggcaagcaacaatgtaagtgacaaggcaaacctggttccaatccagttcctcgaagtgttgggttttgtaacctatataaaacccttaacaatctgattagttatcaatataagaaatttgaagtgatttatgtttgcatgaattttttatgctaatggtttaatatgttt

SEQ ID NO: 158666 - DNA, 604 bp, Cannabis sativa
ccccgtgtactatgtcagcaaatgtatgttaggggcgaaaatacggtatcctgtgattgaaaagctagtttttttggctcctgatggcttcaagaatgttaagaccctacttccaggctcaccccatcaaggtgttgacaaaccatccgctccggcaagttctacagaagcctgaagcattcggaagactcctcaagtgggctatggagttaagctagtttgacatacactacatactgcgcacgcctataaaaggacaagtgctagccgactgcataacagagtgcaatgaagcagaagcaagcgcgaacataccagtgccacaaactccaacatggaaagtattcgtggacgaagcgtccagtgaaaacgaatccagagctggaatagcaatgatatctacgaacggacttcgactccaggcggttctacgctttgaattcccggcttccaataatgaagctgagtacgaagccctgattgcagggttgaaattagaaaaagccgtgggagccatgagagtagaagtcttcagcgatttccaattggtggtaaaccaagtgtcaggagaatatcaaatgtgtggagaaaaaatggctgcgta

SEQ ID NO: 158667 - DNA, 532 bp, Cannabis sativa
aaacattcccatcctgagcagatggaacagaaacttgaggctgaaagcctcccaactgaagctcagagctaaccataggagcagtggcagttacaatcacagaatcagtggtataaggactaaaagcagagttacttagagacaaactaagatcagaccggttgaaaggaggaatcatctcacgcacatttgggttaaaaggagttggaatcataatgccagtggtttgcagggtctgtgtaaatggaaaggtagaggcagtgttgaaattgaggaaggaaggaaacctaataggtaaatccaaggagccactagcagatatactaagattgacaggaggaacatttagcatggtcatggcaagtgggtgagggtactgaaaaggagcacccttgtcagaaattttctcttttcccctaagcagaatattgtaaggacaaagaggctcagacatagtttcatcacacttttgcaaaaaagcatgacaatactttttggtgtgatcaagacgaccacagtaaaagcagaaatc

SEQ ID NO: 158668 - DNA, 619 bp, Cannabis sativa
  modified_base (260)..(262): a, c, t, g, unknown or other
  modified_base (593)..(593): a, c, t, g, unknown or other
taaacctctcaatttgttctttcctcatgaccatccacatccttgactgtgatttgatcttcaataatttcatcattgaggattataaaacttagtaaaattcacccaaaggatccaaggttgtttccacacatcaattttatcccccttccctggtatcgtcacactaccagacctcagaatacctcactactacaaatatcggaattcgcgacggtcctaaaaataatttttttcggggaccgtcgctaaaaaaattnnntaactatttaaaaccgtcgggaaaaatttagtattcccgatgggttaaaatcgtagtaaacaaaatatgcgacgttttctaaaaaaaaattcgaatttttaggagagccttatacctaacggtttaaaaccgtcgcctatactataggtgacgattttaaactgttgggtataagggcccgttacaaaattgtcacctactttttgccacatttcccacgtgcccacctactttttttctatttcccacatgccacctattttttctccatttccgacaccttaaaacaaaaatcttaactctccaaaaccccacccacgcctctgcaccntcgccctcctctctcgccgtcttcct

SEQ ID NO: 158669 - DNA, 547 bp, Cannabis sativa
atatatatatttatatatatagagtgtataatttgccccacaaatacttaagtttaaaggttaagtaaattgtcacgtaacgattcttgattggtccaggtcattaaatttttatttttataaaaaaattaatttaacaggtacttattacagagttctaaaaattaaacttaggtatttatttacaattgaaagttaaacttaaatatttagaccgcaaataactctaaatatatctatatataatatgtgtctttgtaatagaatttttggtttataacagtatttttttttttaattttctatgttaattttaatagaatatactattacttaaaaattacttttataatattattatatatatttaaatataaaaattatataaatattttatataaggaaagtttagcttaaatataaaatagggggaattatctcatatactattgttttaactttttttcttttcgaatttacggtttgggtttctaaagtagttgcagcgttagttgcaataggaattttcatacgattttttgttgca

SEQ ID NO: 158670 - DNA, 577 bp, Cannabis sativa
gtttattttccgcatttcatatcattgtatatgctattttacatacactatatatatagtctaacaatctgtgttctagctagcaggcttcactaaacaccctagatgacaaaaagtacacatcaattagaagcatcttaaaacccaaaaccgctaacaaacaaatacaaaaggagataaaagaatcactattttaggcacaaaagatgaagaagagagaatagatcttcttgttgcaatcttacctgctacgatgagcctggaattttatatttaaatcagtgtgggcagaatatgaaatgcgtaagtggtatgaaccaacatgatctggaaggagatacctaaaataaaatagcaaagcacatattcttactcaagttaatggatacgcagtaatgtcaaattcaaacagtcttaaatatcaataaattccataataagaaaggtatgttacagagcatacctatgctcattccatccaaggcattccttgtgaaagatgcaatctccgcatcactgaactgaatcaatgcctgcaaatccaaccaaaatgaggatgccatattgaaaatgcact

SEQ ID NO: 158671 - DNA, 553 bp, Cannabis sativa
  modified_base (368)..(368): a, c, t, g, unknown or other
aaaggacaatcacaatgggtgattataacttacaatactatgaaggggaagaagtagcttgtatctctaacttagtggctacaccagtactacttcaagaagttaagcaacgtcggtggcatgatgagaagctaagatttatttggaactgaatctaggatggtgagcaactagatgggtggacagttaatagtgaagggtatctataccatatgggaaggctagtttttgcttatatccctgatcttagggagtccattttgattgaggcccatagatccaaatttgctgtacatccttgaagtacgaagatgtaccaagatttaaagagacaataattgtgggaaggtatgaaaagagatgtggcnagatttgtagctaagtgtatagtatgtcagcaagtgaaggctgagcatcaaagaccctcaggtttacttcaaccttcgccctataccacaatggaagtgggacaagattacaatggactttgttactgggttgccattgacaactttgaagcatgacactgtttgggtgattgttgatcgtttaa

SEQ ID NO: 158672 - DNA, 526 bp, Cannabis sativa
tttaaactagggttcctggaaaaaccccgaccagaaaactggtttcccaactggttaaccggtttactgggtttcctgagggcaaaactagttagccggtttctcagatcccacaaaaccggcaaatcggatgtgtgcagagaaaccaaaaatcgaccctcacaccaaaattcaaccctaaactcaatgaaaccttccagaacacctgtacattctataatgaaccaaatttaagcaaaagaactcatcaatttactcaaaatccaaagacacgatgaaagccctaggttgaattcccaaataccaatcttgcacaaaacccattcaactcaaccaaattagcttaaaaacaacataactagcttcaatctagctctagaatacaaaattaaacacttctaaactaaacagccacataaaacacaaactcaacttcaaaacctaacttcaacttcaagaaaattaaagaagagaaagctaagaattaattgttgggttttatgccctaaataagatcggaagagcg

SEQ ID NO: 158673 - DNA, 657 bp, Cannabis sativa
attaaacaagtaatgaaattaaatttgtttctttattaataattgaatagaaaaaattaaattgaaatagaattttatttagggcacaaagcccaacaaacctttagttaacttgggaagtctgtcatagtctatataaccaagatgtaactgccatagatatgtttcatctttattatcgatcttttacttttttggtttctaggctttgctattttgaacaatttgttattaagccccattggttcatcttgtataagaacataaagcccttattccatagtagcaacacatatttgaatatcattacgagaaataatagaattaaaacttgaaaaattcaatttatattgttgaaattttaaacatgaaatagaaatcaagtttatactagaataataggatgggtgcttgatcgaattgactgccactagtcccatcaatgctggacgacccaacaatatattataagtcgatgccaggtcgacaactaagaagtcttgcataacagtggcagataggggtgcttcacccaaggttaatgcgagctcgattatgccaagactggcaatgcagtctctgataaatctgcaaagattcaccatacaaggcctcaatttggatttttcgagccccatctgttggaaatattttacc

SEQ ID NO: 158674 - DNA, 540 bp, Cannabis sativa
  modified_base (67)..(70): a, c, t, g, unknown or other
aaaagcatgcttgagattgtttgttcttggtgttgcatgcttagtgaattggatgtttaagcttgtnnnnctcttgatttgtgttggattgagcttagagtacgattctaggttgttttcatgcttaaatctaatttttagttattgttttattgctggaaaatatttggttgtttttgatgaagctcttattcaagagcttgatgttgccatgaacatgcttgaattctatgattttttatgcaatctaaattgagggtttaatttctggattttaatgcttgatagtgtgttttaaatccttaatgtttactagttgttgtaagtagtaaattgagattttggttgtgaaagcaagcttgagttcatggaactcaagcttggtgctttaatggcactttttgattcttagtgaaattattgtgtttaagttgtggaatatgtttattatgacatataatgatgccctggaaagttttgtactgtttggggaagatttgagtgagttttgggggtttaaagattgaaaaatttcgtgtt

SEQ ID NO: 158675 - DNA, 752 bp, Cannabis sativa
  modified_base (33)..(33): a, c, t, g, unknown or other
caaatagactcaatttcacttacaattttcttnggcagcaacatcacttggcaccaatatgaatgaatggccatgaggactgagttgataagtactactcggctagcaaaggataaattcctggtgctccaagttttgatccgagccatcatcttttccaccaacaacttgcattcggctaaggatatcctttttgcacaaatgggcacacccaagtatttgaaaggaaaactctgcttttggaacccagagacatcaagaactctttgaacttgaacctccgacatgttgctacaataaacttctgatttaaaagggttaggaaccaagccagatgttttggagaagagcttaagcccctacaataagaagtaaatgctcttgaagtcaccattacaaaataataagacatcatcagcaaaacttaggtggttcagttcaaggcctccacatctttcacggaatataaactctgacttcttcccaatcctcctcatgattcgagacaggtattccattccaagtacgaataaaagtggtgacattggatctccctgtctcaaacactgcttagcttcaaagaaaccatgtaatgaaccatttaacattaaggaaaactgaggagttttgacacaaatcataactagtttgatgaagtctggcggaaactggaatccatgaagcatctcttctataaaattccactcaatggtgtcatatgctttctgaaggtctaacttaatcatacaatt

SEQ ID NO: 158676 - DNA, 659 bp, Cannabis sativa
atttgctaactagtttgggtagaatgactcccttatgaagccacacgccaaaaggcgatctactttctctttttacgcttggtacctcacggggtccattatgcggtgcttttgtcagaaacctcgcactttgaggtcaatgtttaaccggtgacacatgacctgcggagatattccgaacatgttcgaatgtttccaggcaaaaacatccaggttttgtttgagaaaagtaatgagcttttctcgctgtttaaacgttagtttagaaccaattttcaaaactttattattatccaaaggatccataggtacctcaatggtatcttccgcggcttggttagtagtggtataatcaaggacccttggatccaagtctgacttttcttcatgtcgtattttctcgattctgaatacctcttgtcgagggtgtggtgcttctgagatgtatatcatgttaaccgacttgtttctttttttgcgagctttaataccgcgttgtaacattctcgcgagtctgattggacttctcgcacaaatcccactccagtgggagtggggaacttcatggtaagaatatagatggatgtcacaatcttcatttcctttaggataggacggccaatcactgcattatatgctgagtactggtcgataacagc

SEQ ID NO: 158677 - DNA, 617 bp, Cannabis sativa
  modified_base (589)..(591): a, c, t, g, unknown or other
tagggcacaaagcccaacagtaaaaacctttgtgttcatatctttcttttactgctttttttttctttgcaaatctatcactatttaggctcaaatatagttaatgaaaatcggcgttaacagtttggtgctttcattaagagccttcgtgaaaaaagctcagaaaaaaaaaacctccttacatacaaaaaataattttcttcatggctggcaacggagagaatgttgacacaccacatgaagaaacccctcaccaacctagaaaagagcaaatggggtccaagaggccttccaactcacaatctaaacggaccactcgttccaggttgacccaacctaagggtggcccaagcactcggaccactcattccaagaggacccaacctgagggtggccctagtacatgaaccactcgctctaggaggactcaacctgagggtggcccgaatacacggtccacaagttcaaggaggactgacatggaaatggccaaaaccctggagtaagggacgaagaacccaatcttggaggtgctcagtccatggaagatggtgcttatgaccttacaaggtgttgggttttatgcccnnnataaaactctttacaatctgattagt

SEQ ID NO: 158678 - DNA, 541 bp, Cannabis sativa
  modified_base (486)..(497): a, c, t, g, unknown or other
actgtttatattttctgtatctgttcgtattaggaattgtcttcaagttagttatattaaaaaaaaaattattaaaaattaagctcgcggtcctatttttatcattttaaaactacaggatttattttatcatttaacaaaataaaaaatctaattaataatctttccaaaatagaaagcagtatttacttatttatatataaaggctttttttaaaaaaagaaaaagaaaaagaatatataaggtacgagggaaaagtgggcattaattaaaaagaaatataaattttagaattattatcaaccggacacgtggatgtttagtcactattacgtgtacggcaaacactattcttatttttgcagcagatatgtttcagtttcaaatcacatcacactctttggatcaataatttaaggtaagtctacaaatatatttttgggtatttttacaatacactttattaaaagggtaaatactattttnnnnnnnnnnnnttgcaaaagttacagattggaccctgtgttttgttaaatgacaa

SEQ ID NO: 158679 - DNA, 516 bp, Cannabis sativa
  modified_base (34)..(36): a, c, t, g, unknown or other
  modified_base (63)..(65): a, c, t, g, unknown or other
  modified_base (91)..(93): a, c, t, g, unknown or other
agaccaacacccaaaccttaaatcataccatgtnnncccaaaccttaaatcataccatgtgannncaaaccttaaatcataccatgtgacnnnaaattgaagccgagacttgaagcggtcccttaaaccctaaaccctaaaatttttacacatacccccaaatccctaaacactaaacccaaaaccctaaatcctaaaccctaaccttgacacgggtacaaacaaatacccacaacgagattggatcccaggccccaaacccagactcggataaagactcgaacctagacctagactcagaacctaaactcggatcggaacccacaccaaaacctcgtctgggacccagaatttgattagaacccagatcacgatccagactcgaactcgaaagggactaggactcagactaggacctggaaccagagtaaaacttgaacccatactgtgacctagacttggacccaaactcgggatccaaacccgaacctaaacttggacctagaccgggaccta

SEQ ID NO: 158680 - DNA, 690 bp, Cannabis sativa
  modified_base (228)..(229): a, c, t, g, unknown or other
  modified_base (347)..(349): a, c, t, g, unknown or other
ttaatttaatatttataaaattataccctaggaaaattaatattccagtaaatattatgaaaattacttaatttaagttggaccaaaattaattaaaattaattttcaacttaaatctaattttctataaatatatatgattgaattcgaaacctaatgtattaaagtaatacattttcgaaataatcattaaaataaaataaaattggaaaaattattctaatttannttgatctaaaattaattaaattaattttcaacataaatataattttcccatttaattaaatctctaacaaaaaatattaaatatttaagtgtattgaataaaatcaacttaaatattnnntttttatttaattaaatatatctagaaaaataccaaaaagtctacctaaaaaatatctatctagataattcataaactaattactgattttctaaaaatataatatattttagtctatttattttatttaaatcattaatgaaaattacttgatttaaattgatctaaaattaattaacaaattaattttcaactaaatctaattttcgaaattgaaaaaaatcaaaatatctacatttaaaataaatgtatttcaaaatttatgttaaacatgattattaaaataaaataaaatatattcttaaaatttttctaatttaagttgatctgaaattggaaaa

SEQ ID NO: 158681 - DNA, 687 bp, Cannabis sativa
ttatttgtgaaaatctgtaagagtctttgcgcgtggtaggatccatgagtactaggtgagtttactgtgatataatacctctaaatgaaaatatctccataaaactgtttaaataatggaaagttagttgtttcctggaagtatattcccgaatagctaacttgtccatccagaagaagtctcgtagaatgatagttgtcatccggaagtacgttcgcggatgtttattatgtccaatgggtgtagtctttagaaaagctagtcctcctccgtaaaggagttctggatagttagtacgttgttcctcttggaaaggtgttccggatagtcgactccaactagctcttttcctatctggaagcccattcagctttctctttagtccgttgttcaggaagcgtatgtctcattcggaagcaccctatcttgtgctgacgtggagattctattacaaagagtttgttaagttgtaactaacttaacaacttaacggttgcagccaccgacttagaatcttcatcttgggcctataaataccacaaacacttatcatttcgattcaagtataattaattatatgccaatcttatttataatagtagtgattatgatgaacaaactgattacattctattgttagatgaaacaaaacaagaatgatacctatatatacgataatgtttcgtg

SEQ ID NO: 158682 - DNA, 684 bp, Cannabis sativa
  modified_base (43)..(60): a, c, t, g, unknown or other
caacatgcgttggtggaatgctcgtttgcaaaggctgcttggnnnnnnnnnnnnnnnnnngtcggggctggggctgcaacgttcagcagctagttgttgggaatttttaccagggagcacgtagttgaaatagaggaagcagcaatggtgcgttgggctatttcgtgtgcgcgaaatgactttgtttggcaaaagaagagttggcttgcttcaaatattgtaacatcagctaggaacatgcttgatcaatacaaattcgctcaggaaaggaagggcttttcgttgtctcctttgaatgatggggggcagaactgtgagcgttggattgcacctgtgttaaacaagattaaagttaatattaatggggctttatttgcacaagagggccgatttggagtgggctgtgtagctcgagatcatcatagaactatggtagaaccttgcaagaagggaaaggttgggtatgtccaacccgaaatcgctgagattataggcatcaaagaagcgttgagttagattgcgactcatccctgtgagtctgtgacagtgtagtgttagaaacggatagtttggtgtgcgtccaagtagtccaaagtaaagtctttatgtcctcaaaattttgtcttattgttcaagatgttaggaatttacttttgactttatcttttgttgagttatgttttg

SEQ ID NO: 158683 - DNA, 509 bp, Cannabis sativa
tctctctctctctctctcacacgtacgcctctctcttatagtgtggtgcgtgtgttgtgttatttcctatctcaatcatagagtctcatgaattgtatacacatagtgatttactaaattacattatccaaatcggatctaatagcccaatttattcgtggagtgttaataccatggtgtgaactctttaacaagttcttctggattgaatgttcgattgaataacacaaaaagatagtaaagaaaccctgataggcaataagaggtaaaatctctaaactaatagttaaatttgcattatgtataattgtgttgagatccactatttatggttcatatcagattcaacaattatttttattaaatccaaaattttattctacttccgctgcaactctaatatgaactataaaaactaacgttgttgcctaatgagacagccaatagagtagtaaatcttccttgaattgttgcctaatgagacaactgataactcttgaataaagagt

SEQ ID NO: 158684 - DNA, 567 bp, Cannabis sativa
cataaggagacataaaacagttcccaaaaaccctcaacaaaatggtctagcagagaggatgaatagaaccattttggagagggtgagatgcatgttaatacaagctagattaccaaagaacttttggggagaggttgttaacacaacctgctacttaattaacaaatgtccctcatctgcaattcagttcaaaaccccccatagaagcttggacagggaagaatgccaactatgatcacttgagagttttaggttgtgttgccttttctcacattaggcaagacaagctagaaccaagagctagaaaatgcatttttcttggttatccagatggagtaaaaggttacaaattgtggagtattgaagaagggaatcaccaaaagtatttcacaagcagagatgtaacctttgatgaaagcagaatgtataaagatactctcaaaagcaaccatgtaactaatcatttgacaaatgatagtgaatctcagtttgaggtggagccagatcagaaaaaggaagatgcagaacaaatagaaagagaagaaatagttgaggaagaattagaag

SEQ ID NO: 158685 - DNA, 557 bp, Cannabis sativa
ccctatccccgtgtcacgagtcaagaacgttcatacgacaaaactactgaccataatatcattctatactcggtacgactacgccagtcatactctagtcgtaccgatgtgatactgtgatactatcaagtaatatagttctatcaaccataatatcagcctatactcagtatgctagtcatactcttgtcgtaccgatgtgatactgtcagataatactcaaggcagcatacatttatctatatccaatataatactaactatactgatattgctattataatgtaatctaacaggcttaactaagatgtgcgctaaacatgtaaacatttatgcatattgttatactaatctaccttgtttctgaatttaggtgtgtcgaccaacctgagtggaacagctgctcaatgatttataggcccctaaatcacattatttacaaaactggtaagtgacacgctaaatcactttacggggagttaaacttgaaattagaagtttccctatcgatggataacatggcaataccctaaataatgcaaaaatggaaaaactag

SEQ ID NO: 158686 - DNA, 552 bp, Cannabis sativa
atttaatgattatgacgagaaatttatttataatttgaggtttttattataaataaattaattataattattaacgtggtttgtgtattaattcttagaattaataaaacaaacacattaacctaaaatattgagcgggagaaggagtacatgtcaatataatctatgaccaacattattggtcaacactgagggggtatagactggcatcgaaacgactttgttttagtccccctaaggaagttatgtgtctatattattgctcaatgttgatctcttaactaaaataagaggaaatgatgtattttagtgtggcatcgacccttaaggcgacacactaagttaaatcatgaaatctaaaataatgagttacactcataaagtgcaactaagcttcatagtggttagttgttaacttggtaaaaaaagcggtacattatattttgataggaaaatacgagatatttaagttttaaaataataaagatgagaattgtctcataggctcaatgaaattgactcgataccgaccctaaggcaacgatcaattgt

SEQ ID NO: 158687 - DNA, 532 bp, Cannabis sativa
attcttattcctattcccattctcattcctatattttcattccttccaaccaaacgcttcctaagagtgttgaatttgatcatgaattctatcaaattctatttaattttactatattgtgacaattaatgttcatgtatcaaatcgtgcctctaaattttaatatgtaccaaataattgtgcttacaaaactttaacatgtaataaatcgtgtctcctgaatttttacccatgtcatgcgtctgttagtaaaattatatacgaaagtctttgaatctaataatctcaataacttggaggtaactttttattgtctaaaatttgaaaagtatgatttggtacataccaaaattcaaaaacaaaaattataattaacctaaatttatatatatacaaataaaatatatattatattacacattatattatttttattctacaaaatattataatttgtagtattttcaaaaactactaaaaaaatatgtgtaattttaaagaaaaaatatttttttggggtttattgaaaaat

SEQ ID NO: 158688 - DNA, 660 bp, Cannabis sativa
ttaaaagttattaattgttattgactatagatcttgaacatgtattcttgataaacttaacaaccgatgttattgattattattaattattaattttgaccaggtatcgtcaataaaattagaacatcatttactggttattgatctcgaatatgtgttactaataaaaatatacatatataaagttgttagtttgttttcaagttctgtctaaaacatgtaacttgaagatatagagatgaaatgagagtttagatatgatgtataaatcatgaattctcatattctagtatttcacactattcttagactttgtgattaattattcaaaaatatattttagaagggatgaaagtttaaattttataaaatgataaagttttattgtaaatattataattgaatttcttaagtgttaagaaaaatatataatagagacttaaatataaaaataaaattattaatattaattactaaaaagggtcttattaaatattcaaattacaaattaattattttaataaatagttaatttaattctaaaaaaggaattttacatgttggtaacatgctattacaggtcaacaaaaatgtaaccatcatggttacattttttttttacctgtaataacaggttactaataggtagacatttttttt

SEQ ID NO: 158689 - DNA, 671 bp, Cannabis sativa
  modified_base (64)..(66): a, c, t, g, unknown or other
  modified_base (221)..(224): a, c, t, g, unknown or other
taggcttagctgttgatggatttaatccttttggcaacatgagcctttcgtatagtatgtggcnnntagtgttggtgaattacaatttgccaccttggatgtgtatgaaagataacaaaatagtaggattggagagtaaaacttttcctcgattgatagggcgagagattccactgcatgtgcctggacattatctaagttgggcaaatgtcccggagcannnngaacacctcatcttaaccaaacttcgaataaatatttattaatttatatctaaattaataaatgtgattattaccatgttattttttaaaaaaatttgtcatatgcaacattattaccagttggacagccatccaaaattaatagctatttcgatagctgagatggctgagaaatacaaaacaagaaaaaatattagattacaacatttcagagaatattacaaaattccagaagactatgaaaatgcagtcaagaaccctcccaatgaacttaatgaagaccaatggcggctgatatgtcaattgttcacaactcctgaatttattcagtggtcgaagcaaaattctatcaaccgacaaaagatgaaattctcttcaacacaagggtcggtaactatggctgagattcttcgtcaaaaagtaagttaatatattaaatttctattt

SEQ ID NO: 158690 - DNA, 783 bp, Cannabis sativa
  modified_base (704)..(714): a, c, t, g, unknown or other
atataatttacttagtcccaagttagtcccaagtgtattcttggtcccaagtgtattcttgaatagaggttctactgtattaaattataagagtattatttttgtctctaaccgtaaatatacatttttaatattttagtatttagagaaattatactcaaattttctcattgtacatatattttataggtttgcgaaaaaattaaaaataatttatagtactgaaaatagaaataaaaattatgttaaactctgttttccatatatatatatttaatttatccttaattaatgtctaagaacatatacttgcaaaatagtaagctgaaaaagaagaaagaagaaagaaacacgtatatgacatgcaatataaaatggatatattaaaagggtagggtctattaatatatcaacaattattatttgacaagaacaacttaattcttttttgactttttgttttcccacaaaaattcctattcctattgtaatgttcattttcgtagcttaatttaacaataatgaaaacatataacgtattctaagctcaatcgaggattctttgacatgcaagtaaggttagagatatttctctcaacaaaattcacttatgtggggacatcaattactcataaatttgtttatttgtggcatcctactcacatgatataatttctctcaaactgctacttttagtgacaacnnnnnnnnnnnaacataatttttttgtgacttttagtcataataaaatgttaattatgactaaaacatagtatttagtta

SEQ ID NO: 158691 - DNA, 536 bp, Cannabis sativa
  modified_base (321)..(325): a, c, t, g, unknown or other
ccaagaaaacgacaacagtttttaggtcgtttctatcaaagatgatgctgtcttagtatattttttttttttttgggtgtaatgtaaaggtatttttacaatcaatagcttatagcacgaaggttttaggttcgaaccatgacctctcctttttctcatccgtccctcaccactatagttgtcttgtcttggtattaatctttcttatttatttatgaaaaatgtcatttatagatcatcatctattttattaaatgataaaatagaccatatattttttaaaattatacaaataaaactctaaactaattttttgtcaannnnnaacttaataataatctaatctagagatattatgataaaactaattacatttctgtatcgtctatttttaccattttaaaaaatatagaatctattttatcatttaataaaataaaaaattcaattaataacttttacaaaatgtcaaaatagtattggaaaattctacaatacacccccttttaggatccgaaataattttttagtcaatt

SEQ ID NO: 158692 - DNA, 501 bp, Cannabis sativa
  modified_base (270)..(270): a, c, t, g, unknown or other
atatacaaaataatcacattttcaaatagaaaaaacaacaaaaatggaaatataatccgaaatggaaaaaaaaacccaacagtcatataaatcagaaatggaaaaaaaaaataaacgaaaatgaataaaaatttcttacctgagaagcgtccgtctgctgcggctaaggaggagcaccggtctccgcctgagagggaggacctcgcaccggtctccggtctccgtctactgcgccggcctcagttggggaaaatttttgggtctggttgngggtatcgtgcgagagagagagagagagtactggggtatggagacgatttgtgggggaagactttagggctgatatatattttattttactttttaaaataaaatagtatagtgacctgccacgcgtgtgaccaaagagggatcccgacactttttgcgtgtcactaaagccacgtggctttagtgacgtgcaaaatgcgtggggatccctctttggtcacacgcgtggca

SEQ ID NO: 158693 - DNA, 632 bp, Cannabis sativa
tcaagttttttctggttcaagtgattacgaagatatgattgttgccggttatagctgctaatggacctcgtgctactcatggacttggtcctactcatggacctcgtcctgctcatggacctcgtcctgctcatggacctcgtccttgagtaactttcatttttacttgtgcctgtactctctcgatcagtattgcgatgagttctttcccctccttgcattgatcgactatgggttctcgtgagtcccgagctaacactcgcctcatcacgtcacgtccttctcctttgggtatgggttgttgcatgccccctgctggggtttgtacgcgccccttccctattggttcgagaaggatgttggcgatgtctcggtggtgacccacctatgccaggttgagtctcaggatttccctcattctcacgggggatttcctgttccctggtcccgagtcgccttctgttctcatttctgtgagaaggctctggttggtcatttagttgtttattctcaaggggaccctcagtttctccaggttgttcttcctaagcgttctgaggattctcatgagccatctcctgcctcttggtttgtgaaccgcgaggtctaccttgtggtctcctcactccaag

SEQ ID NO: 158694 - DNA, 679 bp, Cannabis sativa
agccggcgacgggcagatgcggcagaagatatcgagccgtcaggtagagagaagaacacgatatttttttttcttgggatttaggttttatttgagttttttttttttaaatttttaatttgttaattagcatttttaccctcgaacttttacgtatacaaaatcatgcctcctgaacttttaaaatcgttaaaattactttttgaactattgagattattaaatttaaggacatttatccaattttagtaaaaaagtctaacatggatgaaagttcaaggagtttgatttagtacatatcaaagttggagtggtatgatttggtaaatatcaaagtctggggagtatgatttagtacttaaataatcactgaaatagtaaaatgtaatgaaattagacaaaagttcttaaatctaacattctcaataatgtaaggggaatttttaacaggcaaaaaaattcaaatgacgtgattttgtacatgttaaaatttaggaggcaaaaattctaattaagctttttaattagtataagtacggtaaaaccatagtcttttcatttaaaagaaagtcatcttttccaaatctataaggatctttattaaaacactaggtaggagttacgtgtcgaggcacgtaaatgttagttttaggtaaagtttactttttttttccttctt

SEQ ID NO: 158695 - DNA, 794 bp, Cannabis sativa
tcagtagaaacttgatttctgtttcatgtttacagctgcaacaacacaaatttaatttttcaagttctggttctatcatttctcgaaatggcattcaaatttgtgttgcatctatggaacatgggctttatgatctaagaccagatgaaccatttgcgcttaataacgaactatttaaggtagctaaacctagaaactacaaaaagctaaagatcgataatgaatacgaaacatgtttatggcccctacgtctttgtcatataggctatgatagacttcacaggttaaccaaaggtggtccattgaaaaatgtcaccttaggttaattaccagtttttgaatctttcctagaaggcaaaatgacaaaacgttgtttctctggaaatggagagtgtggcaagaaaccactaggcatagtacattcagatctttgtgaaccactgagtgttaaagctagaggtggttacgagtacttcgtcactttcatcgacgattactctagatatggtcatatttactttatgcataagaaatctgaaacgtttgagaagtatcaggaatttctagcattggctcaaaaccaattgggtaaaatctaaaagatcttgcgaattgataggggtggagaatatatggatacacagttcaaagatcatttaattaaacttataattcaatcccaattgattgcccctagctctccacaacaaaatggagtggcagaaagaagaaatcgcacgcttttagaaatggttaggtccatgcttagcaactcaactctacctacgtccttc

SEQ ID NO: 158696 - DNA, 602 bp, Cannabis sativa
agccagagtgacgtactcgtgtatcagagccattattctgtgggtgtaaggtcctaatggaggcttgaagcggggacagtacaggagaccatagaaccctagaaacacaagaagaaggctcttagagcgagcatgggcgatccgtgacaatcttccatctagtttctttctcttctcttgtttttttatgtatttatttgtatttagtttaattatggatttgattatgagctaaattctctatttagggatttcatggattttaactgagattattctatagatttatgttatttgattgttctttctttctctattatggtgatttattcatatttgtgcttattacatgtgtttgattttccaccttatgcatgatttatgatctcaatacaaaatttaaaaagtgagtactgagaatgctctaaatgaatagacatgggttttgatgtgaaacgagagtatttacatagcttatgtgaattttagattattgtttaatacaaattgtatgttgttctatctcagagatgcagtagttggcatgcaatttaggacctttatgatttgaaaagagtttagattaatttataatctgtcat

SEQ ID NO: 158697 - DNA, 556 bp, Cannabis sativa
  modified_base (321)..(321): a, c, t, g, unknown or other
gtgtcttagggactgatttagataaaacaacatttaaaatgccagttgccatctaaatagcatccccagaaggatgtaggtagagttgagtagctaagtatggaccaaactatttccaaaagcgtgcaatttcttctttctacaactccattttgttgtggagtgctgggggcattcaattgggattcaattctaagtttaattaaatgatctttgaattgcatatccatatattctccacccctattagttcgcaagatctttaaagttttacccaattggttttgagccaatgcttgaaattcttgaaacttttcaaangtttcagatttcttatgcataagttaaatatgaccatatgaagagtaatcgtcgatgaaagtgacaaagtactcatagccacctgtagctttgacattcagtggtccacaaaaatctgaatgtactatgcctagtggttcctcggcacgctccctttacaaagaaagaacgtttgtcattttgccttctacttaagattcacaaactggtaattcacctaaggtgacatttttca

SEQ ID NO: 158698 - DNA, 585 bp, Cannabis sativa
attaagcgcaaatggttcatctggccttagaacataaagcccctgttccatagatgcaacacaaatttgaatgtcattttgagaaatgaaggaaccagaactcaaaaatattcaatttgtattgttgcaattgtaaacatgaaatagaaatcaagtttctactgaaatttggaataaataggacattgtctagatccaaaattctattctgaaacttgagtttggcttttcctgtaactctagccgataccatttttccgttaccaactttaagtttcaactctctggattttaaataattctggttttcaagcaattgcaatgaacaatagacatggttagtagatcgagaatcaagaatccagatggatttttcattctctaaaacgcatgattcaaaaactaaagcattggaatcactgcttaactgtttttggattattcttattgctggttcaatatgttgtgaaagattatctgatgaagaggaatcactttctctattcttctcaactgagcttgaagtagtaggattgttggaggaattattctcaatatcttcatctttccttttgcccttatctg

SEQ ID NO: 158699 - DNA, 562 bp, Cannabis sativa
tttgatgcttggctctgccaagcattccacgggtactaccccaagtccttcaatctcactatttgaagctaacttagccagacattccgtatgagcgttcttttccctagggattctttctactttataatccgtgaactcttggagcagttcccggaatatcattacatacgcggccattctttcgccgcgcgtctgatattctcctcatattcggttcacgaccagttgggagtcactgtagacctctactcttttggcccccacagcctttgctaatctcagtcctgctatcaaggcttcatactcggcctcattgtttgaagccgagaagtcgaaccgtagggctgcctggagtcgaagtccactcgaagatatcattgctacccccgctccggatccattttcgttggaggttccgtccacaaatactttccatgctgggaccgacggtaccagtgtgttcgcggttgcctcgacttcattacattcggtgatgaagtccgccaacgcttgtccctttatggagatgcggggtatgtattgtaagtcgaattgactt

SEQ ID NO: 158700 - DNA, 709 bp, Cannabis sativa
aacaacacaaaattctccattacaatccctctgaacttacaatctatccatactacaactaaggacaaaggaagatggtaatagattcaagattttttcttttttaagctcaatgtataacaagttaaagttcaaagtcatcgtatcaatctcatttaataagtttttattaatagggagattgggataattgtccgtctcatcattatttgcgggattaatagtttgattggaaactgaaaattacattctttaatgagaattaggaatggttgttgagggtggcgaataacctttaactagtctctcatatcgtagtctcacattaaatttgttttctttaatttttattattgctatttttattctaatcatcacaaccccatttttctaattcttattactaaattgtgaataattaaataaacataatcctcgtgagatcgacccttacttacgattacactaaaataattggaagtattggaattaaaaaaatagtaaatttattgtggcttacaacacgcatcagacagctactccgacgacttttttagcactgacaacaaactccagaatagtcgtcagaattggtattgtcgccggtaaattaccgagaaaacatttactttagggtaaatagcggcataagacccaaagtttcaagtttgtaagtggcataatcccaatgtttattttcagcggcata

SEQ ID NO: 158701 - DNA, 510 bp, Cannabis sativa
  modified_base (385)..(386): a, c, t, g, unknown or other
gctggttattatcgtcggtttgtggaagggttctctaaaatttcaatacccttaaccgagcttactaagaagaatcagcgttttgtgtggtcagataattgtgaggctagcttccaagagctgaagcagagattaattacagctccagtgttagccctaccctctgataaggagaaattcgtggtgtattgtgatgcattcagatagggtctagggtgcgtactgatgcaagtcgatcgggttattagctgtgcttctcgtcagttgaaagattatgaacagcggtacttgactcatgacctgaaacttgccgcagtagtatttgctttgaaaatttggcagcattatctctacggagagagatgtgaaatttataccgaccatnnaagtctcaaatatttctttacccaaaaagatttgaatatgagacagaggcattggttggaattagttaaagattacgactatgagatcccttaccaccctgggaaggccaatgtagtggccgat

SEQ ID NO: 158702 - DNA, 599 bp, Cannabis sativa
aatatcattgtgataaggatttggatgaatttataaatcaaacaaatgatcatgaactaaaaatgtgaaccaaataacacattaaataagtaatgatataaatctttttctttattggtaaaggaataatcaagattacattgaaatagagttttatttagggcacaaaactcaaaaaactttcatttgcactaacataaaacaatcagtacatttcaattaatcctagattctctctattcttttcaaatgcagtgactgtcaaaatcccagtgaatggatcagctaagttgtcttcagtatcaactttttcaaccattatgtcccctcttaccacatattttctaatgatatggtacttcctctcaatgtgtttgcttctcttgttgttttgaggctctttactgctggctataacaccagttttgtcacaaagtaaaaccagtggtttttccattctaggaacaacaccaagttctgtgaagaactctcttagctagaccaattccttagcagccttagcgaaagctatgtattcggcctccatggtagagtcagatattgcagattgcttaacacttctccaaacaactgctcca

SEQ ID NO: 158703 - DNA, 680 bp, Cannabis sativa
  modified_base (223)..(228): a, c, t, g, unknown or other
attgggcaaaaatacacttaagactggccacttaaaaggaccaatctctagttacaattttgccacttttcaaccacttattcttctttcaataataccatattatctcagctagtgaagggaccatgggcctatataattgagttttcaataagtagatttagaatttaccaagtaaattctctaatttattaattctgccttgtgccactatagatttggnnnnnnatagcactctcaattatatagagtactctatatgtaccacgatatagatacgttatcattatcaattgttaaaatcttaatagtcgaagatcctctatagatgatctacatcgaaacgggacaaatttaccgttctatctttcaatgtattttattcttgaaacacttagctacctataaatgatactttagtaaactaatatcattactgaaatgaggcctcaatcatttatctctatttagcgaagctcaaagaaaattttcgtttcacttctaaatacttatagaagctatggatttcaaatctatgatcagtgttcccactcaattgaactataatgttcccaagatgtaaatatctccaaaaacattgattagcatccacaaacaacttgaagaacataaataataaaactaagttgaacctaatcatatcaggattaagatccata

SEQ ID NO: 158704 - DNA, 862 bp, Cannabis sativa
  modified_base (833)..(836): a, c, t, g, unknown or other
agggcataaaacccaacaacaccatcactatagatgtttaggggtcccgtgatataaagtatgtaatcaagttaggtgtagtgtatcggagtcattagcttcgtaaataaatctctaaccgataaaaaaatagggttctacttagtggtgccgatgtacactcgtagtagtgaaactatcactttagatgtttaggggtcctttgacacaaagtatgtaatcaaattaggtgtagggtattggagtcaccagttttgtaacgaaatcactaatcgataccgaaatagggttctacttattggtgccgatgtacactcgcagtagtcacacaatcactttagatgtttagaggactcgtgacacaaagtatgtaatcaagttaggtgtactatatcagagtcaccagtttcgtaacaaaatcactaatcgataaagaaacagggttcgacttagcggtgccgatgtacactcccaacagtgacactatcactgtagatgtttaggggtcccgtgacacaaagtatgtaatcaagttaggtgtagtgtatcgtagtcactagtttcgtaacaaaataactaaccgataccgaaataaggttatacttagtggtgtcgatgtacactcgtcgtagtgacactatcactgtagatgtataggggtctcgtgacacaaagtatgtaatcaagttaggtgtagtgtattggattcaccagtttcgtaatgaaataattaaccgataccgaaatagggttctacttagctgtgccgatgtacactgcagtagtgacactatcactgtagatgcttgaaatattttaccaagatctagatnnnntaccatgtatgtttcattaacatcct

SEQ ID NO: 158705 - DNA, 534 bp, Cannabis sativa
atagttttgagccaaaattctaaactagcttaaaatcaaccaagcatgcatcaaaatcagattcatttcactcaatcaagcatgcttaaacttctaaaaacaacacgtaatcacagcagcaacaacaatccaaaactaagcatggaacctatcatttttcttcaaaaaaactcaagaaacaaaggataaaattataagaaccttaccaacaattagaaatcactaaatcttgagaaaataacttgaattaccaaagaaaatgcccagcttctctcaaagagggccgaaagagagagagagtttgaggaaaatgaattttgctttgctcttgatttttttcaattttgtaaaaatgagagacaaaagtaattttaattacatatttcagccaaactaattaatcaaaaacaataataaatcacttaattgatctacataagaacaaaatgctaaaagggcaaaaagactaaaatgcccttgcccacacaaaactaatttaaaggattctaaggatatttttgggaaattctaaat

SEQ ID NO: 158706 - DNA, 577 bp, Cannabis sativa
  modified_base (531)..(532): a, c, t, g, unknown or other
tttttaaaaataaaatatttttataaaacaaatagtagaacacaaaacaaaataactaaaaacaacgaacaactaaaaaataacagtagaataacaatggaaccttaacacaatacacagtataaaacttacacaatatctttgaaaaaaattccttcccacagtataaaaataaaaaaaattagaaatttcagtatgtggtgtataatccctttaataaacaggttcgagctttttttagttattctaggatccatcgacacgatttttttttgaatttcgaatagtttttaagatcttatatttttaattacaagtaatctcaccacaatttttcccttttccttctttttgagttatttttttttttttttgacaaatatcactacaatttatggagtagattaacaacctttttaattgatagctagccatacctttaactcctatatttttagaagaaattagacttgatattctttttatataatcctcttttatttttaccctcttttttaaagtctattattnntacctctttttttaaacattgtactaattttgttcctgtcacttc

SEQ ID NO: 158707 - DNA, 502 bp, Cannabis sativa
aaacaaacagttaaacaactgttgataacaaggctataaattgctgaaaaaccaataatgttataaactgttaaatagcagaaacaaaaccaaaaaacaactaaagaacagcacaaaaacaacatcaacaagaaatacataaaagaaatacaaaaaaaatggcaaaacataaaactgtcattataaacaggtaaaacattgacaaaaagaaaacaaaaggtgattaaaaaaattaaactcaataaaatgataaaaatcaaggtaataataccttggatttaactttaggcttcactcccccatcatgcacttcatcctcaaaatcagaatcagatataacctaaaacaagaagggagaaaaatttaaaacacaaaaaatcatacgaaaaaacaaaacaaccatgaaaaaactaaacaaaacttgaaaaacaacataacccaacttacatccttggcagatttcgaagattttgctctctttgccttacgagactcaatctta

SEQ ID NO: 158708 - DNA, 581 bp, Cannabis sativa
catacagaagaaggtgccatccctactttcctaacaaggaaagattgtaatcccgcaaattacgaaagccaatcccacctgaattcttgcttctacaaagccgacgccaactgaaccaactgacacattttgttctattagtagatgacccccaccaatactttgacattaagctctcaaggtgtgaaacagtcttaaccagaagaaggaacacagacatcgcataggttggcaacgcttgagccaccgttttgagcaattggatattcaattaaaaaattgatccaattcaattagtaattggattggattggattggattttgaggtataattagattggatcggatgataatttttcaaatccaattactaattagattggataggatgcaaaaaaaaaaagttagattggatcggatgcccgcccctagtggaaagggcattatattagaatgacatttctaatattttaaaatgcaacaaaataaaaaaatagaataaaaattgtttctaaagtggcatgaaaagtaaataattttttttaaaatttatttatttatttatttatttttgacatat

SEQ ID NO: 158709 - DNA, 529 bp, Cannabis sativa
  modified_base (413)..(431): a, c, t, g, unknown or other
acggtagtatgcgaatgtgtatagactatcgagagttgaacaaagtgactataaagaacaagtatcccttgcctcgcatcgatgattttttgatcagttacaaggggcgatagtcttttcaaagaagacttgagatctgggtaccaccaattgaaagtccgagaggaagatatagcaaagacagtatttcgaacacggtatggacattatgaattcctagtgatgtcatttgggttaaccaatgccccagctgccttcatggatttaatgaatagagtattcaaggaatatcttgacaagtttgtggtggtattcattgatgacatactcatttattcaaggacaatggaagagcacgaggagcacttaaggctaactctaagaagactcaaagagcaccaattgtacaccannnnnnnnnnnnnnnnnnnctggttggagaaagtggcgtttctaggccatagactgtccaaagatggggtagaggtggaccctgcgaaaattgaagcagtgaagagctagccaaaac

SEQ ID NO: 158710 - DNA, 638 bp, Cannabis sativa
  modified_base (48)..(49): a, c, t, g, unknown or other
ctggttacaaatttgcaaatccttatttgatcacaaaatttatttgtnnaataaagtgacttgaatttaaaatatatattgtttatatatattagggaaaatttagaaaaccatgataattggaggtagttatataacttgacatatttatttgagtatgtaattactttataattgtgtaattggaggtaattgataagtttcaattacactttccaattctcattaccatctatgagaattgagtagaattattttttgtaattactaaaaatattttatttaaaaatattaacaacttgaatatatttagtatttagtcaaacataatattaaaaatttatatataattatcgcttcatatttaattatgcatcttatgttttaaaaaattaattaatagattatgtaattaatactttaataattacatctacttctaaacacacccataagaatgaattatgtttaatactcattatgtgtgaaaaatgaggcgtgagctgtgggattaggatttggttcgaattgggaattagaagcttgttgctgagaattgcttcaaaagcactatattattgcgtggttctagatttgccagcaacattttgaagtaggttgcatgctcggtttcagct

SEQ ID NO: 158711 - DNA, 535 bp, Cannabis sativa
aatttgtcaaaaaattgcaaaataccaagtgggtcctattaactctatggccggccacttgcagaggctttttccaataatattttcattattttaatgcaaaattattactaacctaaacctattggttacctataaatagatagtgatggctcccactgaacaagtgtctcaagagattgaaaatcaaaaaataaaaaataaaaattgagccactcactatccttctatagccaacccctctctctctctcttcttcttctaattttcgaaaaccttgagtgataagagtagtgccaacacatcaagtggtatctcaatcatactttggaagatcgtgtagaatccaaactgaagagaaggacattcggactaagatcttggtgatactctgcgacagaaaggttacaagggttagagatctgagtagatggagacattattccgctacgcccagtgtaaggtttcctaaactttatatgtgtttgttatcgttttaaaagttcatatttagtatgttaaacaacatacttgt

SEQ ID NO: 158712 - DNA, 625 bp, Cannabis sativa
  modified_base (365)..(366): a, c, t, g, unknown or other
cggggatgaagatgtggatcctcgacttggggacccaagcaccaatgttggacctgagaaaaagttagaagagatcgagatcgatccagttatcccgaccagaaagctaaagatcgaaaagggtttattgctcgaagtaaattcagaattgataaaatttctgagagaaaacctagacgtttttgcctggtcacatgtggatattgttggaattgatccttctatcatttcgcacgttcggaatattgatcccaacttccgaccagtcaaataaaagtgaaggctactggacaaagaacgagcattagccctaaaggaagaagtagaaagctacgcaacaacaattttataattgaagctttctnnccagcttgggtcgcaaatcccgtattggtgcccaagccaaacaagaaatggcgagtctgtattgatttcacagacctcaacaaagcatgccccaaagactgttttccacttccaaggatcgatcagctcgtagatgcaacaggagggcatgaaatagtaagcctcatggactcttattcaagctacaatcaaatcaaaatgcatccaccagacgaagaacatacaagtttccgaacagatatgggtctatattgctaca

SEQ ID NO: 158713 - DNA, 788 bp, Cannabis sativa
  modified_base (64)..(66): a, c, t, g, unknown or other
  modified_base (306)..(324): a, c, t, g, unknown or other
ctgggtggcagaccgaggatatgctgggcatctccggggggaacaactggagccaatactcctnnngcaccccctggtgttccttgtggcaaacccccggccgcctgacttgggttgagatgaggcaaccaattcttaatccactcatagaggtgtcccaatcagattaagttttcgatctcatctttgagatttttgcattcattggtgctgtgtccaatgtcgttatggtattcgcatctcttgttggggtcccttcgggaactatccttgtatagatgaggcggtctccggtagtgtgtattnnnnnnnnnnnnnnnnnnnacacgttcttgggagtccgtcaactccgtatactgggtatattggggagtgtaccccattttttgtcgcttttcctccgtccgggtgctacccttggaggaccttttactccttgaaccttgggaaggaccagccaagctggcagtcggagcggagtgcaagggggcttgtccgtttatccccgagggattcccaaaatgggacgacgcgggggccaaggcctggccctggccatatccgggagtagcggtgaattgtatgtcgctcattagtggagttgctgtcgggacagtacccgacagctgggctccgggcacataccctgctatcccgatgggataatatcctccataggccactatttgggcctattcaggattgatatatttttggactctcttttggaagtcctgaaggtttgcagctccttcctgttgtagttcgttccagaatggagttcctgt

SEQ ID NO: 158714 - DNA, 715 bp, Cannabis sativa
  modified_base (74)..(83): a, c, t, g, unknown or other
ttataataaaaaaaacctatagttgctcgaaaaaacataaaaatcaaactactctctccagccacacaagattnnnnnnnnnntcctgcgattcaaattgcttagtttctcatgcgattaaaatcgatcaccaaagatctttcatcaagaaactgattttttcatccaaaaaatagtttcttcatcaagaaaccgatttcttcattaagaaactgatttcttcattaaaaaactggttttttcattaagaaacaaatttcttcatcaggaaactagttttttcattaagaaactagtttcttcatcacgaaattggttttgattattcaaaagtaaaatttataataaaaaaaaaaaagacaaaacacaataaaaataaataaaacaactccattacagtaaaatagatgtgctcaaaaattactaaaaattaccctataaaactgcctaaaaacaaataaaaacattaaacatggactttaaaaacctaatttacatatatatggcatattaaataccataaaaatacctaaaaacaaaaaaaataccatataaattggtcaaacttaaaagtatcatatttaagtaaacaattttaaaatcccatattgagtgtaaatttctatttttatatttgtgcttcaatgcacaaagtgcaaattagctataaaaattaatattaccattaatactcattaaaaatatacaaaataat

SEQ ID NO: 158715 - DNA, 792 bp, Cannabis sativa
ccaataaaacgtgcaagagtttcagacttacttaagaatggtagtctaaaaacttgtatccaaaaaggagttgtggtatggaatccatatgtgcattctgtaggacacttggaaggcaaatgatcatatgttgattatgaaaatgtcatggttcctttgacatcactctgtttaggtctccttcacaaccaaaagagaccatatatgaaccaactcatagggagaaatggaaaatcttcctttctagttagtcatgataaaattgttgaactattttaggttgtaacctttgcgggagaaaattttactgatcagccgatgagaagtagggcgttgtgatggaataacaatattggacaaattgattacttctctctctctctaacaaataatgcattggaaagattaggatgaaaggaattaatgatcgtgaagaagatgaaaaccataatggaatcaacatatcaaacacaaaaaaaggccaaaaagagaggaagcatggaagttaataaaagaatgagaaaaccaggaaagttatcatcgaagaaggatgaaagcaggttaattattgatgaaagtaataggcgaaaaccaacataaaacagttaaaaataaataaaaaaaaaaaaaaaggaaaaccaactgccacataacaacaaagagggcagacaatgctcattatgaaaataagatttaaagttttgataagttatattatcaatattataatttagtgcatattattcattggatcattttatcacattaacaataatatatattaatatatac

SEQ ID NO: 158716 - DNA, 636 bp, Cannabis sativa
  modified_base (315)..(322): a, c, t, g, unknown or other
attaaaactaattaactgagtctacaagaagtattatctcaactaggctagggactatggtcctatataatcaagcttccaataattagatctagaatttaccaagtaaattctctaacttattaattcctctatgagcctctatagattcggaattgtactcttaatcatatagaacactctatatgttccaagatatagatacactattaattattcatcattctaatctaaataatcaaatatcttctatagatgattttcatcgagtagggacaaatttaccgttctacccctcaatatattttatccttnnnnnnnntagcttcctataaatgatattttaataaactaatataaatactgaaataagagctctttcatttatctctattatgccaagctcgaaagaaattatcatttcacttttatgtctagatagaagctatagatttcgtatctatgattagcgctcctactcaattgtactaccatgttctcaagatgtaagtattggcccgaaccaattcgtaagcttttacgaacaactctaagaacataaataacactcttgatatcaaacctaaccatatcatgattaagatcttttgatcttgttgcgatatttagcacacg

SEQ ID NO: 158717 - DNA, 553 bp, Cannabis sativa
ttcccatcttattgttaacttaaaatcttttatatctccactttttttaacttgtatcaatttcccttgaattgacaccttttaaatttctcaatcatttacggtgtactaccgttagaaagtaaatttattaaacctatacggtagaggcaatgccgctcatactaggtacccacaactaaactgggaatgtccatttcgcaaattctcaactaataacaattaatcaaagatcatttcttgatccttaagtttctaatctgtactaggtagaaatcttgataatcttttcaaacacatctagaaatatacataccacaagtatattctctgttttattgacaatcccttggcatgaactactatgcaaacttatattgagtccccggttgatgatgctaattcatcaacatctaagaccctcgtatacttttcccatcattactactaagttttcacagttggaatatattttaccaggatctagatttactaccatgtatgttatttaacatactaatatgaatctctaaaacaatataaataaacacat

SEQ ID NO: 158718 - DNA, 616 bp, Cannabis sativa
caattgaagatcaagatccttttgaagaggaactcattgaatatgaaatcacaagtaagggtatggatagccaagtggagagtgagcaacaagaagaaaggattgttaaatgaaagtgtagataatgtgacattggaggatgaagaagaacatgtcatcattgattcgacttcatcatttatattgactaataaaccaccaatggatccacattatcctctacgagctacaaaaagcttcttcccaagctcatcatccaaagtcttatgttgttggtattgactttgattcaaactcatcgcttgccaagcttgaagacaagtacaacaacaattttcaagttgtcttgcatgacgcttattatgggcgtcaaccgctagctgttgtggtgctcaggtaagtttcatttcctttttctttaatgtcacattgaggacaatgtgtcactttagtttgggggtgaacttaaattttaatttttttgttttcttagttctcaaattaatttttttgtgtgagtcaatttgaaagtaggtagatagcatgatttgaaaaattaattattttgaaaaatctgtgtgcttggtgatgttatacttgtgactaatttcaattt

SEQ ID NO: 158719 - DNA, 560 bp, Cannabis sativa
agatcagatttttgtttaaaatatatatgaagaaatattaattctaattatatattattctcttagataattaagtttggaaatttttggagtatattgtagtatgtatgaattttcataataaaagatagactttcttgtgaaattttgatttttattttgaatggttgagacatagatttcaatcaaatgcttgctgggaaaatggtatttagttgaatttgtggaattttttttgaaatagatgggcattttactaatttgatttggattaattttattgaaggtcatcaattaaaattttaagggagtagggatttgtatagtgctgtttctccaaaaagtatatttaaaacaaaatgggattatcttcttcttttgatgtgtattaatggcaatttacttttctgtaacggctactaagtcccatgctcaatcaaaaaacataaatattaaaaatatcaaagtttttttctattgataaatgtttttaggtttgaaatcttttaacaaggagttttttaacagattctacaatcagtttatatatatatatatat

SEQ ID NO: 158720 - DNA, 597 bp, Cannabis sativa
ccctttttggagtttgcccctctctggacctttccctttcgggaaatctgaacggacctttcgcggatcctgcacctttttctttttccccgggatggaagtaggatttttctgtttgtttccttcagagggatattgtatgggactaggctccctggacttatgcttctgagtgcttggtgaggactctttcggtgtttcctcgagtcccgcagggaaggctttagggtgtatgtggatccctgctgtctccatggctttttgcatggcgaccatcacctcttgcatctttttgtgttgttctttatgggcggtgatctcagcttcatgatcagcatccttttgccttaagagctgtaattctgtgtaactgccttcgtcgtaggtgtcgtactcatcaaagttttcctcgtattcgccatcgttggcctcctctcgctcctcagaatccacgttgactcttgaggccacttcctcatcttcagggttttgaatgtcttgaggaggatgaggctgacgtgtgttgcgagtttccaccattgatgtttagcttacaaggttgttgtctacttgcagacgcttccttcagctctcaat

SEQ ID NO: 158721 - DNA, 637 bp, Cannabis sativa
aagtttaggaatctttaatcaatggttgctagtacggttcaccgattcccattattcggtgcaagtaatcttggttcaaattactgatgtagcgtgatatttaagtgaaagtgttgtatataatagagattatatatgacaaggaatgatataaataaagttgtctttatctaacatgacatttactataaagacttaattcatatcataacgattatcaataatagatcagctaaaccctgagtaatcatgaactcttgttcatgttattagtttctttatttcactcgttaaagtttctcaaagaagataatttttacaacttctattttgggaatctaataatgtggatggctgagaacatgacctaaattatagaatcttgactttcctaacagatccaatgttggttccctttaagtattaattctagacctgaaaagttgtgcacaaatttagatgagatctaaagtgtacatccactagtgaagtaatagtactaaaggataaataagtaattagaagggtaaaatggtaatttgactaaaactaattataaaccaacacatggagggttaatcactgaaattgattttgtcaatggacaatgcactaaaactcagtaaatataattcta

SEQ ID NO: 158722 - DNA, 591 bp, Cannabis sativa
  modified_base (303)..(305): a, c, t, g, unknown or other
aaaccataccttaagctttccctcttcaaggatttcctatcctgctactaccgaagcttagatcgctaagttttggattgaaaatagaagaaaatgattataggggagaaggttttatcgaaagagggagaacaaggatttcgtttgtcattgttcttttctactgttataacttaaaacttaatatatatatatattgaaaacgaaatgagcagttttgttacatatataataataatataatattaatatattaatgataataatataatattaataaaatttttattattaatagttatnnnattatttcttagccactaagaaatttctatttttagagtatttgactaacttcgagtaccctaaaatacccagatatttttaaaatcaacttattcgaataatcccatcaatatttctaactaaaactattgtgatatttttggcctccaatcggatttccagggtcgccgaacatggaaatatttttatttcacaagtaactcatatgatatacacgtatttcaaataaatctccgtaattaacaacaaattacgcttatttactcacttatagaaaactttaaa

SEQ ID NO: 158723 - DNA, 620 bp, Cannabis sativa
  modified_base (577)..(595): a, c, t, g, unknown or other
aaaactagttacttaaaaaaaccagttatgttctccatcatatctgatactcaaagtgcatttttacaaggccgcttaatctcagataacatcatgattgcctatggattatgcatcacttaaagaggaaacgaagagggagggattattatatggcacttaaacttgatgttagtaaagcgtatgataaacttgagtggggttacctccgtgctatgatggtaaggatagattttgatggtcattggattaacttagttatgcaatgtgtttcttatgtttcccataccatttcacacggagggaaggagttggggcccattgttgctcaaagaggattacgtcaaggtgattctttatcaccatatctgtttattctttgtgctgaaggtttctctagtttgttgcgtagttatgaacaaagtagtttactcacggaatataaaattgctcgaggtgcgccggtaatctctcatatgttctttgctgatgatagctatatttattgtaaggccaccgaggaggaagcatacaatgtgaaggagctgttgttggaattgttttaccaggatcttannnnnnnnnnnnnnnnnnnttattaacatcctaaataagaactt

SEQ ID NO: 158724 - DNA, 619 bp, Cannabis sativa
aattatagatattgtaagtaaaagggaaaccttccctcaaacatgtagccctataaatagtgatcctttctaactggaaaaagggtcaaaataattacttgagagagatccaagagagcatactctgagatttcattgtaagagctttaagagaggaaacattgtattctctgttcttaagtcaatacaaattaaggggagtaggctattaccgaactgctcaggaccgaacctctttaaaaaccttgtgttctttatttatcttttcatattatatcttaattatatcatttatcgattattatcaagactacacctgttgtgcaagagactagaaataccagttcagcaaccgatctacgtactcccaatactggggttttttcagcaacaaatgtccaaacaactgttagagatgaaaccaagatccaaaacctccgtaatgctcttgggctcatgcaaggacataataatactcttcatcatgatcaggaagagctccgtgctgcagtgaaccttacattcaaagaacaaaggcgtcacttctcttaatggagggataaagagatggaaacgttgagggctcaacaagcaaccatcgacgactgaacaagatagg

SEQ ID NO: 158725 - DNA, 954 bp, Cannabis sativa
  modified_base (905)..(918): a, c, t, g, unknown or other
aagtccagggccaaaacgatatcctgacacaggcgctcgggacaccagagcatcctggacgtgtcaggactgctgggtatgctagtacttgaaatgttttctctttagttatacaaaaaaaaatcgcaactaatttgcatttttatgatttgcaggttcctgaccagggcatctaaactgttcagcatgaagaaaaagggaagtgtctgatgttgtggctcgacaacagaaggagattgaaaaataaaaagccaaactccaatcccttaaatagaagaaaaacactgccgaacaagaggaagaaggagaggtggctagtgaggcgtatgttgcacaacaatacgctcgtgaggatgagagtccaccacaaacctatgctgaggagtttgtttccctcaacgagccagctctcctgtaaaatttcgatgaccatacgacccttgatcagcaagtatatctctgctctgataatatcgacaacattgtggcccgagcgtatctgtaagagcatgttggtaaaattactgttcactgcacggactacgatgattcacatgcccgggttctgatttcagaaatgctcgaagaggatgctaaaatcccaatctgaattaaagggtgcagatatgtcagggaagtaccaaacatgttccttccttggcctaaatacttaattgtaacatccgaggtaacttctcttataaattaattattaatgattagtggagtttgcatatcttcaatattcaaccatagtgaagtagattttacgaatatatgtgctgcggtgggatggatgaataaactactattatatctgtgttatttgtcattatacaggcatgttagaaatttttggggcattcaattacagtcgttatgttgtcgaaatttcggtagaattnnnnnnnnnnnnnntatattatgttgtgttttgtttagggtccactcgct

SEQ ID NO: 158726 - DNA, 537 bp, Cannabis sativa
aattcattgtgactagtgataaaaaatatttcgagatgggtctggtccacatttcacaaaggggtaccacgatcagaaatgtgagatttttattatttcaactaaactcattattagtacttgaaaattactatttctcttatcgtgtccaatagaaaagtgatgcacaatggtactggctttgtccctatgaaatttaataattttctaacatgtgtagggtgacattttaagagaatactaacgagagtaagagtaaggaaaaatttgttaaaatttcccttaaaaagaagaatattttcaatttttgaattagagggtcattttgaccaaatttaatgcaaaataaatcttcacatttttgtcttagtagtaggaatttattgtgactagtgggaaaaaatattccgaaatgcgtccaggccacatttagcaactaccagaattgtgagatgttcactatttcaattaaaaggattgtaattagtgcttgaaaactacttattctctcaaggtgtccaatagaaaagtgatgca

SEQ ID NO: 158727 - DNA, 616 bp, Cannabis sativa
gttctctcatgaaacatgggatttttcatgagatgcaatgcactttgattatcacagtgcattgttacatcctctgaattgatgctaagttcatttgacaatcccttgagccaaattgcctctttaatagcctctgttgcagccatatattctgcttctgtagaagatagagcaacaaccttttgtaggttggatttccaactaacacagcccccatagacagtgaaaacaaaccctgttaatgactttctagtgtctaaataccctgcataatctgaatcaacataaccagttaccaactccttgtatctgctagtgccatcataggttaaccctgtgttcagtgttccttttatatatctcattacccacttcaaagcagtccagtgagcattccctgggttggaaacaaatctgctggtcatgctcattgcatgagctaaatcaagccttgtacacaccattgagtacatcaagctccctacacaactagcatagggaattttaatcaatttctctttctctgcatctgtaactggtgactgtgagttagacaacttaaagtgctgagctagaggagttgaaactattttggagttgtccattccaaacttat

SEQ ID NO: 158728 - DNA, 613 bp, Cannabis sativa
acatgatctaccttcatgaagttaacaataaaaaaaatacatatcaattaagaatttattacatttgggcaaataaatttcttaaaaaatatgtattaattcaagtcaaaaataataataaatatttatttaaattattatctttgagcaaataattaaaatatacacatttaatatttaatattaactcacttcctgaaatgtgaactaatatatataattactacttttggacaagtaattaccatatagccaaccaaaataaatactttctacagcatatgaaatttggttataaaataatcattaaaaatttaataatttttaaccgaatttccaaaaaattatagattagttacttgtaatatattgataataaaaaataaagtctccaccataacacattatttttcacatcaaacaatcaagttttacaaattttagaacaataaataatgggaagatgtgaatgtaagaatattggtagagactacatagtcaagataaatcaaataagaaagtgactatgtcaaacagaacgagaagaaaacccaaataaatactctatgatttacggatttcgaaaaatcatcaaaaattatttttaataatt

SEQ ID NO: 158729 - DNA, 675 bp, Cannabis sativa
  modified_base (281)..(281): a, c, t, g, unknown or other
attcatcctcaaaatagacagctcggtctgattccatcaccctggtggtgtgagagggacaataaaacctagaacctcttgaaccaatagtgtaccccacaaaactcccactaatagtcttcagatcaaacttcttagatttagggttataaggccttacctcagccttgcatccccaaacgtgaaaataatgcaaacttgatttctttcctgaccacagctcgtatggcgtctttggaaccgacttactaggcacttgattcaagatataagcagcagtncttaatgcctcaccccataaaaactttggtaagctagaatgaattaacgtacaacgtaccatatcaagaagtgtgtgatttcttctttcagcaattccattctactggggtgtacgtggcattatatatatcttgcatcaatgacacgtttctgcaagtatctggaaaacgaccgggggttccttccagtttcatcataatgcccataataatctccacctctatcagaattgacaactttaatcttctttcccttttgaagctcaacattcgtcttgaaattcttaaagccatctaaagattcagatttttcactaatgagctcaatatgaccatatcgggaaaagtcatcaatgaaggtaatgaagtatttatagccgcccatagcaggtgg

SEQ ID NO: 158730 - DNA, 599 bp, Cannabis sativa
aaaaaatcctagagaagttattgtaaaaaattgtcattgaaaaaaaaaatactaagagatgtgctaaataccataaataatggcataccattattggtgtcaactaccacaaaagataacaaaaaaaaaaaatcacataagttgttgtaagaaaattatacaaaataattgtaaaaaaattgtgaaaaagaattgtaaaacaaatttagtaaaaaaaatttaaaaaaattgtgaaaagaaaaaaaaaagaattgtaaaataaatttagtaaaaagaaaatataaaaagaaaaaaatatatatataaaatgatagaaagacaaaaaaaaaagttagtaaaaaaaattgtgaaaaaaaattgtaaaacaaatttagtacaaaaaaatataagaaaaaaaattgtgaaaagaaattataaaaaagaattgtaaaacaaatttagtaaaaaaattataaaaaggaaaaaaaattataaaatgacaaaaaaaaaagttagtaaaataaatataaaaaaattgtgaaaagaaattataaacaagaattgtaaaacaaatttattaaaaaaaaaaacttataaaaaaaaattgtaaaaagacaaaa

SEQ ID NO: 158731 - DNA, 618 bp, Cannabis sativa
gaaatgtctgatgtggtcaaaggaaaagataacaaatgaagaatgtctttcatgcattgaatcacaaaccttttggtatgatcattcaagtctaagttggtgattgctgaagctgacactgtcaacactgggtctggttgaggaataagcaaatctgagggaacaactgatgatggaacacccgtctctgctgagacaatttgttctggtagaatggttggctctacaggcaatgcctcactgtcaaatcctttgttaacataatcatcagacccatcaaagtcgataagttcttcatccctagggctagaagctccaaatcaagtatcagatggtggcatctctaaactttgagtaagtgggaaggagacatcttcaatacgactagactcttcatgctttgcatgtttcctttctttgaaatgtgggactaaggaatggacttttttgatccaatttccaactcagtatcagcatagttagcaccagtaaattcattatgttcaggaggatatctctcaaaaacttccttagggttggagtaaagtaaacgaatatctttgattacataatttgattcctcttctttgaatagttgcttggataatgttgaatgaa

SEQ ID NO: 158732 - DNA, 520 bp, Cannabis sativa
  modified_base (445)..(467): a, c, t, g, unknown or other
aggttaaaggagagatagcggaagtttggctcgtctttttagaccgacgacactttgggctcacaatggatcacaaatggctctttttatggttcacttttttagatcggtggcagtttggactcaacgaatcaaaagtgtctttgataccattttaaaatttgggataagatgaatggaattctatctcaaaactaattgacaatgggaggaatagctcattcatcttatatatgataatttatttccagacataaacaatgtgagactaactctaatatgagtgtcgtatttggtagttgggctctccctttgaattttgttgttaaatttttttatcccctttggctttctttttattagagttattattttttttaaaaaaaaatgttagcagaaaaacaagtttattaaaagaacacctttaaataataataataataannnnnnnnnnnnnnnnnnnnnnnataataataataataagggtaaattccattttagactctctgttttacaaaag

SEQ ID NO: 158733 - DNA, 766 bp, Cannabis sativa
gtaggtttcgcagcggcaagataaccttcaaataatccttctctgtagtcgaccttatgggcgcggctggggttgtgctcgccgctgggcaatgcccagaaaaaaaattaattttttttctctgtttttttttctttttctttttctttgaacagtacaaaattaaagaaaaccaatattcggtttacaagttcaataaacataaaccaaaaagaaacaaaaatagtaataacaactaaaaaaaataagaaagttcaactagaaaaccaaggaaatttgggttgcctcccaatagcgttgtctttttcgtcgtataggcggaccttgactggttttttcaaagaggcgccagaatcatgacagacttggctttgtcaaattgacctccaaagtaaagctttaaccgctgcccattaactttaaaagtctcagggctttcgcctttcagttctacaactccatagggaaacgccttgaccactgtaaatggtcctgaccaccttgatttaacttactaggaaacaatttcaaccttgaattgaaaagtaaaacttgctgcctaggttgaaactcctttctgactaatcttttgtcatgccatttctttgttcgttccttgtagatcttcgcattctcgtaagcctcatttctaaactcctgtagttcattcaattgtagcaatcttttctctcctgcagctttcaagtccatgttgagggtcttcatagcccaaaaggccttatgttctaattccaccggtagatga

SEQ ID NO: 158734 - DNA, 609 bp, Cannabis sativa
gcaagaaggggcctccaaccttcaggatttccagaagagagtccaaaagtacatcaacttagaagaagtccaaatagtgacttacgggggacattatcggaccggaatagcagggtatgcgctcagtgtcaagctcccgggaacccaaccagcggctactccaccaatgagcggcatacaattttccgctaccccaggatataatcagaatcaagcattggctcctacatcttctcattatgggaatccttttcaggtaagtggacaagtcctgtctcactctgctcctgctgcaagcctagcgggaccttgtcaaggctctcggagcaagaggtcctcgaaaggtagcacctggacggaggacaagcgacagaaaagggggtacacttcccaatacacccagtacacggaactgacggactcccaggaacgtgtgtattttgctactaggcaaaatacgcactaccgcagaccgcctcctctgtacagagatagctcccgaagggatcccgacaaaagatgcgaataccataatgagattggacacatcacccatgaatgcaagaaacttaaagatgagatcaaaaacttgattcgattgggtcatct

SEQ ID NO: 158735 - DNA, 709 bp, Cannabis sativa
  modified_base (156)..(164): a, c, t, g, unknown or other
ggtaatgccccaattaggtcaatcacccatatagcaaatgggtagggcaaggtcatcattctaagtttggttggcggtacacgatgtatatgtgaaaatctctgatatttaccacatttcttgacaagctcatgtgtgtccttattgatcgttggnnnnnnnnntccttgtctaatgatctttttagagagactttgccaacccgcatgatccccatagaagtcttcatgaatttctctgatgattttgtttgcttttgtgggaggaacacaccgaagtaggggcattgaataccctcttctatatagtttggcttcaatcattgtgtagcgagccactgtatacaaaagttttcgcacctcgtttttgtcatttggaagttgtccatcgagtaaatagttaataataggcgttaatcatattggagagctatctatcatctcaacgtcttcaatttcacatatacttggctcgctcagcatttttaccggaaccagatttaattcatcaaggtcattctgcgaggccagcttttctaaggcatcagcgttggagttttgttctctcagaatttgttaaattttaaagtaatcaaatctttccattttgtttcaagctttctctagatacttcgctattttcaagcctttggcctggtatttcccgagggcctagttcacgatcagctgcgaatcactatgacaaatga

SEQ ID NO: 158736 - DNA, 514 bp, Cannabis sativa
actttcaattaaattttatacacagagatatgttaactaactattgatcaccaacatgacacaacaaaaaacctatccaatcaatctaaattttaataaaattaataaaaattaatgtaagcccaaataaaaagtctaacattctctttcacttggctacattaattttaattaatacatatatattatagttttgtttgaaaaccactcatgggttgaacaagaaaaataatatttgtggccactttaaaaataatagttctttgatattatcttaatatatatcggttcaatttaacatttgatattaaactatgaaaatcatattacttttaaatcaacaaaagaaattcataatcacaaatattaaagtactaaattggcatgatcaataaattcagtagtgtcgtaaaaaattattttcaacatgtgatcaatttaaaataacataatatccttatcagtcctcaatttcactgataccgtgatgcttaataaataagccagtgaaatt

SEQ ID NO: 158737 - DNA, 514 bp, Cannabis sativa
  modified_base (418)..(419): a, c, t, g, unknown or other
gggaactacctaaaggaaaaggcggactcaagtatgctgtagtcgcagtcgactacttcacaaaatgggctgaggctaaagcactatcaaccattacagcgactaagttacgagagtttgtctacaactccataatctgtcgatttggcatcccttacaagctcattttagataatggaaagcagtttgattttaaggaggtgcggccgttatgcgatgactttggaattaaaaaagcattttcatgagtcgcttatccgcaaagtaacgggaaaactgaggtagtcaataagataataaaacacaccataaaaggaaaactcgaagaacataagggggtatggccagacgagctttcgcaagcttaatgctcatacaacacgaccccccgatccacgactggcgagactcctttctnnctctcttatggatgcgaggctatggtaccagttgagattggggccggctccttacgaagagatgttttcaacattgaatagaacgaagaaaagca

SEQ ID NO: 158738 - DNA, 773 bp, Cannabis sativa
tttagaatgaatttatcattaaaaaatcaattatttacatcaaataattcaatctaatgaataattcatgaataatgtgaagacatcggtggcggtgaagttgttgatataaagaaaaaaagtctgcatgtcttcaaattataaagaaatattaaaaatcgaggtcttcatgctatttattgatattactgtcgaggtgtcatgcatacatcaaaaattaatagttacttaaacttaatgcaaataaaagaaaaaagaaaaaaaataataaataagattagagataaatggagaatcttcattaaaaaataaaagaaaaaaataaaaagagaaaaagaagaagaagaaatagtgtaagagaaagatgtatataaaacaacttttattaaaaaacaaaaaaataaaataaaaagaaaaaagaagaagaaaaaaacgtgagatatatagaataatatataaatatatattatatttatttataagtttagagttatatgtgttttaaaaattagagaaaatttaaagttaggtatgtaagtttttaattagtttattaaaataatagtaaaatataatttatagatttatgatataataaaatataaaaatgagagaattaaagagtagagaaaaataactttagagtgatttgagagtgccacgtcatataatatatatatatatatatagatatctaatatcaattcaaatatcatcaaatatcatgttcaaaaaatattaatgggatttgttttatttttattttattattt

SEQ ID NO: 158739 - DNA, 776 bp, Cannabis sativa
ggtccgatggggtccgattggtgtccgatggtgtatagatttattgtattttcaagattttggataacttttctgtgagatttttgttctaaattgtaattgtatttttcaatgtatgtgacagctttaactattaatacgtttgttatgtataatggtgtttgggagcttgagggtagagattgggtttataatcgggccaaaaatttgacatttaatattgatccgaacgtaagctactcaggtttggttgatcttttgtatgatgaactggatgttgaaaaagtgcagtatgacttgaaattataaataaattacaagtacatgaaagacttaatgtatcaccctgaagttattgaaaatgataagcgtgcaaggtactttttgtctacacttgcaaagaagccaaatgaatttactcccttgtttgtgactttgttaaagaagaatgttcgtgccgatcctagtcccacaccaagttctgttaaggacactcgtaacgagattgggagttttgttctaaaaacaaatccagaggtattggttgccaatgtattacctgaattaaacactatgatgccgagtgctgatattgtagtacaaatgcccttcattattggtttttttttatggtccagaccctgaatattatgttgagggaaatgataatgtaagagacgaccaatatacagaggtccatgttattgtagctttgaacttgactccactatcataccaaataccacccaggccaccgacatggaaaagaatgcccc

SEQ ID NO: 158740 - DNA, 809 bp, Cannabis sativa
  modified_base (432)..(443): a, c, t, g, unknown or other
tcctgtcgggtgagcaaactggctggtgctgacgactcatctctgaatgtgttggtggatggagtcttgctggagcttaccagggttagtcttttcttttcgacacttcccttttagcttttcatacttagcttcatatgttgaccttttcctttacgcaggccggtttgaagttggcttatccctactcccgggctaaatctgctacttccaagagtacggctctgtccgacacgttgagggcggaggcggacttggcctagaaggaagctgaggaggccagggcagagactgcagctgttcgccatgagttgggtgaggccaacaagaagttgtttgctgccgagaagaagatcaccgtgctgaccaaggatctcgaggctgctgatctccttgagaaaaccatcgagaccttatctgctgaggttgatnnnnnnnnnnnngagaggacttctctgcggcaggtcttcttcggctgaaggacgataaggacgctcaagcggacgaggcggtccgcttgaaggagaaagtcgatgctttagagactgccggcctcgagctcttctttgatttttggaaggctaatccccaggccaacttcgactacttgggcgacgccaaggacatgtacctcgagtactgcgcggcccaagttgcctatggtgggaaagaggtggctgcttcaactttcggccaagcttctaactaggttgctgatgcgtctcctgctcgaacaacagatcctcctgctccagttggctcagaagaaccaaatccagaacctgggactccagctgtttgaacattga

SEQ ID NO: 158741 - DNA, 615 bp, Cannabis sativa
gattcaaatgatgttttctaagaattcttccgagtatgttatctgttttcaacaaaaattaagatttaactatttttgaggaccaaataaaacttttaaggggccaaaacttggacccaacacccaagttgacacctggaactaggcccaacacctgggttatttccaatctgtttcttgttaaagtgttacgggaatttttttcgttataaaaaataacagagatacaagaaaactcagggagtaaaacacaagcccgagggccaaaaatctgagcctagctcctaggttgacctggtgcactagtttcgatcattcaaatgccaaatttgatccaagcattctctccataatgctcaaaaatgggctaggagaccttttcctcaagttcttgaaccttggaagtatcaaaacaacatactagaagctctgaaacgagcacccaacacccatgttgacaaatggtctggtgcactgggttctgcttattcggttgtaattctatctacaccgtctatctagtttttcatagtaaataagatccatgaagtcagagaagtaaataaattcacaactttgcatttctcatttccaacatgggaaactcactcaaaa

SEQ ID NO: 158742 - DNA, 644 bp, Cannabis sativa
  modified_base (167)..(182): a, c, t, g, unknown or other
  modified_base (485)..(490): a, c, t, g, unknown or other
aacgatttttatatccaaaaccagcgggtgtcaaggatatgtttcttccactagctagtagggccagcgaattcttagagagccttccatgtcatttaggacaatgaaagcccctacagtgcatacttttccatattctgatcaatcttccatacttccgtgtccannnnnnnnnnnnnnnnaaccaagttgttgcatcaatggttatggtgatctcatagctgatcaatctagtactttcgcatattatgctaatcttccatgtccattccattattccatataaccaagttgttgcaccaatggttatggtgatctcgtatccgatcaatctactactttcgcatattatgatcaatcttccatgctttgataaggtgagcatgaacaccttatgttgtgctcaatgactataaacacctaaacgatttttatatccaaaaccactgggtgttaaggataggtttcttccactagctagcagnnnnnncgaattcttagagaaccttccatctattcggacaatgaaagcccctacagtgcatacttttccatattctgatcaatcctccatacttctgtgctcattccattgtttcatataactaagttgttgcatcaatggttatggtgatctagtagcc

SEQ ID NO: 158743 - DNA, 766 bp, Cannabis sativa
  modified_base (363)..(365): a, c, t, g, unknown or other
taattataaattggactgatatctcacaacaattatcccctgaaattgtgggatttgattacaacccacgtaaaataaatgcggttattatttaaaaatcacacaattgtgattggttcacttttactgggtcaatgcatacgtgtattaaatatgttgtaaaacgtatcgtcctaggacaactcactgggaacatagcaacaataaccctggttgcgagctggagtttttcccatgtctttccgaggttgataatataaatcttgtcgtttctgtgcttgaagacataacgctccatctaacaatcgcagttctcggtgacaaggtgaactttcacaatcaacatcatttgaatgtcagctnnnatctgagagagctgactcgacggagctatggatctcatgaaaagatgcctggagctaatgagtgaaggtaccatgagtgtgccctcctatagcaagatggatgcctcgctattctttgttaagagtcactcgactgttatacttagtttatgtaatgtatgttatacgctaagtatcttaacaatcatcatgtctcgtctacgtctcttcatgcgtagcgaggttgatgcctcgccttgcacttctggtgtcgtatggtttctcgttaatgcacaaggcaattgtttatatatctttatctcgcgtaacaccttacagtcaacaagttgtaaatatactctgtcaattccgcatttaataagttattctattttcaaatataaatatcattacatttgttg

SEQ ID NO: 158744 - DNA, 656 bp, Cannabis sativa
aataccatacacgaataataatgttgtcctaaaggcaatgactgaattattcagacttaggaaagtttgatacagactttagtgttatttctagatatggaataattgctagtgtgactccatgataacatagatgcaatttccaaacattaaataatcctataacctaagaagagtaaaacatatagatgaggaattcataaaatcatggattgtgtgactaaggaaaatatgatggtggagtaggttgtaactgagtacaacctatgagatcctattacattctttatgcgtaatactacatttgatcaagacatcaagtatatgagactaaattgaaatgcactttagttttatattagtgcaagtgggagtttgttgggatttatgtcctaaataaaacccaaattcaatgtaatcatatttacttttagtaaagattagaaatcataccatgacttagtcatatgctttgttcacgtgtttattacatgattataggtttaatatataagttctattaaatcccggacatatagttactcacaattataataatgtcatcacagtagaaagtaattgtgatcgtatgcttcaaattatttagtctcacgatttatcactgcactgaatttatacttgtatgataatcaaca

SEQ ID NO: 158745 - DNA, 851 bp, Cannabis sativa
  modified_base (287)..(290): a, c, t, g, unknown or other
  modified_base (446)..(457): a, c, t, g, unknown or other
  modified_base (795)..(823): a, c, t, g, unknown or other
aaaggagtctctcatctactagctacgttccttttattatatggatttaggatttaattatatgaattaaaaaagaataaaataataggaaaaaatacatagtggccgaccacttatgggcctcactagttacaattttgccattttatttcaactatttatcattctttcaataatatcatattttctaatttcaatcctataaatgtcaaaaatatttatttaatagttataattaattatcaaataaaattcccatttatcttatttattaattagaccatacnnnntctcttaattaacaaataaactcccaaacttcttttcttcacaattaagcacttgcttagtgaaaattcataaataagacaaagtctaattttagaattataattgatttattaaagtcaattaactgagtctggaagcagtattatctcaactannnnnnnnnnnntgggcttatataaccgagctttcaataagtagatatagaatttaccttgtaaatttcctaacttattaattccaccctgggccactatagatttggaattaaatagcactctcaattatatagaatgctctatatgtaccaaaatatagatatgttatgattatccattattataatcttaatagtcaaagatcctctatatatgatatacatcgaaaaaccatttacccttcaatgtatgttatccttaaaacacttagctacctataaatgatatttcaataaactgatatgattactgacatgagatctgaatcatttatctctattcagccaannnnnnnnnnnnnnnnnnnnnnnnnnnnnaatacttatagaagctataaattccata

SEQ ID NO: 158746 - DNA, 545 bp, Cannabis sativa
  modified_base (235)..(241): a, c, t, g, unknown or other
aaagaagaagatgaaaaaaaaaaaggaagatagaaagaacagaaaataaaaaaacaaaaactagaaacatatgtgtaattttttaaacacaaaatataaaaaaataaaaaagaaaagaagaagatgaacatgaagggagaatgagaattagaattagaacgaaaaacaaagaaaaaatctaagtagtgtttggtaacacttttgtttttgaattttttaatcacaaaaataaaannnnnnnttttgtttttaaaattttgattttgaaaaacaaaaatgtgttctataaccacttttgttttcaattttaaaaacagaaaacaaaagagtgttctgtaaattttatttttattttcatttattaattttatttaagttaggttcgggtcccaacctaggataaggggccggcgccggggccgggtctaggattggggctaagatccgtttgggttctaaggtctaggttggagtcagactcaaaaatattaattaagaaaaaaattgtttagaaaaaattagaaagtaattttttaaaaaaaaaa

SEQ ID NO: 158747 - DNA, 522 bp, Cannabis sativa
taagttagttggatgtattttttttgtaattattttaagaaacttacaaaaatattagaatttgagttaatttttacaaaactactgtcacacgaaatttttttcaaattactatgtttttataaatcactagtagaacacaaaacaaaaaaactcaaaacagcagtagaacaactaaaaaaacactagtgaaaacttaacacagtatactgtagtatgaaacttattaaaaaaacacagtaaaaaaataaaaaataccgtctggcagtatttttcgtaaaaaaatagtaaaagttagtataccatgtaaatttcccattatttttaagtatagaattacaaatcttgctatttatttatttctaattgagtgatctgaatcacaaatctcacttatttattcgagtttttataaaaatattagattttagataaaagtttataattttactgtcatacaatttttttttacaaaaatactatctttttataaaataaccctaaaataacaaaacagaacaa

SEQ ID NO: 158748 - DNA, 680 bp, Cannabis sativa
tcttccgatctttgcaaatcctacaattggtatcagagcttacggagaaggagtttgaagaagatcatcttgatctcagttcaagaatctgatgaacatccaagaaaatgggaagtgcgaaatatgatctcgaaaagtttactggaaagaacgattttggtctatagaggttaaagatgagggcgatgttggttcagcaggggattcaagcagctctattgggagaggagaatttaccaaccactttgacagagaaagagaagatggagatgcttgacaaagctcacagtgccataatcttgagcttgggagacaaggtcttgtgtgaggtgtcaaaggagaaaacaacttcaagtgtttggtcaaagttggaaagcctctacatgacgaaatctttagcaaatagattgttcttgaaacagaaactgtactcattcaagatgctggcagggagaactattgaagatcacctcgacgatttcaataagatcattattgatcttgagaacattggaattaaaattgaagatgaagaccaagctattatcattctgaattctcttcccattgaaaattatgagcactttgtagataccatgatgtatggtaaagaatccttgactcttgaagaagttcaaaatgctctaatgtcaaaagaattaaagagaagatcagaactg

SEQ ID NO: 158749 - DNA, 604 bp, Cannabis sativa
aagaagcagtacgaccaagcggtctctgactatatctacacaactctttccaagattccagacttcgacttctcgatccttggggcggaggcggctgagatgtttgtgcggtgggtgctcgaggaggacgtcgagcccggttctgtccatccacttcggcctgcagggggcgaagcttgtcttggattgcaatgtactgatcggtggtcagttggacaataccctcggacaccgttgccggagtaaagggtggaaagtgccccgttgtggccgttggtgtagacgtttccccgacatgagggcctgtagtttcagggaataggttgagaggtcttacattaccccgacctactccgccgttgatgacatctacgggaggtactctgactcctgaaagtggaacgttcatcattccaatgttgatggattcgttgttaagacccccgttttcttggtttccagccattatgattctttttctaaattagcaaggaagtatttctcgattcccacagacgacgccaaatgttgtcgagcaaatttcgcaacaccaaaaataaatagtaacaataataattataataataatatgaagaacaagtgc

SEQ ID NO: 158750 - DNA, 561 bp, Cannabis sativa
  modified_base (51)..(54): a, c, t, g, unknown or other
  modified_base (497)..(500): a, c, t, g, unknown or other
ctcctcactcattctgaatccattcagcaaattccatctaaagagagttgnnnnagcgaggaagcccgaactccaataccgaagctatcgcatggattgaagctgaaatatcaatggctggaggtatatcgatccttcattgtatatatattattgatatatttatagtttttccgcattacatatcgtttatatatatgctatatttcatatactatattatagtctaacagttggtatcagagcggttttatctctgtcttgattatggttgagtttcatatatatatactcgtatatacactattcatatatatatatatatttattttcgttcgttcgtgtatatatatactcatattcatacaatcccgattatatatatatttgttaggttttgagccctaaataaaactcatttcaatataatcaaatttattagttaataaatattagaaataatatttttatcttgcatggttcacatgatttatttnnnnattatatataatgtataaattctattaagtccagaacatattatttgttaatgattatagt

SEQ ID NO: 158751 - DNA, 509 bp, Cannabis sativa
  modified_base (200)..(203): a, c, t, g, unknown or other
gggttgggttttcttcagcagttccaggttatttctagcagctcttagtgtgatccaagccaaggtaaagtctcttatagctccctctttgatttcttgggttttaagttttgaagttttgcatgcttgatgagttttgttgctgtagttgttgctattgtttgattgtgttctctgtggttaaaatatgttggaataannnnatttaagcttgaattgtaggctgttattgggttcgggcaagctttgagtcttagaacttaagcttggccctttaatggaaagttttgattctgagctggtagttgtgttttattgccttgaaaatgttctttgggatatatggagcaggtctggagagtttggtatggtttggggttgttttgagtgagttatgaatttttgactcattcctgcactgaactgaaattccgattcagttgggcctgtaggaactggaactctggttggctctcaggaaaccccacagaaccggaattctggttggg

SEQ ID NO: 158752 - DNA, 725 bp, Cannabis sativa
gcacaacctcaacacttaatgcaatagaggctatatttgcaagccgagttctacaaaatcagattaaaaaaaaaccatacccttatctttccaaaaaaaaacgtgactgaaaacttcaagaactaaataaaaaaatgaaaagaagatgaagaagaagaacgaaacaagaaataaaataagaacatggagagaaaactaaaataaaaaacgtgattgtatggattttgaaacaagaaaaaaaaagagaaaaacatttgaagaagaagaagaagatgaacatggagaaagagaataagatataggatgaacataaagagagagagagagagagagaatatatatatatatatatatgttttaggtgtcatctttatcatcatcatcatcatttttaaggaaatataaataaatgaacttgtcacaaagtaatgacatcaattaaatcaaaattatatatatataaattaaagagaacacatgtacctttatgtatgtatatatctaacatcaaatcttttatttaataaacttttataccaacattaaaatttttgtcatttctcaaaacatgacaaaggaaatattttagtaaaaggcaatatattatcgtataaaatttataaaaatacacaataaaaaaaggaataattacataaggctctattttttgtaaaataattatatttttacgttcaaagaatcactactacaatgttagcctttag

SEQ ID NO: 158753 - DNA, 715 bp, Cannabis sativa
  modified_base (598)..(614): a, c, t, g, unknown or other
ttgtcaaaatttgctcgacaacaattggcgccgtctgtgggaaacgtattttataatatttttatgattttggaggagaatcatgacgtgacaagccgagtatacaaagaaatcagttcctgcgtactcagaagatagccaaaatcagcccaaatctccgttagagattatcaacaaccttgcccagaagtacagagttttttctcagccccaacctgagataaatcaaatgtctgtgatggcagaacgaactggtacaactatttgcgaaacagagaataaagggagaaattttaccaaacactcagatcttgaagctgtacaaatcctaaggtgctacatcttggagccgctcgagttttagagcgtctcgaactttatagaaactggagaaatcatcatttcaattccaacaacttcaaaacagctagatcaacatctataaagtaagacatgaggtattatacgtattctcgcacaacacagacacaattttaaacgtcaaaggaaaagaagttatcgaaactccaaagcagcgattacgtattgctttgagtcgcataagacgatcatgttgaagaagaacaccgaggttggnnnnnnnnnnnnnnnnntatgacagcaaccgataaaggaaagaccaatctccatagagccatagagaagaaaacccaataaattgtcacaaaggttccaacaatctcaaaaccaattc

SEQ ID NO: 158754 - DNA, 556 bp, Cannabis sativa
taattattgttttattaattattattttattttttattgatttattaattattgttttattttttattattttattaataattattttattttttattgatttcattcttggtttttttagagacctccacatctaataattccagtgtcggagcattacacaggccgtgtcacatggcgcggtggtagttactactacccgaagattaaggctaaatttgaagaattcagactatgggatagggtgagggaatcccctttcaaacagtttttcgagagagaacctttacaattttgaggagcattgattcatcagttgatgttgcacaaaatcaaatctgacaagccggacgaggtacatttttatgtgggaaggaagagatgtagatttggtagggtggagtttggcttggtgagtgggttaaacttgttgcccagacttactggggaagacatcaaatagaaaggaagttcagaccggttgattatggaatatttcaacggtaatccttccatcagctttagccaactacgtagagtttttgagagctgcaca

SEQ ID NO: 158755 - DNA, 625 bp, Cannabis sativa
tttttagggtgcgatcccggacaccaaaaagaatcacgcgatgatgacggagcccctcgtgatccccaaatgggcgatcaagtcacacagaatgtgaacaacccgactaagccaatcaactcgccgattgcactagctgcgaccacaaaggtaataatcccagctaacatagccgcggttgttgctgtataagtggtaacacagaccaattccgtcttactaggaggtattcaccaagaaagcctcttgcgagcattaagaatgatcgagtagcaaagaaagcccatctacaatctccatgggacatcgccttttacagaagaagtgcgacaagctcgactcctaaagggtttcaggctatctaaatcgttcaattacaaaggtaatactaacccaatcaattacttagataaatttaatatgattatggaagtagatcaggtaccacagtaggcaaaatgcctgattggtttagccaattacctgaggcctccatataaacctagaagaccttcgtagacttgttcttgattcacttccaagccacgatgacgtacaaactactgtacacaacgctggcaaatattaaacaggaagtcggtgagtctttacaggattattttaa

SEQ ID NO: 158756 - DNA, 534 bp, Cannabis sativa
gtccacgtatattgggcaaaaccatgggcaacatttaccccccaagccttgtttaattgaaaaatgaacaagccttgttcaaatgcctccggttggctcctcagtttcatggcatgtgcttcgggcacgtgaaggtgtatttaatgatcatcattactgcagcgattcactttttacaggcgttgattcgtttcatgcccattaattgatacggcgcattaatgggtgtcagacgaatactcaaacgtttccaccgccttaattacaaatcaatctagccgttggatcttgggaatttgaatcgtgcgccaccccagccgttcaattggtaggtgattgcgcttgttccacatgcaccttggcctataaaagccaccatccttccttcatttggttactttcatcctttcaccaaatttcttcgaatgctccagagagaaagaaaaccctcaaactagaaaaccttcaaacactataggtttcttactaaccttcattcgttactgtcagtcaacatttcttcgtcgatcaaca

SEQ ID NO: 158757 - DNA, 590 bp, Cannabis sativa
aggctggatatcagagacttttacatacttagcctcgattcaattcctaaagatcaacttcccttacttattggaatcatttggcaaatatggaacaccagaaatgctcatctttttcaaaggcaaaacttatgtacaaatgttcaggaatatgtatcaagtttactgcaggattatcaagaggctcaatttccccccatcgtgtccactacctctacaagcccttcccctacagctccagatcagattttgactccgtcaaccactgctctttttgtagatgctgccctcaatcaatctgcttcaaccacaggttttggcttagtctttatgaatggtgtctcccacattcttcaatctgcaagtatcaccaagtcagggacaccttcccctatttttgctgaagctcaagcccttgctgaaggaatacagtggtgtttagccttaaatttgaagcccgattatattttctctgactgtctcaaccttgttacaaaggtaaaaggaaattggcaagaccattctcctctgtcgtctcttgttcaccagatcagaaccttcctctccaggttccctgaagcttctttgct

SEQ ID NO: 158758 - DNA, 580 bp, Cannabis sativa
  modified_base (518)..(551): a, c, t, g, unknown or other
tcactgctacagcttaaaatccaagccaaagaatcaacaaaatcactgttttcgttcacaaatgccttaatttcatcattaggagtcctaacgagacgtctaatacgaagagcttcttcaattccaaccacatttccttctttaaaacgcctaataagaaataaagccatggctttgtttactccacgtgatcgaattcactcaagagatctaccggcgagtgaccacggaattgaagtcagaagcatgcagggttaaaagggttagtgagtttcatgctgggaatgaggatcaacaagccgaagaggaccaccatattggaatgcgaatcgtcagggttagcaatttttagagttagtattgttcgaattatattttaccatgatctagatttacgaccatgtatgttatttaacatcctaaatatgaatatctaaaacaatgtaaaataaatacatataaagtgtgagaaacgttacagtgggtgcagcgagattaaatgactccttccactcagnnnnnnnnnnnnnnnnnnnnnnnnnnnnnnnnnnatcaccaagatctgagcccgattttcctt

SEQ ID NO: 158759 - DNA, 534 bp, Cannabis sativa
attattaatttccttaaaaaaaaatttattgttaatctgtaaagataatatgagatggaaaaattaatttttatttcatttaatatgcatataatatttttttctattttgaataatatgaatttattttaatttatttttattttttaaattattttttctaaaagaattattagtttggccattactatatttatatgtggctctttattgatcaactaacagaacgttaaattgagtggtaaatttagaaatttgaggatatcaataagaactacaatgatgacatcaactttatatgattagaatataaaaataatgcattatgaaaaagtttgattcataatctcacacttgtttcttttacataatttcacacttgttttttttttttgttgttgttcaatttataatgtttgattcatgataaattccttctataaaaaaaagcactctttctatattctgcaaagtaaaaaaaaaacttcacacatatatagttataaatacatatatatataaataatttaataa

SEQ ID NO: 158760 - DNA, 573 bp, Cannabis sativa
attcaaggagatatgatgacttgggataatcatcgttctggtaggggtcatgttaagtctgccctcgataaaggtttagccaacggtgcttggttcaatctctttcctagagctactctaagctcggtccatactagtaattccgaccacaggccgctgttccttcagtcgggtggagtccaacctaagataaagagatgcttcaagtttgaggaggggtggactcgtgatgagagaagaagattggtggtagcaagcgcttggaagtcggttaatcactcttgggcccctgtgcgagtgtttaaaaaagtaggcgccactagggttgctctcctgcactggaatcagactcaatttggcaagcttgatttggagatcaagcacctagaaaatcaactcaactctttgcagagccttcctgctgggtcccgagactggaaccgagagtgtgatattcgtcgagctttaaacgaatcccgagaaaggaaagcgatctattggaaacaaagagcaaggatttcttggctcaaagatggggataagtgctcaaagtttttctttctgtctgccact

SEQ ID NO: 158761 - DNA, 1170 bp, Cannabis sativa
tggtgatctggtcctaagacgagtctttccagccactcaggaacccggagtgggggtaattgggcctaattgggaagaaccatacgaaatcgaggacgaaatcggctccaggacatacaagctcaaaagaatggacggaaccatggtgcctagggcctggaacgctgatcacctccgaaagtattaccaatagtcgaaaaatataaactcatgctctgtaaagtaaatttgtaccggacaagtatgtgcaacctctaaattaatatttgtaaagttgagtgccctaaaaataattttcatgaaactcaggggggtagtaaggcataccacacggacaaatataaaacaggccaaaagtttaacgaacttaaaaagcaaagtatgtattcaagcatagatgtaaaagatgttcaaacccagcaaaaaagctttaaaaaaatattaagggccttaaattgtctccccttaagaaaaaatataaattatctgaaaggggagaaaaaaggactgtaaatgtaaataaaataaagaagaaaaaaaagagatagtgataatagcagtaatggttagcggttggcttaatcaatatggggcggaaggcgaggccccctgcgctcctccagcagggcatcaagtctcttcttcttctcccagaagcggacaagaacctcctcaggctttaggtagaaattgagcttaaggttttgaccgttagtctgccaggtcataaagacaccatcatcaaagtgcttggtgcaatgcttgcagacaacaggggccaggagctcatcccttttcaccttcttcaagacctgatctttgaaatctctgagctccttcacctcaacggtcaagttggtcgtcgtctgcaagtcaacctgatccagctcctccatagacttcagcctggcagtcagatcttcaactgcctcgttggcctccctcagcccgcgcctcgcctaagccacgacctcatcccaggtcttcagctcctccgccttggccttcagtgcctccttatgcttcatctccgactgagcctccctctgttgggcctcttcccgaaatgctttcctctcagctgccagatctctcagactcttcatggcctcgtccatgcccccgaactcggacatgacgtacccatgatcaattaaagtctttgagagg

SEQ ID NO: 158762 - DNA, 766 bp, Cannabis sativa
attatactcgagttggattgtttgggaactccaattcaactttttgagatttgtctttcatggatctgaaaattgaagtcaaaacattagttttatgcaaattaaaccggatttttgatttaattttagttcggtagtagtttttctttatttattttttcatatattcgaaatagcccatgttttgattgattctagtcgtcttctcaggtgaagtcactggaattaatggtggttctctttttggttgaattttcatttcgattgcgttcggttattgcatggttgcgcgatggttgcgcgatagttgccgaggaagcatggatcatgggttgaaggtgtgtgtaagtggtgtttgtgtaatttttttttatttgtactgtatatttgtttatttggctatgctgaaaatatttttgtaatattactatttttttttggttaaaactgaaaaaaaaaaaaaaaagaaaaaaaaaactcatatatatatataatatttttacgttaactttaacagaatatcctattaattaacagaatattctttattaattttataatattattatatatattaaaaataaaaattatatacatattttatataaagaaatttaaatttaaatttaaaatattgaaaatgttgaagtgtaataatgaaaaacccctatttttaattatatttttaaatttgttggattaattttgaattaaaataaaaaaaaattatataaatattttctataaaaaaatttaaatttaaaat

SEQ ID NO: 158763 - DNA, 557 bp, Cannabis sativa
aactaactctagacgtcgtaataatcgtactcgcagggaacggagcgccaatcaggagggacttgatttgaaccagcccacgtcgagggaccagtctgcgagaaacctcaatcaggaggcccagatggaggaggatcttgaacgacgtaatcctcacagcagaccccagtcgcgagacaacgacgttgaatccgcttcctcctcttcgcatggtcgcacgcccagcaagtacactagatcaggttcggtggaaacactgcaaggagaacggtatcaggttcataggggcgatctacgcaatcaccttaacgttgtcttcagggcgcgctcccagacgcctcgagatgtcgaagagccccatgattctcgaatgggcgatcagggcgtaaacaatcgtatcaacccgcctaccgcaccagctgcgactactggttaatatcccagcgaatctcgccacagtagcaacaacgcctgcggcaacacaagtcaatactcccttgaccgagaatatcgaccaaggtatgcttctgcaggccttaaaaatgctcgagcagcag

SEQ ID NO: 158764 - DNA, 506 bp, Cannabis sativa
tttagggttttgttagtttggttgagttaaataataggagagagaaaaatatatttggttttattaattaattaattaactttttcaaaaaaaaaataaaaaaaccaatatctgctttttttaggtgtttcagcgtcactttatgcgtgagtgggaaagtcttcccacacgcgcattgggtgacgctatacataattaattttatttttaataaaaaataaaaaaaaaaatttaaaatttcagaatagttttagtgacacgcattgtgagttagcaatattaaaattttaaagtcatttaatgcgcatcactaaaaattctctaaaatatttagtaacacacaccttttgtgcgtgtcactgtagtgtcactaaaaatcaattttgtagtagtgatatttatattttcagaatacaatacaattacactttcacaagtttttaataacaattttctatcaatggttcaaactgtatgttaaagtatggaatatgagatcggaagag

SEQ ID NO: 158765 - DNA, 885 bp, Cannabis sativa
caacctgtttactatgttagtaaaaggttattgggggcagagtcaagaaatctccctcttgaaaaacttaccttatgcttgatttatgcatctcgcaaactacggccttatttctaggcacatcccataaagtcttaactgatcaacaattaagacaagttttatcaaaacctgatgcttcaggaagattgataaaatggtcaatcgagttgggacaatttgatataacctaccacatgagaacatcaattaaaggccaagctttggtcgattttctaattgaaaggataatctcaaaagaggatccattcgtcaagcacaatgcagaaactttgaaattatatgtggatgggcttcgaatgagaatggctcgggggcagcagtgataatgatgtcgcctgataacttcaaattctactatgcattaagatttcaatttgattctttaaacaacgaaacgtaatatgaagctttattggctagcttgagaatagttgaagccttaaaagttaagaatcttatatgttatagtgactcgcaattgattgtgaatcaagttctaggtgaataccaggcgaaaggattaaagatggcaaaatatttagagaaggtttggaagaacttagaaaagtttgattactttaagattgaacaaattccaagagaacataactcaaatgctaatgcactgaaaaaattggccttgcaaaatgaactcgataagttaaatttagtaccggtcgaagtttcgagcgacccaagtatatgtgaaaaggaagaagttgagatgacagacacctcaccaacatggatgacacccatagtcaaatatctacttaacggggaacttcctacagacaaaattgaggcacacaaactcttgta

SEQ ID NO: 158766 - DNA, 514 bp, Cannabis sativa
  modified_base (433)..(442): a, c, t, g, unknown or other
aagacagggatatcatccagttgacctccgatgcaaatctagtgcagaacgggctctacctagaggacttttcttctaagtccgcgacagggaagaagggcaaatctgctgctgctcggcgtgaatgagctcataaggagaatgagctgattcaacttaagcgtgaagctaagttgaagggaggttctcgggcagcgcagtatgctcaggagaccatgaatcctgaagatgaggtcgaggctgaggctgaggctgagcaggtggctcctttgaggaggaagaagaaactcttggccacgcccaggcccgtggaacatggcattcgcataagggagcccatttcacctgttcgaccatcccatccctatgctggaaaagggaaggccgttatggctgagataacgtcgatgacaggtgatgatggacttctgannnnnnnnnnggacagtcactctgcgctttacttctttttcagcttcttgactttcatactttgtattttttgttggttttt

SEQ ID NO: 158767 - DNA, 658 bp, Cannabis sativa
tgttgtttcgtgtgttttcagatatcggggcctagacttggatgtttcatttctttatggtacaaaatactaaaagatggtgagttggaaacagcttagtggaatctgaacacccattctggagttctcagagtcaatctgggcgcaggtctagggacccctcccaagtcgactactatgactcgggactactcaactttgagatgttatctttcttgccatgtgtcaaacattaatgttcacgttaccatgaaaatttttcgggttaacaaatgtattggatcaaatcgatgaactaaagagaagaggcttggcttttgttgcaccaatctaatttgtgtcctcaaccatcatattcctttatttctttcccatcaatgagtaaattcccttctatagaatcatagaatctaaaaccatctctaatggatggtgtatattttagattaattttggcctaaaatataccatgaagtatatttggcccaatttttgtatttgtgctccaatgtaaatgttgcaaattagttataaaagtcacctgttatccaaaatttcgtccacctgacgtggcatgttcacgtaagccaaagatagagtacatgtggaatatagctgtaacaccctaactaacgaaggcgtattacgtgatttttaa

SEQ ID NO: 158768 - DNA, 831 bp, Cannabis sativa
  modified_base (57)..(66): a, c, t, g, unknown or other
  modified_base (327)..(328): a, c, t, g, unknown or other
taaaaatgagaccaactggaagctttgtaaaggggggactaaacctagtgggccaannnnnnnnnnggattgggcttctaattttagggtctgattttgtatcttagggacccaacaacaaaaagggaagaaaaccaagtacacctccatcttccaataacgtgagcaactgccattttttgaaggggaagtaattgcagaagaaaagtacagcagaggaaggaaagagaggggggaccaagccttgtgtttgattttctttactcttccttattatttttctttcttctcttcttttcttgtttcttgtacttagatattaaaaannttgtgaattgttaacaaagggcagcagccatggaggaatattttttactttggattttaattttttacttgaatatgagctagacttttgaggcttgaatggctatgaacttctatgttgggtatgattaatttttaaacttattttagcatttttgcctttgttcattcaagtgagtttcattttatttgattgttgtttcttggccatgaataacaatttgttaagctagatcttattccgagagggctagatctagtagttcaacttgattggagcaagtgaaaacctagatttgggtttctctttgtaagtggaataggaatatttcatttacctttcataatttaaaaaattgatgtttgaatagtgttttgcttgctggtttgatataggaatatattgagctaagtggtagacataaatttgtgaatgttggaaaattctcacaagcctagaggaatttttgttatctatgtgcagaatgctggagtaatgctgaa

SEQ ID NO: 158769 - DNA, 570 bp, Cannabis sativa
ttttagtattttcaatttttagcttagtaccagacattatttttttcagttgaatcgtgaaaaacgtgaaaaaaaaaaataaaaaaaaataattttttttttaattttttggactgggtgcccagtggtcgcgaccaccatgttcttgggtcgcgaccctttttggtagtcgcgaccctggtcgcgacctgggactttacagaaacaggcaaaaatttcactcccaaaagtcgcgactagggtcaacccaagtcgcgaccctagtcgcgacttcccctttttccagaaaccctatgaaatccgaacttaagcaagtcgcgaccagcttttggccaagtcgcgactagctcacagatttctataaatacctcaatttttccccccatttaaccctacgcccaaattcaaacataccagccgtcctcaaccttttcccttcaaaagtttcaaaattttcttccccaaatcttcaattctttcatcttcaaaccaatttctcaaacccaatccattcaaaaaacccaatttcactcatcaatctacacctaccatcaaaaaccataccaaaaa

SEQ ID NO: 158770 - DNA, 545 bp, Cannabis sativa
acaatacgacctaatacggcattccaaacgaggcctattaatattatttaatacaatactatgtttagtattaacttgtattaatagattgttaaagttataatatattttcaatcaacacgacctaaacaccgactacgggtcgggttcggatctagtttcgggtcttgagtcccgggtcatggtctaggtccgagactggatccgagtctgggtccaaatccggaactgggtctaggtcctaggtttcgagttcgagtctgggtccgggtgttaaagtattgaaatgatgaaataagttatttcatcatttcaatacttctaactcatcatcaagaaactggtttcttcatggtaatttttccgataatatttctggcgacaatgccagttctgatgatttttctggagtttgctgccggtattgaaaaagtctccaaagtagctgtcggtgtcaaaaaattcgtcggagttactgtcgacgccaaaaaaacgtcgagattggcattgtcatcgaaaaaatcactggaaaaatcaccaagaaa

SEQ ID NO: 158771 - DNA, 617 bp, Cannabis sativa
  modified_base (440)..(442): a, c, t, g, unknown or other
  modified_base (567)..(573): a, c, t, g, unknown or other
caacaaaataattctagcaaaagacaaattaactcataacaaattgtgcaaaaattacaaaattgaaaaagagagaaagatagaaataaaacccattttagggttgccacaagactctaagttcctcttcctaatttctcttcttcttcctcttgatttttttgccaatctcaaaattaaaaatgctaaattaaaatcctaaatagcactcacataaactctctctttttttctttttcttcttttttctttctttgttgtaagtgacgagctcccaaaaagacccagccgcctatttctctctattccagtcacgcctactgcctctcaaatcatatatatatatatgataattttcttaactccttccatgtgtccaagatagggcaaaagatataaggacaacatatgataatgagagtgttggaattattttaccnnnatcttagatctactcacaagtagttgattaacaacctaaatatgaacttctaaaatgaatataaataaacacatataaagtatgagaaatgttacaatgaatgcagcagaataatatgtctcctnnnnnnnagatctctaacccttgatttctttctgttgcagagtataatcaa

SEQ ID NO: 158772 - DNA, 514 bp, Cannabis sativa
attcgtaaaaataccataattttaccttgacacttactataatttcaactatgtttagaaatctatcaatactattctaagaaattatctcatttcactattagtagagatagataaaatacttattctcgcaaaaattgtataacaaataaaatttaaaatatatgtatatttttaccgggtattacattctacccttcttaaagaaatttcgtcctcgaaatttaactaccaaatacacgagggacttcatgtttgtcaccacttactacatgacctccttatctaccatatggaccctacaaatatgtacttaacttttatcttattggtcaaactacagcgcatataacatatacgacttaattttagtattgttattcttccatagattacttaaataacaaaacatactccatcacaataacttatatatacgtgctttaaatacataagttttgcaataacatgctcgtaattttataaaaagttcttctcttatgaacatccttat

SEQ ID NO: 158773 - DNA, 520 bp, Cannabis sativa
tggcatatgttctatgttacactataaaaatgttattggaagttattagtaaaggagtgctaccgttaacctcctgttagaacctcttagtaaactttcacgctcgaaaatacatgtcggaatattttttttgaatttttttttcacgagggtgttcgttgcttacaacatcatccctataaatttttgaatagtgtatcgtggcgaaaatacgtttgaaattttttgaacgaccgtggtaaattagaatatcagaaactctattttcggtactataaattatttggaatttttcaaaaatttacagggatgatactgtaactataacgaatactgctatgaaaaagaaattaaaaaaaaatatttcgacatatgatttcggacgtagaagttaactaagaggttgtaataggaggttataattagcattcctctattactaatttgctaacagttttgtgaatttttataattgtaaagtttaatggaaacaaaatgaaaggataaaactttggtttgt

SEQ ID NO: 158774 - DNA, 845 bp, Cannabis sativa
taacatagtaatctatcactagtgtcatccaaataaagatgggcttagaattttaaaattctcccactcaaataagatattgtgatactatgtctaaggactttattggtatcaatttctattacaacagtaatatattaattggaacaaaaaattaagatcaagaataagttctaataatttgataatttgttcattatattacatccatgtctaatcaaaatatgtgtgtcatagagataatgtggtgtattgagtatagtctagagttcaaaataaactacatatgtcaatagcttcttccacccctaagtgttgtagagatcttgtggagttatgaatataatatagagttcaatagatataaaagatcgttgagcagtatatattacttttaacttcttccacccctatcagatcaaaagatctttttatcaaacaaaatcttaataattgctttaagaatttaacaaatattcataaacattgaattttaaattctaaatgtttatgtggtatgatctctttgcagagatgaatataccatagattttgtattaataataagacacaaacacatacaaacatgataaacatataaatataattggtattggcatacacaatataaagaaaatatgaagctcaattcataaatgcaattcataactaaaagagaaaaactttattaatattctcaataaaaatgaagtgtctgcataaatatgaaatagggaataaaatccgaaaccaataattgaaactaaattgttttaagttaaaacaattaattcaaaaattataaaagtagatttcgagcttcatcttcaatcttggacaatctc

SEQ ID NO: 158775 - DNA, 562 bp, Cannabis sativa
  modified_base (521)..(532): a, c, t, g, unknown or other
tggagctcctaaatccattgttttagatagaaatccaaagtttacatcgaagttttgggtaagtcttcagaaggctatgggcaccaagctcaagtttagcacaacctttcaccctcagactgatggtcaatcagaaagaacaattcaggtaataaaggattggttgcaagcctgtgtcatgtactttgagggttcgtggagtaagtacttgcctctaattgaattctcctacaacaatagctactagagtacaatagggatgactccttatgagatgctatatggtaggaaatgtcgctcccctattcattgggacgaaactggagaaaagaagtacttgggtccagaattagttcaaaggaccaatgaagctatagacaagatcaaggctcggatgcttgcttctcaaagcatgcagaaaagttatgctgatccgaagcgcagagatgtcacatttcaagcaggggaacatgttttcctactggtctcaccaatgaagggtattagacgctttgggaagnnnnnnnnnnnnagccctaggttcattgggccatttcagata

SEQ ID NO: 158776 - DNA, 558 bp, Cannabis sativa
tgcccctatcaaatacaagagaccaaataattctttgtacttagttgcggattttaaatttgagttatttgttctctgggtggtggtctcgttgggataaaaaaaaaagataatttgcggccaaattttctatacttttatgtttgttacggtttaattcccttactcgaaaaattatggctatactctctggattcgagaattgttttgctctgtagtccttccgtctattttaatctgttaagtaccaaagtggactgtcacaaagtacgtaaagtatacacgtgaaaaattttcattagtccacttaatattaataatataaatattaataaaataattaaaaatataaaaaaaaaatattttttcttttttctttaattgaaaaccctaaaaccaaaatcatcacctctctctctctcttcctctctcattaatctctctctttctctttgcttgtgcgacaccggcaacggacagattaggagtaatgtgctccgaccctcctctcgtccattttcccaaaacccacaaccctaaaaaccctgaccctctacg

SEQ ID NO: 158777 - DNA, 527 bp, Cannabis sativa
tcgagacagctatcaaaaacaaagtaaaattgcagtcagaaaaactagaataaaaggcatggattaatttaaccaagtctaatgcaaataattacttatgaattatacggaaggtgattctgctgatgggagaaaggtcgttcgtctaaaagaagtcatccttgaaagaagttttgttgggaaaatccacaatgatcttgcgatcgcctgtgtcagtcccaagatagtagaaaccccctgccgcattcttcctcgctggaatagccttgacagagtatagatactctatttccaggaggtagggcactcccaattcaggattttgtacataaccttcaaactggcaaggattctgtaggagatgggatttagttgaaacggggcaagcccaacgtggtttatgaagtccttaaagtagtcttacaggcggattatagctccagccctgatgtgctcaaggctccaagttcctataccagtcgagccacttgtactggtctcgctactggttccctcagaggtttcgc

SEQ ID NO: 158778 - DNA, 642 bp, Cannabis sativa
tttgttgagatctaataaaatgctatcaagtgaattgtgaatctatacataatacattgttaagtacgaaagtctagatttttcaagaatatgcaaagcaaattttgtccattaaactattaaaacatattgatcaaaaaagaatgtaatgtagtatacaagttcttttactaattaatatataatttctttctatttttttttcagggtaagagcgatctgtattcaaatggcgagatgaatattctgtgtgatcagtggattgaatacgtccaagtacaggcaatgcgacaagggctattacactgatcagtttatgtttttgtttatactttattctaactaattagtgacaatatatatataaattagtaaaaattaattaatgtaaggaaaactttattatatataaatcagtttctttttcagttttagtagtgataatatgtattttatcctaactatttttttccttgcaattcaatgacaggaaaaattgtcgctgaaaaatatcaaatttataattaaattgaaaattttattataggctatcgtttaaaattatgcctaaaatattataggtcacagttttaaactgtggcctatagtatagactacggtttaaaaccgtggcctatacta

SEQ ID NO: 158779 - DNA, 504 bp, Cannabis sativa
ttcattgttggtctaacttggcttttttatttttaatgggtcaaatcctaatgaattgtcatccattagagaaacagaatagtgttagatctcgatagataaatatttgtcaatgcaacatctagctgttcatcaatagatgacaccttagacaaggatttacaatatggaacagtgaagaagtgaagaagttaagaagtttataaatttataaaattataaaattaagaattaagaataactttgactctcgctaatcgggacatcgttaaatctttattttaaattcgaaattatctttaatttttcctcttagcttatttatttcgaattagtttaaagaatatatcattggatgaatggtttataaattatttgcatctaatgtcattctattttctctttagagattgaatggcttacatgatcatattcccgacattctatcctgaaatgatataaatcctcattcttagaatctcctacttatatatgcttatttta

SEQ ID NO: 158780 - DNA, 571 bp, Cannabis sativa
taaatttaggatcagcgaaatttgcatttctcatatttagcataaaacttatgcttctagagacgttacaacatcatccaaaggaatcacaatactcttactgaagacaattatgtagtcatcggtacgaaaactgttttaagaatatcctccttttgagtcttcaactggtaataactagatcgaagaccaaacctagagaaaatgatccttccctaaaattattcaatgtaacatttgtccttatcaaaggatacttatttttttcacaaataaaactggtgtactccagaatgaaatacttaaactggtaatttcaagcccaacctttcctgcaactgaatcttcactcttttcaattctacagctaccatccaattcagaattttggatacaggttttactcccattaccacttcaattcagaatcaatttctcgcttaaccaataaccttggtggttcctctaaaagtatctagaaaccttgagccacaagattgtgtcccaatctcactaatgttccctttataatattggccacaataactgaaaagttgatacatccctccca

SEQ ID NO: 158781 - DNA, 653 bp, Cannabis sativa
tttgatttgacggctgagattgatctaggggtatttatggttaaaaaagtaaaaacgtgtcctgacaccattccgtaaaagtacatcacgagataaaatcatatccctattaatataatgttgagcactttaatgtgcttaaacttaaagcaatgttctaatagacaaataaggacatcaaagcaattcatttacattaattatataagtgactattcaatagttacattaaaaatataattataaatataattatgatgattatattgtttttataagctgttataacaaaattgtatttttaaactcaaaataattataattaattatatacttaaagtaaattaattttttaattaaatatttaataagacatttttcgcaattaatgtataaatattttttattttcttatttatatagaaataaataaaattaataagttaatatgttacatgtaatttattaattatttttaagctaattaggatttttactccaaattttgacatgtaccaaatcatgtccctcaactcttaaggtcgttaaaaatgctccatgaactattgagattgttgaatttaaggatttttatctaattttagtaaaaaaaaacaatctagcatgatgaaagttcaggggcatgatttagt

SEQ ID NO: 158782 - DNA, 679 bp, Cannabis sativa
aaagctaaagtttcaacaatagagaatttgccacctccagtttctgtaaaaggagtaaggagtttcttgggacatgctggtttctaccaaatattattaaggacttctcaaagatctccaaaccattgtccagtttacttgttaatggcattccgtttgagtttggagaagattgtttgaaggcattccaggttctaaaagaaaaattgatttcagcaccaatagtcacttcaccgaattgggagttgcccttcgagttgatgtgcgagcaagtgattatgcaatccgatcggtcttgggtcaaagggttgacagggtatttcacacaatctactatgctagtagaatcctgaatgatgctcaactaaattatgccactacagagaaagagatgctggcaattgtgtctgcttgtgataagttctgaccctatctaactgggaataaggttattgtctatacagatcactcagcgattaaataccttatgatcaagaaggatgcaaagccaagattgattcggtgggtacttctacttcaagaatttgacttagagataaaggacaaaaaaggcaatgaaaacctagtggcagatcatctgtcaagactagagctagaagagagccaaaatacgaaagaggtacagataaatgagaaatttcctgatgaacaactcttt

SEQ ID NO: 158783 - DNA, 572 bp, Cannabis sativa
  modified_base (108)..(132): a, c, t, g, unknown or other
aattaatatctgatcttataattaaaataaataaaataatcaaaattaaccataaggctatttttgtggaaaaaaaaaatcaaattcaaaggctactaatatctaaannnnnnnnnnnnnnnnnnnnnnnnnaataaaaattaattttattctgatcattagatttttaattgaaaatttagattctacacaaaattccaccaaattttaaattttgtttcaatgaaaaataatttttgaatcaaaagatatcaccaaaacaagattccattatgcgcacacaaggctgcatttgggcgagaaaagggctactagcagcctcttggggggcaaacctcggtcaggaggggcttaggacagcccttgtctgagtgaattcggacatgggcgtgtctgaagccctgtcagaccctgtccgtgcgcgcacagcatgttgctcggtgtcaaatattttcatctgaattcaaaaaatcataactaattcataaaaaatccaaattgagttctgtaaaaacataaattcattaattttttgtctactttccagtaaaaatattttcagaacgaaaaaa

SEQ ID NO: 158784 - DNA, 1060 bp, Cannabis sativa
taaccaattggggtagaacgactcgcgtataaagccacaggcaaggaggcggtcgacttcttcttttagcgcttggtaccttgcggggtccatcttgcgacgcttttgtcggacacctcgcacttcggggtcaatgttcaagcgatgacacatgacctgcggggatattccgaccatatctgaatgtttccaagcaaaaacatcaaggttttgtttgagaaaagtcgttagttgttctcgctgttggaaagtcaatttagaaccaatttttaaaactttactattatctacggggtctataggtacctcgatagtatcttccgcggcttgggccgctgcggcatgatcgaggatcattggatctagatccggtccatctgtgtgtggcacctcttcgattctaaagacctcctggcgaggaggtggtgcctctaataaatagatgacattccgcgatcttgactgctgcattgtagcattctcgcgagtctgattggattcctcgcacagagcctactccagcgggagtaaggaatttcattgtgagatggtagatggatgttacaatcttcatctccttcaagattggttgaccaatcacggcattgtatgctgaatactggtcgattactgcaaagtcagccattgacttggctgttactggggcagttcccaaggtaaccgggagtttaatcatccctttcagtgtgatgacgtcgccggtaaaatcgtatatactctacgttacaggtcgcaggtccttctcatgcaaccccatttgtttaaaggcttggaaattcaagagattcactgaacttccgttgtccgcgagtatacggtggacattgtctccgccaatattggagacaatgactagtgcgtcggaatgcgggtgatggacccatctcgcatcactctccataaacgtgatgtcgtcgtattctctttaaaataatttctctgaccgttcactgagattgtttacattggtgagcggcttctctttagcttccttggcatatcgctcttgagatttgcgggagtctcctgcgatgtgggg

SEQ ID NO: 158785 - DNA, 570 bp, Cannabis sativa
  modified_base (39)..(41): a, c, t, g, unknown or other
gatgaggatggtaccgttgggaaatgaagtcgttattannntagtcttattctactctttaatcttgtaatgaaactgattttgtatttaagtttaaatagatggtcccagggacagagccaggataagaagtttgggggggccaaagtatatgataaagaaatttacaaaatgcacctaaaagtatattttttttaatatatttttacgaacttttttattgacatttttacaaatgttttatcaagggttttttttatagaaaaaaaatattatttttatgttattttctcatgacagtaacgtccaaatagcattgttctgaaacaatagaaaatcaacattctgtatagttataaaaaaaatggttattttcttgcaacgtcaaaataatattttttttaaagcagcaaaaaaaataataatcgaaacttttgtaaaaaaaaatctataaaaatacaaaaagaaagacgaaaatataaatttatcatttttgtatatttatgaaataattctcatataaattgtgcatatgatatatctttgtattcattatatcattaactatca

SEQ ID NO: 158786 - DNA, 553 bp, Cannabis sativa
  modified_base (515)..(520): a, c, t, g, unknown or other
ttatgcaatgcagccgtagaaacaatagaacatcttttctttggctgtgtgtttgctactgcttctctgtcacaggtgttgcgttggctcagctggaatacaaaggaaacatccctccaaagtctcatgaagaggatgaggaaggcaaagtgtagcaggttcaagaagaaagtgaaggctgctagtttagcagctctggtttacttactctggcagacccgaaatgagcatcaatggcgggaaaaaaactggtgtggaagaggtttacaagcaagttaagtggtttgttaaaagcagaattttgtctatatggccgaaaaaaattacacaacaagatagagaatggtttgagaggttataaagtttgtatagttgttttttaaagttttgtacagcagctggaatagaaaaaaatttcaaggccttttattttaaggcacttttaggttgtaaaaaattgtgttgtggtgcaatgaatttctgaattatcaaaaaaagtttaggaaaccttacannnnnngcagcggaacataatgactccttctgttcagat

SEQ ID NO: 158787 - DNA, 548 bp, Cannabis sativa
ccaagtctgcatttgcgtctgcgtccgaatctaggtcatgagtttgggtacgggtccgggttttggtctaagtcctggatctgtgtcggaggttggggttgaccccagatcctatgtaaatattataatacaagctaatacaaaccatttgttatgtattaaataatacaacttatattatattaaaaatattagttgtcataattaatacaattgttttattcaaacatagtgctattaattatttagtatagtgctattaattatttagtataatatgacctttatacggcaatatcaaacgagcccttaaattacacaatagcaatatgtaataggtccgctaattttgtaacacatgatttgactaaatttgctctttctgtaaatggttctatggtctggtggattggatcaccgttatatatttgacatttttcccgtattatttggcagttgtcgattcatttttattagaaaaaaacaaacgaataattaagacacatttggtaatacttttatttattaattttttaatcacaaaaata

SEQ ID NO: 158788 - DNA, 550 bp, Cannabis sativa
  modified_base (229)..(231): a, c, t, g, unknown or other
  modified_base (311)..(323): a, c, t, g, unknown or other
ggcgttacaaccatcaacttggtggttatgtttgttgattgaggatgtttgaaaggtgtttgaaccgacttcacggtcgcagtgatgtattgttgatacttatttgatattatcttgtgtcaccaccctctgatacgatttcggcggacgttcacgttgtgtgattgaggatgtttcaaagccatcttaaccgacttcattattagaaggataggggacactcgtctannntcatccggcatcacaaccatcaatcgggtggttaagttggttgattgaggatgtgtgaaagctgtccgaaccgacttcannnnnnnnnnnnngtattgctgacactcatttgaagttatccgctgtcaccaccctctgataggatctcggcaggcgttcacgttgggtgatgaggatgtttgaaagccatcttgttcgacttcattgtccgttggaagggggaaacacgtctaaaatcatgcggcgtcacaaccatcaactggcttgtgacgtgggttgattgaggatgtttgaaagatgtccgaaccgacttcactgt

SEQ ID NO: 158789 - DNA, 624 bp, Cannabis sativa
  modified_base (396)..(404): a, c, t, g, unknown or other
gtcttcatggggtaccaaagtctattgttttagatagagatcctaaatttacctcaaagatctgggtgagtttgtagaaggccatgggtacgagtttaaagttcagcatggcctttcaccctcaaacagacgggcaatttgagcgaactatttatttacttgaaaacctgttacgagcgtgtgtcatggattttggagggtcatggagcaagtatttgcctctgatagagttctcccacaataataactatcaaagtactataggaatggctccttatgagctgctctatggtagaaagtgtcgatccccaatccattgggacgaaacaggagaacggaaatatctgggccctaatttggtccaaaggacgaatgaggcaatagacaagattaaannnnnnnnncttgcttcacagagcaggcagaaaagttatacagatcccaagcgacgagatattacattccaacctggagatcatgtcttcctgcgtgtgtcaccaatgaaaggaatccgacgctttgggaagaaaggcaagttaagtcctagattcataggaccttttgaaatacttaaacaggttggacaggttgcttaccggttagccttacctccatcattgtcag

SEQ ID NO: 158790 - DNA, 522 bp, Cannabis sativa
aaaatttatttaaatataactttttcaatcacacaataaatcttatcacttcattagaaactaaaaaacacaataacattactatagctttaacgttaaaatttttgggggtaattttgtttcgtgtagtttgtgatttgatttttgcagcgtatagtttggcaaaacatactctttggttggacaacgaactatactgattcgaagagacataaattactacaatattaattatgtataattttaatcagcacgtcaacaaaaaaaaaatatacgtatctattctttaaaaacgttataaagtattagtattaaaataggtaagtcacatctgtaaattaggtgtaaataagggtgagaggtgtaaattttcttttaaagaaaatgtataatattaaaagattctcttttttatatgaaatgtttttttaacacgcatgcagatggtttgtctttgtgcaaaatcccaattgggtttcttattagactttcctttttaaagaataagtggagaccaattct

SEQ ID NO: 158791 - DNA, 794 bp, Cannabis sativa
  modified_base (60)..(68): a, c, t, g, unknown or other
catttgcgtgtgggcatgttgtcgaggacgccaacagatgaagtgggggagagaccttcnnnnnnnnntcaatagactaattattcattacaggcttcaagatgggtatcatggagatcgattgttgttcaggatgtaaagtcaagaagactcgggacacaggcagagccagttatctagggtgaaagtttgtaggacttaggtactaagataacaccatcgaaatgttagcctaaggtgaaagtcagcaggaccatggtactaaggcaacattgaaatgtcgaggggcgaagagtcagaatgaccgaggcattagttcagcatcttcatcaaagatacatgtagaatggaggaaccgtatgcgactatgcgtttagcttgcgagctatatcttgaggagtgttcctctaagaaagaagtttttcccaagttgaagtgggggagcccactaattcatgtgtttgaagaatgagggtacttgttcagttttggtgtgtgaatccagagggaaacactacaacaaatgggttgttcagtgcgaagacttgcatgattactgcaagctgcagatagacaatatgcaggagcgtagactaagatcaagactgagctagtatgtggcatgttatgggaatgttttgtgtttatggggacactggtgttgtatgggacactgtaagccaaatggttcagaaagcatatactgatgggagatagtggattgggatgacttcaagtcctaagagtaagactgggtgttatcaagtttgtcaaaaattagcgagtcatcagag

SEQ ID NO: 158792 - DNA, 723 bp, Cannabis sativa
ggtgactgagatactcagtctttacgaaatatctcctaggaaacttatgcccaacggttggaggttgctcctgagccttgagcattttactgaaaagtttggtattatagtagaccccattatttttagaaaacgttactatgctaaagaacatgaaaaagagaagggtagagtgctatttgtttgtcgcactaggaaaaaactatttgtaacttgtttgactaaggctgacaattcaaattggaagaaagcgtattgcttctttagaggtgaaggtttatttgagtcggggttgagaagagtttcccattctcttggaaaatattgagtgagtgttgaattatgttctattattgtgttggctatgtatgttttattaatgtctttttggtccttggtccagatactgacttcagggttcaacctaatacgagcgagtttgttgatcaaattattgaggatattgaatctataaaggaggaggaccgtaattttaggaaatttctcccaaaaattgcatggaaaaatcacaagacgtaatagaaaaggtatttctgaacttcaatcccttgaacacattcacatccttcttctaactcgagaactatagaaggttagaattaagtttactattttgactcacatgaccgaagagtaatgcatgtttgcagacaagatgtcccaaaagaggacgatcaaaattcccaaagctagtgatgccat

SEQ ID NO: 158793 - DNA, 677 bp, Cannabis sativa
  modified_base (49)..(55): a, c, t, g, unknown or other
ttattttattgatattgaataatctggattacattgaaatagagttttnnnnnnngcataaaacccaacagaagggtctgagcaggtcaatagtatgattaatatttcatcacagttagcagaggacatggtcagatcagacattgagtttgttgtacgcaaacttcataatatgacgctgcaatctgatacgttagaatgaattaaaactgttcaattaactgatccataattagtgaagatccgagaagaggttttaactggtcaagctaaagattttacggtatcaattaacagaatattgttttataagaccagggtttgtgttccaagtagtgcagaacttaaaagtgagattctcgaggaagctcatactactccatatccactacatcctggcactaccaagatgtatcaagatcttagaccctacttttggtggtgtgcgatgaagaaggatgtggtagaatttttatccagtgtttaacttgccaatagatcaaggctgaacatcagagaccgacagggttatagcagccactaacacttcctgagtggaagtgggaggatgtcactttggactttgtggttggcttacctaaaaccacggtaatgtacgatttgatttgggttgtggtagatcaatttacgaagtctgcacattttctaccggtaaa

SEQ ID NO: 158794 - DNA, 510 bp, Cannabis sativa
tttaataaattaaatattcaataaaataaaaaatgataaatacatatccttttctgattttataatttaattataaaaaaataacaaaatttaaaagttaacaaaattatctcattttccttttttttttgtttttttttttttaaaataccatgattatagtagtcttattttaaataaggtcatattacttaaaaaagaaatattttatgaaaggaatttaatatcttaccttagatttaaaaataagataaaataatcaaattttaaaaaaaataagaaaagaggtaagcaaaattgatttttacctactttcaaattcaaattacactaagatctaaaattaattttgaaaaatcaaattattttatttctgataattagatttgaaatatgaaaaataaaaatagcctcccagcgccgtgggaagggtgatcaccaccctcatttttcctaattttcaaaaattcataactaattcaaatgaaatcgaaatcgagttctgtaaaa

SEQ ID NO: 158795 - DNA, 689 bp, Cannabis sativa
  modified_base (52)..(60): a, c, t, g, unknown or other
acttcctacaactttctcatatatagtattaaattggttgccgaaaacctcnnnnnnnnntttggtgcttttattgagagctgaaggaagcatatgcaagtaggtaacaaccttgtaagctaaacgtcaatggtggaaactcgcaatacacatcagccccgtccttctcaagacgctcaaaaccctgaagacgaggaagtagcctcaagagtcaacgtggattccgaagagcgagaggaagccaccgatggcgaatacgaggaaaacgttgacgagtacgccgcctacgacgaaggcagttacacagaattactgctcttaagataaaaggctgctgatcatgaagctgagatcaccgcccaaaaagaacaaaacaaaagaatgcaagaggtgatggtcgccatgcaaaaggccatggagacaacagggatccatatacaccctaaggccatccctgcgagacttgaggaaacaccagaagagtcctcaccaagcactcagaagcataagtccagggaacctagtcccatacgatatccccctgaaggaaacccacggcaaaatcccacttctatcccggggaaaaagaaaaaagtccaggatctgcaaaaggtccgctcagatttcccgaaagggaaaggtccgcaaaggggcaaactccaaaaatagagtcttcgccctcaggatcg

SEQ ID NO: 158796 - DNA, 1393 bp, Cannabis sativa
actgtttgttaagaagaaagatgcatccttacacatgtgtattgactaccgggaattaaataaactgactattaagaacaagtatcctttacctaggatcaatgattttttgatcaacttaaaaggaagacggtcttcacaaagattgatctccgatcgggctatcatcatttgagaaaccaagaggagattccaaagactgctttctgcactaggtatgcgcactatgaatttctggttatttcttttggactatcaatgctcccccaacttttatggatatgatgaatagggtattcaaggatttcctcgatagttgtgttatagcttttatcgacaacatccttgtgtactcttaattagaagaggagcacaagaaacaccttcaaatggttctacaatgactacaagaacataaattgtatgccaaattcaagaagtgcgagttttggctatctcaagtgtcttttcttgggaacattgtcagtaaggatggaatcaaagcggatccaggaaagattaaatctttcagggattggccaagaccgaagatagttacagaagttaaaagttttctgggtctggttggttattatcatcaatttgttgagggattttccaagatctcaacacccttaaccgaactcacccaagagaatcagcagtttgtgtggacagataagtgagaaagaagctttcaagagctgaaacaaagattgattatagctctggtattagctctaacatcggataaggaaaagttcgtagtttactgcgatgcatctagacagggtctggggtgtgtactgatgcaggtcgatcgggtcatcgcttaagcctcccatcagttaaaggaatatgagtagtgatacccaactcatgatttataacttgtcgcggtagtgtttgctttgaagatttggcggcattatctctataaagagaaatgtgagatttatactgaccataagagtctcaagtacttctttactcagaaagatttgaacatgagacagaggcgttggttcgaattagttaaggattataattgtgaaatcctttaccatcctaggaaggccaatgtggtggttgatgccctgagcaggtaactaatatgattaagatttcacctgagctagtaatagacaaggtcagatctagcatcgagtttgttgtaggcaaacttcataatttgatgctgcaatctgatctattagaacgaattaaagttgctcagttaactgatccagaattaggtgaagatttgagaagaggttttagcttgttaagctaaagattttactatattagataacagaatgttgttgtataagaccagggtttgtgttcaaagtagcacgaaacttaaaagtgagattctcgaggaagctca

SEQ ID NO: 158797 - DNA, 528 bp, Cannabis sativa
gtgaatatgtatttctgaaggaaatacaagactgttttaccatcattagttggagttgcagcagtttcaacccattttgatacataatccacagccaatagaatgtacaaattggtgaatgatgatggaaaaggacccatgaaatctattccccagacattaaacaactccacctccaagatacctgtcaaatgcatttcgtttcttctagaaatgttccccgttctctgacaatgatcacatgccttcacaaagtcaatagcatctttgaaaagagtatgccaaaagaatccactttgaagaacctttgcagcagttcttgtgccactgaaatgccccccacattgtaaggcatgacagtggttcaagatagaatacatctcttcttcaggcacacatcttcttattatctgatcggcacaatgcttgtaaagaattggctcttcccaatagtaatgttttacctctgaaaagaacttttcaattgttgacgagacatctctggaggagttacattggcagccaaga

SEQ ID NO: 158798 - DNA, 545 bp, Cannabis sativa
aaaaaaaataccatataaattaattaaacctaaaaatgtcatatttaagtaaacaacttttaaaatcactaagaataatttcttctttttagaaaccatttagtattatttagagttcgcgtcttgtaattgtttaacaatactttataaaaattattatgttaaattatacaaaattcgatactaagttacactaatattaatattatatttttgagagtgttaaacaattttaacatttcgtcacatggctcagaatgagtaatattgttctattgttatctaagcagaatattcacttaactaacaagatgaaattgtattgtatactcacttcactttatttgatttaatttttactttcatttctatattcttttaagataaacccacatttatagatgatgtctctattatatcccttaaattaatgtaaatcatatactacacttagtagaaggtaaggatatattaggcaacccactcataaaagtgggtagattttaatgaaataaaatatgaagatatttttaattaatggatac

SEQ ID NO: 158799 - DNA, 502 bp, Cannabis sativa
  modified_base (436)..(436): a, c, t, g, unknown or other
ccaacacggtgctgagtctagaacctttttatgacagtactaatgaccataatattagcctatactcggtacgctagtcgtactctagtcgtaccgatgtgatactgccaagtagtacagtactatcgacgatgatatcagcctatactccatacgctagtcatactctagacgtaccgatgtgctattattgaaaagtacttaagccaacatacatttctaatgtaatctaacatgcttaactaacctgcacgctaaacatgtaaatacatatgcatatcattatactaatcttaccttgataccaaattcaggtgtgctggctaacctgtgtggaacagctgctcgacgaattacatgcccctaaatcacattattcgtaaaatttgtgagtgacacgctaaagcactttctagggacttaaacttgaaactanaagtttccctatcaataaataacatggcaataccctaaatatcgcaaaaacgagaaaaactagggt

SEQ ID NO: 158800 - DNA, 510 bp, Cannabis sativa
gttgtcagaaaagaggtggtaaagtggctagatgctagtgtggcatatcctatttcaaatagcaagtgggtcagcccagttcaagtggtacctaacaaaggagggatgactgtggtaaagaatgagaagaatgagttaatccctactaaaacagttactggttgaaggatttatattgactacagaaaactcaacaaagcaacccgaaaagaccactttcccttgcccttcattgatcagatgttagaccggttggcggggtaggaatattactgtttcttaaatggctactctgggtatcatcaaatagccatagcacatgtggatcaaaagaagactactttcacatgtccttatggtacttttgcttttaggagaatgccatttggactatgtaacgcttctgcgacattttaaaggtgtatgatggctatcttttcggacttaatagaatcatgcattgagatctttgtggatgatttctcagtctttggttcttcattcgatcat

SEQ ID NO: 158801 - DNA, 551 bp, Cannabis sativa
atttaaaatatttacaactaagttataaaatatttattacaaaagttgtcgcctagtgactatacaaaatacaacctgctgtcctaaagaccgtacaccccaggtctaactgccttgacatatacaatctttatccactcgcactcactgttgttcaaccttagctttgccctaacctacacatgtaaacaataattgtgagtcgacagactcagtaaaaaaaacataatcataatcataaatatatcccgaatttcaattaggcgcccatacacacccaaccataaccctatcctcgcgtcctacacaatattgagtctagaatgttcgtacgacaatactattgactataatatcagtctatactcggtactcttgtcataccgatatgatcatttatcgatatcaaatacaactaaatgtatatcaatactgctatttcaacgtaatctagctggcttcataaacatgcacgttaaacatgtaatcacatatatcattatactaattttacctcgttccgaattcaagtgtgtcgatcaacctgagtg

SEQ ID NO: 158802 - DNA, 537 bp, Cannabis sativa
gtgtcttgataagatcagatcaaagacactgtttatggcaggtatcaagacccaatacatgatcagactcgtttttgacaagttttcttttctggtctgatatgctgcgacataatctatttctgatgctgcaaatcagggtttcatttaggaaagtttcgtacagctgtagattcgactttgtggctgtctctagggttttaaatagcctagagagcagtcatttgaatcaactcttccagtttttattttttgcatttttctcatttgtgaagagagagttctttttgtgagaacctagttgttcatctaggttctactgtttttcatatatgttcttgctctgtcttagggtttgttagaacaacttgattgaataagagagaggtctttgggagaagacttattcaagccttatttgtggaggaagtaagtatgcacactttaaagacgaagggagttcgctttttgaaggtgttttagaagtcagattcataaagtgcattataaaatattgtggcaataatttagagggag

SEQ ID NO: 158803 - DNA, 1004 bp, Cannabis sativa
ttttcacttgattaatgcatacctgcccaatatgacattcaaaaaatagatgttccattgtctcatcttcactgctacaaaagagacaagtcttatcaattccaggatgatattttactatcctgtcctttgtcttgagtcggttaagcatggccatccacataacaaagttatgcttcgggaagtttagccgactccaaacaatgctcggccaatgctctttgttttctgtagcaatgagtttgaaataaccttgagttatcacatacttgttgcacatattcttcctttcctctgaatcataaagctcttttactctctctttcaactccacaatctttctccaataccaactatcattacttttggatttgtattcccaccaagattgatcttttatatgcacacaatgtactcatttcacccacatattatcttccttttttgcaattgcccaaacatatttaaacatagcagcaatattccattcagttacctgtttaagacccaaacctccagctgattttcctttgcaaacattcctccaagctactgcagcaactcccttgagttggtggctaccactccaaagaaagctcctgcaaatagcctcaatctcagagataactttttttggcaacaccattatttggctccaataagagtgaatagccatcaacactgagttgataagaaccacccttcctgcaaaagtcaagtgtctagtactccaggttcttattctggctaccattttctccaccagcagcaaaacttaaatggttcagcctgagctctccacatctctcatggaacttaaattcctgctttgagccaatcttcatcataattctggacaagtattccatacccaatacaaacagtaaaggttacacgggatctccttgtctcaatcccctttttgcctcaaagaatccatgcatagatccattgaacatcaaagagaatcttggagttctgacacaaatcatgattagcttgat

SEQ ID NO: 158804 - DNA, 522 bp, Cannabis sativa
  modified_base (299)..(307): a, c, t, g, unknown or other
actttattggcgatgggggtctcaatgaccaacggataatgatgagggaagcgcaccgtcttggcgtcttcttcggtaaacttgacgggctgatccatcaaccggggcctttgagctggtagttgagtaacctcccaaacctcattgtgctttatggcccccgcgtaccgctttagttctatgcggatggttcctccaatatggggtcctccggagatcatggctaccctcccgttgggtctgggcggcagacgggggatgtgctgtgcatcgccggcgggagcaactggagccaatannnnnnnnncaccccctggtgttccctgtggcataacccctgtcgcctggcccagattgaggtgaggcagccgattcttgatccactcatagaggtggcctaatcggatcaggttttcaatcccgtccttcagattcttgcatttgttggtgctatgcccaatgtcgttgtggtactcgcatcttttgtttggatccctccggaagctgtccttgtataaggga

SEQ ID NO: 158805 - DNA, 547 bp, Cannabis sativa
aaattaagaggaaatttgagtgtagaaggagagtaaggagcagaaagcactagtggaggactccaacagtgttccatctctccaactctatcttttatgtctttatttaaatttcttttgttttagaatgtcttttagtagctaagttcttttaaggattattatgtgaattacttgagtttatgtgattgttcaatttcttcttattctctttattcaactccacacaatctattttaattttataattattgattgatcaactttaatttttatttatgaattcaaatcaaaattctaaaatgtgagatttgaatatgctttgattaatataaatgtaaattgatttaggacgaaagtatctaggttgtttgtatgattttattagttgttatgcttaatgttatctttgtgactaaacttaccataaaaatataagaagttttcacatagattggtttataagtcttaaccagatgataaacttcttaactcaacttatcaattgaataggaagaagagtaattgggtaattatattatgaagt

SEQ ID NO: 158806 - DNA, 654 bp, Cannabis sativa
aggctggtgaatatgatgttcgcatatttgattggggataccatggaagtgtatgttgacgatatgctcgtaaaatctcaacatgcaaaagaccatgtcaaccatttacaagcgatgtttgaaatactaggacgatacaaaatgcggctaaatcctcttaagtgtgtctttggggtcggcacagggaaattcctcgggtttatggtgaatcagcgaggaattgaggcaaaccctgcgaagattaaagcattagtagaaatgcgatctctaactaagccaaaagaagtccaaagtctaacaggtaaagtcactgctctaaatcatttcatatcacgatcctctgacaaatgcaaagaattttttcaaatcttaaaaggcaataagaagttccaatggaccaaaaaatgcgaagaagcttttcaagcactaaaaatgcatttgcgacagcccccaatcttgtcaaaaccaatgcctggagaagttttatccatttatctagtagtgtccgaatatgcgattagctcagtactaatccgcgaagaccaagctcggtaatacccggtgtactatgtcagtaaacatttgttagatgctaagactcgttaccctcaaatggaaaaactggcgttagccctggtaatatcgtcaagaaaa

SEQ ID NO: 158807 - DNA, 583 bp, Cannabis sativa
  modified_base (43)..(43): a, c, t, g, unknown or other
gtgattaaattagtgtttaacataaataattttatattattcnagtatttttattttactattttaattatttattaaataaaaaatatgagaaattattttatcatatatttatgagatatacttgattatataggatatattattttttttataatttaattatttattattatatattttaattttaatttaatattatatatttttattttaatttaagtttttaatttaaaagaatataaataaaataatccagtctattcttaaaccaaacacaagattactttcaacataatctaatcttgtccagtctaatctaatctttttcagtctaatccagaccaatcctgcataccaaatgagtccttattatcttattacttgtttgtcgattgtatacacgtatacatttacattgctatattttatgcaacactttccttgccggtacctatactattgagaagccgtgagctaaaaagacttataaaaaaagggagtttttttttttattattatttttacattttaaaattttttttttttgtatttttacggaattttacatagaaacccttat

SEQ ID NO: 158808 - DNA, 530 bp, Cannabis sativa
  modified_base (31)..(55): a, c, t, g, unknown or other
ggcgacaacgaaaaatgcgatggatggctannnnnnnnnnnnnnnnnnnnnnnnnaccttatttcttagtgggaaatacttttgaggatataaagtatcgggattgagtggggttatggaatttgaccattttacccctagcttttggtatatcctagttttatgtgtaggggcattatagtcatttggttaaatggtgggataggtggctgccctagcttggtgacaccttgcaacctttttctcagccaaagattaagtaattaatttacttagttagaaagaaagaggaattagaagaaaataccaaaattcaaaggaaaagcttcctttcttctctctctcacttcgaaaccagcaagaacaaggggaagggctgctgattcttggtgtttttagcaaagaaaccttgggagatttaagttaaggtaagctctagtgaaacccttctctagtttttaggtttttgcttagtttgaacttgtgaaattgttatatgggggctgttagggtttgatgcttgcatagtt

SEQ ID NO: 158809 - DNA, 603 bp, Cannabis sativa
tgttctttccttcatgaaataccaatgaacataaaatcaatatacctcaatcaaatataactatacctcatatttaactaatatttcatattttttctctctttcgttcattatatgccatagcacattaaaacaatatactacaatattaaactaatatattttcttagtatattattacacataaaaacaatatatcattgtgcaaaataactatactgaacactaaactattattcaattcttttaattttatttttatttatttcattcatgatatataatataacgtacaaatactataccttaaaataatatgaatataccacaacaattctatagtcatataagtatataaaaaaaaacttaaataaacttccactgttataaaatgatataaaataaataagaagaaaagaaaaagaagaggaagagataaagagaaagtgaatgagaatttctcaattatttatttcaatggggtgaacccctatttatacaaatacaagagtcaattattaagaaactaacaaaaaaggaatattgattacaattaatggcaataaataaaagatttggacgtccacataattattaatattt

SEQ ID NO: 158810 - DNA, 553 bp, Cannabis sativa
ggccctctttgagcagcaagaaattgggatttttctttgtgtttcaagctgattttcaagattgtagtaagctcaaattcttggtaagatttttggtaacttgtcgtgacgttttcttgaatttttgaagaaaaatgatagtttgcatgtttagtttttgcgtttttgttactgctttaattatgtgtttttttcagtagttcaaatgtgtttaattgagtggattggactagatttgatgcatgctagatggattaaccaagtttggatctttttaactcaaaaactatgatttctatggtaaaatgatgaatcttgttgttgtgattgtcgttatggtataattgtgttttctggagttaaattatgttggaataggttgatttatgcatgaattagtggttgtttgaggggttagtcaagttttgagtatttgaactcaatcttgaacctttaatagggaaatgcatttctgtgtatgaagcttggctttattgcttgggttatgttatttggggtatttagaacaggtctggaaggttgcatgaagttt

SEQ ID NO: 158811 - DNA, 578 bp, Cannabis sativa
acactatctatataaagcatgcatgaactagttagcagtacacatttttaacataattatattttattctcaataataaaaaaatatattttttttgggtcacaccatcaacaatattagcaaggtatgtgttttttattcatatatgtatataatattattgtatcattattatattttttttattttatgtacaacttatttttcttttgatttttctatttttttttatgtcttctgatgaagattggatggctacaccaaataaaatatttgatcttaatgcagcaagaacaatatattgtctatcaaaaaagagacacgctaaacacttattggggacctaaaatcaaaactatgaataactatatcgataataggatggtaatgtttcaaacaacataaaaattagaaaaactagggttctaaaaaaggcccaaccggcagaccggtgcccaaccggaagatcgattcctagggaccaaccggtcgaccagttgttacaggctcccctgaaccggtcgaccggtttagtgcagggaaccccaaaaatattccccacaactcaaatcgagccc

SEQ ID NO: 158812 - DNA, 617 bp, Cannabis sativa
tttactcttgggggtggagcagtggtttggagaagtgctaaacaaaccgcaatttcagactctaccatggaagccgaatacatacctgtcgtggaggcttctaaggaacttgtctggcttagaaagttcttcacaagacttggtgttgttcctggaatagaaaaaccattggttttactttgtgataacattggagccatagctaacagtaaagagcctcgaagccacaagagaagcaaacacatagaaaggaaatatcacatcataagagaatatgtggcaagaagggatgtactggtggagaaagtggacattgaagacaacctagctgatccattcaccaaagtttggcaacaactgtatttcaaaagcacagactaaatttaggattgattgaaatgtactgattgttttatgtatttcaatgtaatctttaccattcaattatcaataaaagaaacaaaagtattttcatcacttatttagtatgtcatttggttcatgtgatcatttatatgtttattttatttataaattcaactaaatctttatcacattgattttcttgtttattgtgccgtcagcacagtggaaagtaatcaagattatgtgattaa

SEQ ID NO: 158813 - DNA, 552 bp, Cannabis sativa
  modified_base (64)..(65): a, c, t, g, unknown or other
attataacatttgaataacaatatatatattataggttcatatacacaattatgacattcttannaagtttactttcataaaacatattgtttataaaataaactacaaatagttaccgaattcttaaacgaaaaccactagaacttaaataaaaccaatatttacgtggttcgccacgtaactttcatctagtatgtatatatatgtgtatatgtatatatatgtaaaaatatatatttgtgtgtatatatatgtatatatatgtgtatatgtaaatgtatatattacatatatataatatatacacatattactatacttttaattttatttatttattatttattttttactaaataggtttttagtattcctttgttcggtgtttgcaaaaatcacttctcgttatattggaaggttagtatgcttatgttatattatttataatattaaaaaaaaaattacttgaaaaatatattcattcattcatagtgaagtaggttctgtgaaaaatatactgcggtcggatgggtggcaaaaattaatatgta

SEQ ID NO: 158814 - DNA, 697 bp, Cannabis sativa
  modified_base (292)..(297): a, c, t, g, unknown or other
tttctctcaagagctctctctctctctctctctctcttcataatgtttgagcctatagtgatacagtacatgcccacccatatcaagtcaagtacgcaatcataatgtagaagacttgaagatccaggctcagatcttgttaatactctacgacagaaaagaataagggttagagatctgagttgaaggaaacatattattgcgctgccaccaatgtaaagtatcctaaactttatatgtgtttaaatccattgttttagagaattcatgtttagggtgttaatcaacatannnnnnagtaaatctagatcctagtaaaatctttccaacataaaagtgatcaaaagaagtgttctgatttctcaaatcaagcttctatttgtagtacttaaatttcattaattaaatcatatttaattatttaaatatataaatatctataactgaattcggttactaatatttatgagggaatctctcaactacttgagagaatatctcaacagccttgaaatatctataaccacttttcaaattagatatttacctaaataattaattaacccaaaaatacaaaccccatagggacaggccataagtgtaggcgcctactcttgtctatttaggacaaggatggtgtcttttatcctgataacttttgtctcaacaaatattgtcttgaaaaattttgtcttaa

SEQ ID NO: 158815 - DNA, 527 bp, Cannabis sativa
  modified_base (255)..(255): a, c, t, g, unknown or other
ttgggttccgggtccagatttcagccctaggtcaagatcaagctccgggtgtgggttcgcgtcctgggtcttggtataagttgggtctgagtccgaagttccaatcccgatctgagtctagattaagttctgggtctaagtccttggttataatccttgtctgggttcgagtttgggtccgggtccgggtctagctttgggtctgattctaggtgcgggtgtttgagttttggtccgagtctgtgtccgagtttntgtccaggtctggaccccgatgtgagtgtaggtttgggtccaggtgcaagttcgggtctcgagtgcgggtccaagtttgggtctgggtcaggatctcggtccagatctaggtccagcatttcgatcccagcctggttcttggtatgagtccatgtttgtatacagatccctatctacgtccaagtctgtgtttgggattgggtttgagatttcggtccaggtctgggtctcagttgcggtctgggtacatgaccgtgtctgggcccgagttc

SEQ ID NO: 158816 - DNA, 540 bp, Cannabis sativa
atgttgtttatgcctgttagattacattgatagtagtaatagtatacatagagttgtattgattactgataaatgtatgttggctcaaatactcatcgatgttgtcacatcaagatggctagagtatgactaacatattgagtataggctgacattatggtcaatagtattgtcttatgaatgttcaagactcaatactgtgtgggacacgaggattaggattatgatcgggtgtatgggcaccaggttataagccgggatattgtatgttttatgttatgcttttcttactaagtctatcgactcacagtgctatttccatgtgtaggtaaggacaatgctaaagctgaggagccgtgagaacgagcaggtgaagattttacatgtcggggtggttaggcctggagcgtacgatcttaggggacatcaaggctttttctcacagttgctaggcgacaaaacttttgtatatgtgtatagcaaaattttataaatgtattttataaacatgatcccaggattttatatatgtaatacttt

SEQ ID NO: 158817 - DNA, 503 bp, Cannabis sativa
  modified_base (453)..(456): a, c, t, g, unknown or other
tgcagtatgaaacttataaaaaatacagtaaaaaagtaaaaaataccgcataacagtatttttgtaaaaaaaatagcgaaagttagtataccatataaatttccataaaaaatttataccgaaaatataagatctaatcttaaaagaaaaattagtaataaaattgtggttttaaataatgtatattcttttttccttaaaaagctcaattttaaatttttgcacaaaactctcacctaccctaaagacgatcctctactattcaattggatacttattgtaagttttattttattattattattattttggagaagtcgtattattgttcttaaatatttattaaaaaattaataataatatttacgtatgaagtgttataatttaatgaatgagaaattttatttacaccctaaaattttctaaaggcacctcattttaataatttttatnnnntataaaatttatatttttaattaactaatttttttttaacttttttt

SEQ ID NO: 158818 - DNA, 618 bp, Cannabis sativa
tcaatgggatggagtctcattgggcgattgagaactatgtctccttttgttctagatcttctccctattttatttgttgtaattttgtgtttgctagtagaacttgtaattttactgcccataatgtggcgaattgagcttttactcacaagttgtacggttctattccgattgactcggttccggtggaccttttatgtaatgaccgagaggtctagtttgattatttaatgatacgaatacgctaattttcaaaaaagaatgcatctttttctaacagtttatggtaatactaaatattctccacagttataaactgttgggtatacttagtattcccaacagttataaaccgttgggattaactatcttttttttaaaaaaaaatcacttagtattgccaacggttctccaccgtgggcattagctatcccaacagttttttttgcttcagtgctaaaccgttgggaaaaatctccacttacattttccaacggtttccatagttcaccttctttaaaaccgttgggaaaagcccattttgtagtagtgattggaaaattggcatttttgagaaaatatgattgaaaaataacaaaatggaaaaattgcaaagtg

SEQ ID NO: 158819 - DNA, 603 bp, Cannabis sativa
aaatcatgaaccagttaactgaactattcgagatggcatcaattcaagctcgctttgaagcgactaagaattttatcaatgcacgaatgaaacctcatttgtgcttgcctgatcaccttctccagatgactagttactttgaggaagctaagaatcatggagctattatagatcagacaactcaagtgagtttgatcttgaacagtttgactccagcctttctgcccttcacttcaaattatgtcatgaacaagttggggcttgacttccacgagtcaatcaacaacctttggacatttgaaaatttgattggaggaccacaaaaaggaagagctaaagctcctaattctgggactgctaatggataagactgaggcaaacattgactctacttcaaaacccaataacaagaagaagtggaagaatagcaagaagcctgttcaagttgtgaaaacagttagaaagaaaaaggctactaatcgcgatggaaatccaaaaggaaaatacttctattgcaatgaaaagggccactggaaaccccaatgccctaagtttctagcaaagaaacaaggtatttcgttgtatgctataaactcatgtgtt

SEQ ID NO: 158820 - DNA, 624 bp, Cannabis sativa
aacgggttgacagggtgtttcatataatctactatgctagtagaaccctgaatgatgctcaactaaattatgccacgacggagaaagagatgctggcaattgtgtttgtgtgtgataagttctccctatctaattggaaataaggtaatagtttacacagaccactcaacaattaagtaccttatgaccaagaaggatgaaaaaccaaggctgattcagtgggtgcttctactccaggaatttgacatagagataaaggataagaagggcactgaaaatttagttgcaggtcatctgtcaagactacaattagaagaaatctagaatgcaaaagaggtgcaaataagtgaagaatttcctgatgaacaactctttagtttgagggaaaacctgatggtaccttggtatgctaattatatcaacttcttggctgccaacataactcctcctgagctatctcgtcaacaattaaagaaattcttttctaaggtaaagcattactattgggaagagctaattctctacaaacactgtgctaatcaaattaattaggagatgtgtgcctgaagaggagatgtattctatcctaaatcattgtcatgctttaccatgtggaggacattt

SEQ ID NO: 158821 - DNA, 531 bp, Cannabis sativa
gatgtatgttgcagaatttttcttgccaccctctctgaagctgcctaaccatggtatttcaagttggcacctgggaagttcaactcatggaaggctttctcctcggagttccatgcacaattttcctcctcttgccaacttccgttgcacctaggagatatggtcaaagtaaagcaaataccagcagaacctctctgagcttacatgagcagattcatgacggaagtgaccaaggtttcacgagtaaccgaggatagaaagttgtccgtgatactgaggggcattgacgtccttggtgagctttggaaggacataaggaagaacggaccagttgactcgatgagtaattttcttaaccgtgtagaaagttttatcaaacttgaagaggctattaagctagcagaaggtgaacaaaaaccttgcaagtcaaaagctccttttacggggacattcgtccagctgccccattacccaagcaattcaagctcaaatggtaaacggtccagcaacaataataggcaagggaatggg

SEQ ID NO: 158822 - DNA, 720 bp, Cannabis sativa
agcatggtcgacaccttgaaaacaaggtttgccaatactctcacagctgcagataccatgaaccagttaactgaactgtttcggattgcgtcagatcatgctcggtttggggcgaccaagaattttatcaatgcacggatgaaacctcatcagaatgtgcatgatcacctgctccagatggcaagttatttctaggaagctgagaatcatagagctattatagatcaggaaactcaagtgagtttaatcttaaatagtttgactccagcttttctgcccttcacctcaaactatgtcatgaataagttgacttttgacttccacgagttgatcaacaatcttcagacatttaaaaatttgattggagatccacagaaaggaggaactaaagctcctagttctggcactgctaatggtacggctaaagttgaggcaaacattgcctctacttcgaaacccagcaaaaagaagaagtggaagaataacaagaagcttcttaaagctgttaacacgctaataagaaacaaaaggctactgattcaaaggcaacacaaaaaggaaagtacttctattgcaacgaaaagggccaccggaaaccctcgtgtgttaagtttttggcagagaaacaaggtatttctatctttgttataaactcatgtattttagagaattattatccccttgggctattaattctgaacctactaaccatgtttattt

SEQ ID NO: 158823 - DNA, 509 bp, Cannabis sativa
aacaaaacaatacacaaatccgaccaacatgaaaatgtagatagtctttctctttaccaagcaaatgtggatattttttcctcatcactgtcgatcgatcctcaatgcacaacacctatgtctgtctgtctacatctcagtcatgtaatgtaatcttttttttttttttacgaaatcttttttcaattttacgtttttaattttttattacaattttacatattttgtaaaaataacataaaaataacagaaaaataatatcaaaataacttataaagaacacaaaaaaaataagatcaccaaaaaaaaaaaaaacatcaattatccgtaaaaatgtttaaatttccaaataatcatactttttataatttttttttttgggtatttatgaaaattccaaataaaaaggaggaaattacactctataccctttttatattgtactcatttatttttaccttcttttttaaaatctatcatttttacctctttttttaaacattgtacca

SEQ ID NO: 158824 - DNA, 570 bp, Cannabis sativa
gagttgttctgttttgtgttttataaaaacacagtattttttggaaagattttcgtgtgacagtatttttgtaaaagttaactcaaattccagtatttttgtaagttttccaatcatgttaagtgttaagctgaactttttaagtatatgtgataaatttttaatggtttatataatattaattatttaaatattttccgggtactacaacttttctcccatgcacttattgtgctgatcctaattttactgtccaacactaaataactcaggatcgccaatgggatctaagtcttctccaacaacactttggacaaattgatatagatagaattctctctctttcgattggtcccaacccaagagatgatagactgatatggcaccattctgaatctggttcttatactgtgaaatcggggtaccatttggctaaaaatcttgataagttaaatgacacctctgcatcgacatctaaccgcaactggtggaattgtctttgggctctacagctaccgaaaaaagtcaaaatatttgcttggagagtgattaatgatgctttgcctactg

SEQ ID NO: 158825 - DNA, 731 bp, Cannabis sativa
tcactttatagacaatgcttgtgtcacgacctgagtcctagactgtgacagttatgtaatatctataacttgggtggtcaaatgtcacactttgacccctacagcaaaataatacttacaaatgatcccttaatatatattataaaattacataagacctataattaaaataacagagtaattccaataataaataaaaaataattgtaacaaaataagattacccagcagaatagacatagaacaataatatttcccacaattatgtaatcaccaaatagttaaaattaataagccaaaaaataccaagataagacttatagcatccatcatattccacattccttacttttcatgtttatataaatgaaacagaccacccattaataattagatacatacccaatctttaaagaagcgttaattaataattaaggtaggaataagctactctcgtcgttctccatcaacgactttctcacatccacaagtatccaactaagttcctgaaaggaatataaggggtgagcttataaagccaagcacgaagacaactattatcaaaggaccagtagtttaataaaagttcttgcttggttagctctttaaaaacaaaatatctcatcatcatgtataaataaagtagaaaaaccacaaataatcataagagacaagctacctgtgcatatctcaccgtccattagactcctagctctcaataccactcatag

SEQ ID NO: 158826 - DNA, 726 bp, Cannabis sativa
  modified_base (266)..(269): a, c, t, g, unknown or other
ttatttataaaataaaataaatatcattaaataatgttaaaattgaaatcatgaaatactttatgataatttggttcacaaattcattattacataaatatatatacagttttaatgatatatattttttttgcagtcgaatctttgattaaaatcattcagcacgtattagtttgaataatttagtttctttactcattagttttgcattttgtgtaattcttaataatctttaagtgctatgcaacaatataaaagatatatannnntactttaattaacaatcaaagccaaatgcaaatttaactcatgtggtcctttagactttgaagtctctgttttacgaaagaatagaactgtacaagataacataatgcagagtccaattttaattaaaattaataatgtagtgcaagtaatgaaagttttatatcagaatatggacaataagaacaatgactaatacaaaacttatcaggtaatttatctggttacaggtatacacctttaatatctctgtaagcttattagcaccatcctcagctggtaggccaagaataatatagtgatctatatcaacatccatatctattttaatgctgaaaattataaaatatgcaggaatttagaatatacaatgtccaatcaaaacataaacaaaaaaattaagacaaaagggtgcttattattatcatattagggttacttggtaaattgcaaaagaat

SEQ ID NO: 158827 - DNA, 603 bp, Cannabis sativa
atctggtccgatggtggtccgatgatcacttgatgctatttttttttttatgtataaaaacataaaaaaaaaaagaaaaaaaaaattggtacctgatatggtccgatgagttcgatggtagtccgatgggtggtccgatgggtgtccgatggggggtccgatggggggtccgattgtgtaaagggaaatttgaatatctatgcattaattgggagataattttttccctaattgaatacatatgaaaattgaaaatatgtgacaattttatctaaaacccaatactacccctctcataactcaaccccatctctctctctcttccccatctctctcttcgtctatctctctctctctctctttctctcaaccgactgaaccacacctcaccgccgcccaaaaccacaacccccaatccccctcaccgccgcccaaagcgccggcccctcaccatctctctctcttccccatctctctcttcgtctatctctctctctctctcaatcaaccgacccacaacccccaatccccctcaccaccgcccaaagccccgacccctcaccactgcccaaaacgccagcccctcaccaccgtccacaacac

SEQ ID NO: 158828 - DNA, 554 bp, Cannabis sativa
aattacgtatgagtctattttttttagttgcattatcgttttatgatagtttatatattatgtaggaatttcgtttgacggtgaaaaagaaagatcacttcttcttggtaagttttatgaaaatagttgcatattagttttataatagttgcaaaaaagttttgatacaaacagaactaatgaaaaagctcagggttcacaattggcaacaactgacttaaaataacgaaaaagatcaggagctcccaatcaatccaaattagatataaacaataaagataaggtatattcagttacatagttatttttttgatttcaaaatagaatcaagctataaccatgttaattggagttaagttctaaattttttcaagttgatttatagttgtattatcatttcattatggttttattcaatattgctggaatttcttttgacagagaaaaaagagaaaatactttaacaaaatagttagttagtttaatagccagttagccgcttggttcctagattgtttaacaaactgaactgaaatatgaaaaatagtaaagga

SEQ ID NO: 158829 - DNA, 686 bp, Cannabis sativa
  modified_base (395)..(403): a, c, t, g, unknown or other
agtgattctttcaagatccaaggagtgagtgaagaggtgttaaggttgaagctattcccattctcaaaaagggcaagtgagcgacgagactgtgagtgacatgatgccggggcttgccaagccagggtcggaatgggatttcgataacgatatttacacgtaatagtattagacactaataccttttcacatttctctaacactaacgataacacaatagatataagatatgataagataagatgatctttttataataaatattattgtcttgtttagataaaatagacaaaataaattcaccacccatcacctcatttattatgagtatatacctaattaaattgtaactaaaatccgtataacaacgcacatagaaattactggagcaaccnnnnnnnnnttaaaaaaaaaataataatatatgaagtaattttctattagtacaaattaattattaaaaaaaaaataactaaatggaagaatggcacgtgaaaaattaaaagtgtattcaaacacggctttcgagttccactaacactaatacacatatttgtattattatggagacttttacggtcagtaaagaaagcagagtttggattgataatttagtagtaggtagaactaggacaaggcactatatataaataaataaatctatattattataattaatattaata

SEQ ID NO: 158830 - DNA, 597 bp, Cannabis sativa
tatcaataacatgtttatcacactatataaacagtaatgccattctcatatgcctgtatgacacagatctgcatgttacgctcacatgcctatttatgttcacgtagcgtagacttacgtgttgcgctcacacgtctaaatacaataaggtcttagaatggttcatctcggttctaattaacgagtccaacctggctatgccttgaacacataaccctaaatcatacatattcatatactcatatatatatcatggcataaatttcatacaacatatatcactagggtaataaccctaggcaattaaaccgctcatgttctggtaataatcctaatcccagttacagactactcacataaatcatttccaatataagcgccaccgtgcataactctacgtgctaaatactgtcttacctgatgtcccgcaatagtagagattccaaatccccgggtgctcctcaccaggtgccgataatctagtcacaatatcgagattttacacaacaagggttaacccctgattctacactcataaaatctattcatggcattcaaaattcaaataatcacatagacctcggaacaagctttcca

SEQ ID NO: 158831 - DNA, 514 bp, Cannabis sativa
cacgaatcaagctttgcttcaagaggctttggatcaggtcgaagaactccgggatgagtctcagatatggatggcagcttaccaaagaaaggtggcaaaatacttcaacaccaaggttaaagatagaaaattcaccattggcaaactagtcctgcgaagggtcttccagccacccaagaaccaggagtgggggtacttgggccaaattgggaagggccatacaaaatcaaggatgaataggctccaacacctacaagctaaaaagaatggacggatccacagtacctagggcctagaatgtcgaccacctccacagatactatcaatagttaaagaaaaaagtttatattctgttaaataacctatgcaggacaaatatgtgtgatatcctatgcaagtttcaagctaagtgacttaaaaatttctttcatatcacttaggtggtattaggcataatatatgggaaaaaacatgacgaatataagaaaataaaaggaaaaacaaactcaaaagt

SEQ ID NO: 158832 - DNA, 544 bp, Cannabis sativa
ataaataaattgcgtcggttataatccctcactaattacccaactgacggtaaaagtcaaaaaactaaaaaaaattcgttgattattagcgtctttttaaaagcctcacgaatactttgtgtggcgttttaaaaccgacggtaaagattttgcgagtgttagaaaacgacgcaaattctcttattattcacttacccccaaatgacaaataggcggtctcccaaattttttccctctctatcattttcattttcgaacagtagcgcctctctttccctctctttctctgaaggtctcccaacagggatgcgatttccctctcctcctcagctctgaaggtctcccacctccgtaagtctctctcgtcctcagttagctctgaaggtctcaaacagggatgcgatttccctctcgtcctcagctctgaaggtctcatccggtctcatccacctctgtaagtctctctctttccctctctttctctcttgcgttctctcttgtgttataacagttggtatatatgctctattttcatcatgaatgg

SEQ ID NO: 158833 - DNA, 540 bp, Cannabis sativa
tctccggaattgagaaattataactctattactcatttctaaaagttggggtccacaaataaataaattcatagataattataaaattaacagaaatgagtactaattacctttactaatccaaaattaaaaaagcgatcattacagataaaacatggttgtatctctttttcttatatcatttttcataggagatggtttcttgtacgacaccatagactgggtggttgcatataatttttctatgtcatctgttaggactgagaaagtaataaatatagaggcattttctctagaatcctgcttggcattgccagtaaatttgcctttctttgtgttaccctgcctattattgttgttagaccttttcctatttgaatttgaactattgggatattatggattctcgacgaacactcctgctactgtagcgtgttattgatttttcttttgcccgacagtgtccacgtgtcgtactacttcttcgagcttaatgaatccatctgcttgatctacgaatacaaccattgatcccacagt

SEQ ID NO: 158834 - DNA, 780 bp, Cannabis sativa
  modified_base (712)..(732): a, c, t, g, unknown or other
agaaaagacttctatctccttggaggatgcttgatgtttgtaagttgggggtgccaaaagaaaaagaaaaaaaaggaaaaaaaaagattgaattaaaaaaaaaattgaaaaagaatgaaagaaaaaaaaaattatcaatgaaggcacccctaggaaaaaaaaagaaagaaaaggaaaaaaaaatatagaaaaaaaagaaattatatatatatattatatttagctataaataattgtcatggtgaaattgagattgtgttcttttctttgtgcagatgaagaaggctggggaagtgaagaaatttcaaattgggcaaaagaattaagtttggggtggcagaatgctatccagttgttatagcaagggctcaacaattttatttggtagcaagaggtgttttggtactgggctgatcaaatgaattggggtttgaaaaaaaataaagtgagtggtctgttgaaaaaaacatgtgattgaaatgttggttatgatgcaatcattggatatgtctatttttgtttagataaatcatttggtgttgtacttaattttgaattgagtgagcccaagttgattttggagatacaaggaccccatttcacattagtttaatcagttttggggccaattatttggttaactggccccagaaagtgttgacccacccacttattggtcaaccctacatcactgttggaaatattttaccannnnnnnnnnnnnnnnnnnnntatgtttcattaacatcctaatacgaattctaaaacaatgaaataaac

SEQ ID NO: 158835 - DNA, 500 bp, Cannabis sativa
aaaagccaaccttcttatttcattaggttactttcgctagcttgccaaattttctcagagctttcacagagagaaaaaatttcagacaccatagatcatttgattctcttcattcgccgttgccagtcctcactgtaccgacgatcaacaccaaccctcatctctcaaactttatgtaagttctcaggatactttatactcatctactgtttatttgtattgcatgtttagagtaaatgggttgaatgttgaatttctgggaaataatcttgcttgaatttgctgtgtaatgcgtagagtatctcttatttgcgccctcgctgtttctctttactgctttttcttttggaatcgtctcttctgtcgcaataacatttttagggcataaggtgattcttgtttccttgtcatttttctcctttttctttttttttttctttttctccactgtcgctgcctttgggatttttgcactcgatgcttgtcaaggaaagtctttg

SEQ ID NO: 158836 - DNA, 533 bp, Cannabis sativa
  modified_base (505)..(508): a, c, t, g, unknown or other
gggttgtgtcccctagtcaggtcctgggtttcgggtctagggtcgggtcctctgtctcgagtctagggtcgagttttgggtcttagtccgtgttctaaggcccgattttgggtccaagtctcctatctaggtctgaatccttggtccaggtctgggtctaggctcgggtttggggcccaagtcctccatctaggtttggatcttaggtcttggtgtaggtccaagttcaggttcgggtttggatcccgagtttgggtctgagtctaggtcccagtacggcttcaggtttgagtttgggtctgggtcacggtctgagtccaggtccctatttgggtctgggtcggggtccggatccgggtcccagtcaaggtcttggtctccgaacaggttctggtcgggttttggatccgggttcaggtcatgagtctgggtctaagttcgggtctatattcaagtttggctctgggtcctgcgttccaatctcggtatgggtatgggtctaggnnnntgtccaggttagggttttgggttta

SEQ ID NO: 158837 - DNA, 536 bp, Cannabis sativa
  modified_base (161)..(189): a, c, t, g, unknown or other
ttaaataggaatattatatttatgctgaaaattaattttggaccaacttaaattagattaattttttcatgatttattttattttattttacatatattttgaaaatgcatttaatttttaaatttattggatttcaaattttgctatatatatttatagnnnnnnnnnnnnnnnnnnnnnnnnnnnnntaattaattttggaccaacttaagaataattttcaaaatatttattgagaattattactaatatgaaaaataattttatttattttcagatctatctaagtataattttataaatattaaataaaatttatattttgagttatctaaattggtaattttaattaaagaaatatatatattaaaataaatattagatgaaaatatactttaaataatgagctttattgtaaggatattcgatctccattgttggttctccatagttcttgttttagtgagattcatccccaatagatggacattcattagtactttaacgttgtagaatcttgaaagataagtattat

SEQ ID NO: 158838 - DNA, 621 bp, Cannabis sativa
taatttctctattaaaaaatattaacataaaataaaataaataggataatatagagaaaaattagagtattattattatttaagtaaacactctttcccgcaattaatattatttatatctcaattatttaaagttgttgtcaattattatatctcacccgttgttatcactgtattatacttataatcgttgccattgttatctccaataggtttactcgatatataataatacaaataaataatataatgaagtgctaatagagatgaaaagattaaaagttaaaacaaaatattaaacactacaattaggagtgtgcataaattgatccaatccaatgccaaccgaccgatccaattacaaccgatcaccaaacattgaatatccaattgtgattagatcggatcggatgtcggatagggtgcctaaaaatctaatacatctaatatccaatcgaactaattaatattttcatttagtttgaaagagtaattagattttatatttatacgtaaatatatatatatatataaaaattaacattaaaattttactctttttttcttagactggatggatcaaatccaatccaataaatactggacctaaaatattagatg

SEQ ID NO: 158839 - DNA, 724 bp, Cannabis sativa
tgatttcgaaaagaatgttgtcaatattagtggacagaggtaatcatgcaagcatattggctattggtttgtggactggtttgatggagtgaaaccattataatattatttcaatagtgaagttagtttgtatctgtacattgtgtgataagatgagcatcccaattaattgttagagtttttggaattgaaaatctagtttagttaatggaaggaaatttcacatgagccaacagtaacatgattatctgatagcgtagttaatctagttttagcgttagtcttagtcttacttgagggcgagtaagaatctagtttggggaaattttgttaggctatttttagcctaagttccgggtcgattttatagttgttttctctgttaatgttatcttttggaatgattttatgcttgatttttcttattttagatcctcaaggcattagagctcaaattgtatcaattgttgaaaagacggggcattttggacaaaaatctattgaagctgacaaaaacgcttcaataatctaatcgtgaccactataccccatcccatggtcgtcgcgacccttttctatggtcgcgacttgggttgcgactaggaggcttggcagaagcatggtttttcagttttgtccatggtcgcgactaggatttatgtaatcgcgactatgggcaaaacacaggaattttggacaattttgaattttcgccattcagagg

SEQ ID NO: 158840 - DNA, 523 bp, Cannabis sativa
tagtgttgttagtcagtttatgtcttctccaacaattcatcaatgggcagcattagagcaaattttgtgttacttgaaaggagcaacgagatgaggtactgtttacaaggatcatcaacacacccaaatttagtgtttctcatatgcagatcgggcaggctctacggtagatagacaattcacttcaaggtattgtgtatttgttaggggcaatttgatcttttggaagagtaagaaacaaaatgttgtgtctagatctagtgctgaatcagaatatagagctatgacacagtctgtgtgtgagatagtatggatttattagcttttgacagagttcgggtttaagacttcacttccatcaaaattatggtgtgataatcaagttgttattcatgttgcctcaatttctgtgttccaagagcgaactaagcatattgaaattgattgtcattttgttcatgagaaaatttaacaaggcctaatctccacaaaatatgtaaagactggagaacaattaggagat

SEQ ID NO: 158841 - DNA, 502 bp, Cannabis sativa
gatactttataaagcatctttaactctcgttaacaacaagtttcttatgtcactaccgttgtttaattaaacaaccgataagtaagaaacttaacaacaatttcaaaagagattaataactctttcttaacaacggtaattatcgtatcttatttcgacatgctaagtagtgtgtggtattcttccttaaacccccaaccaacattcggttagttagttatcctttaactaatttaattgtcaaatatgacaacttgcatattgggtcctttggcctatataaagagaactactcatctcatttcataagggaatagaaataaggataagggcaataacaagagagacacaacatagtagagagagttcttagaataagaaattgagagagatatctgagagagagggagctgggattgggatattgtattgagcaatattgttgattatgttggctcgggttagtgagttaatgagtgttgagggattacaccatggatga

SEQ ID NO: 158842 - DNA, 681 bp, Cannabis sativa
aaatttcaagaaaaatattcaaatgcttaaccctagatcttctatttttgaggaagttcagaatgcaggtcaaagaggctttgttggtctttgatcaaatggtactggaagttcaggaaaaacaaaatttgtaaaatctagtgttccaacgaatttacctgctgctgtaaatgtaagatctgctgctacaaaaatatcatctgtagaagcaaagtctctagtaagttcaaaaaggataagatctcaagtaagaaggtttgttccaatctgtcatatttgtggtattaaggggcatattcgacctaaatatttcaccatgcaaaatttgtacaaaacaaattattttagtaatttgaaattttttcaaaagaaacatagtgctttgaaacaaaaatggattgaaaaagaaaaatgtctaactagtttttctgataaaagtgttgcttcttaaatgtggtattttgaccgtggttgttctagacatatgacaaatgacaaggattttttagtgaatatcagaccaatgcaatgtggtgaggtcacgtttggtaatggtttaacatgaaatctcattggtatgagaactctcaattttaaagggttaccaaggttgagaaatattatgcttattgagggactaaaagctaatttacttagcattaatcagatttgtgatcaagg

SEQ ID NO: 158843 - DNA, 529 bp, Cannabis sativa
gccatgatttcacataagaaagacaaagaaaagagaaggggcaagagaagaaaagatgttttgaagtttcaatttggttttaaagcaaacagaaatcttcattaatgatattaaacttatgcaatctttctcttgttctaagtctatcttgtatagctatccataagcaaaagctatgtctaggtatattaagtctattccatggctcatgactccaatacactttgggttgtgtggggcgaaaagccttgtagccattggatattctatacttagcggcagcaaacttttgtatatccatagtagatttgacttgatttttgacaacaatcaacttcctctaataccagcttgcttgaggtggggcttggtaatctctccaattctcatctttgatgtatacacaatgaacccatcggatccacaagttatcttccttattcgcaattgcccacacatactttgtcattgctgcaatgttccattctgcaattttcttcaaaccaatccctcctgctgcttttggttg

SEQ ID NO: 158844 - DNA, 583 bp, Cannabis sativa
tagctctccaacatggatgacgcctattgttaattatttacacgacagacaacttccaaatgacaaaaacgaggcgcaaaaactattgtattcagtgcctcgctacaaaatgatcaaagataaactatatagaagagggtattcaatgcccctactttggtgtgttcttcctgcagaagaaaataaaatcatcagagaaattcatgaaggcttgtgtggggatcatgcgggttagcaaagtctgtctaaaaagatcattaggcaaggatattgtcggtcgacgatcaataaggacacacacaagtttgtcaaaaaaatgtgataagtgtcagaggttttcacatgtacctcgcgtaccgctgacagaacttagaatgatgacatcggcctacccatttgctatatgggggatcttcttctttgtagacttgaatacaaactcaagacaatacaaaatacatataaacagagtaagagacgaacattctcttctctgcaaaacaaggatattctttccttaagatatgaatacaattcaaagtgtatgaaagagatacaagacctagctgctataaggtgtatt

SEQ ID NO: 158845 - DNA, 578 bp, Cannabis sativa
tataattcaaataggaagaccttagctcttcggtttttatataataatcgaagagataggtacgttttctcttcgtttattatatcaaaaccgaagagaaaaggtacctacgtctttggtttttatataacaaccgaagagataggtcacttttctctttggtttttctataataactgaagagaaaaggtacctatctcttcagtcattatataaaaaccgaagagaaaagtgacctatctcttctcttattaaataataaccgaagacataggccccccttatgtcttcagtattttagaacatatgtcatcgcctcaaataacttcggtagcgaattttaataaaaatcgaagataaactgacctaaaaaccgaagagaaaggcccttcttctagttgtgtatggtcgatagtatcgtactacttgacagtatcacatcggtatggctagagcatgattagcgtaccgagtaaaggctgatattatggtcattagtactatcgtacgaatgttctagcgactcagcactgtgttggacacgggattagggctatgattgggggtatatgggcgtc

SEQ ID NO: 158846 - DNA, 576 bp, Cannabis sativa
agtgttggacggaatatcaaacgataaacaagtaaatatgccgtccaggagtactcaacagattaaagaacagctatgtctaaagaaaagtcaagaactcaagaagtcagaaagtttccttgagttaggaaaaaagagttcataaagcttagaataagcaagatggaagacagacacaatgcggttcagagacaagctctatggctgtaaaccctcatgaagacatgataaagaagagtcgcaaaagtttctaaccctagggtttcctaagtgttttttttttctacagcatagttgcattcaaaagtgtaaacatgcaaagaaaagcataaagggaatcagagacttactcaaagattcgagtgtctgtgttcgagcaacgtcaagccaaccagcggtcgactaaaagcacttcggcaactttgaagccagaaaactctttgttccctcgagagtttacttaatagcgaaaggtgggaaaatgagtttatatgctaatgctatgggtatttataggcaagtcatgaaaagaggtaactgcatcaaaggaacctcagacgcctcagcttcccacct

SEQ ID NO: 158847 - DNA, 765 bp, Cannabis sativa
caaattttataggtcatattcccaatatgttcattagtaactctaattttaataaattatgtgaggttataattgatatttaattataaaaaaaagtatttaccaattaaaactattttgaaattatatttagttaacatataataaaaaaaaggataattttcaacttatctcaaaaaaactctcataggcccaatacttaggacctaacatcgtgagatcttactgaccccaccatatttatttttttagagattttacaaaaatattgtaaaatgaagaaaagtttaagaaaatactataatatggaattatttacatttttactgtaccaattttacaaaaaatattttgtttaaagtttcaaaattacaaaaaaaaaaattgtgttttagtaaaataataataaaaaaaaaactagaaaacaacaaaacaaccctagaacaacttaacaaacaactatagaacaacaaaaatataactacaaaataacaaaaaaataacaaaacagtgacctaattgcaataaacaaaataatatcaactcctcattatgtttttgtgttaagatttcttttacttagttttgacaacataatttatctttttgtactattatattattttttctcatgaaatttgttgttacaactttatttttaacttttttttattgggttgtttgccctaaataaaatccatttcaatatgatcagatttactaattagtaaaagatcataaatcattttatgttacatggttcac

SEQ ID NO: 158848 - DNA, 593 bp, Cannabis sativa
ttttcctccgacttggcccgccatctttctctaggcttaggtacattttgatcggggttgtgctttgttattgcggttagtcttgtttgcgtgataagattttgagtattttagtcttgtatgtgttacataattttatgtgtttggttttgagtgttttagtcttgtctatgtgacatgattttgagtattttagtcttgtctatttgacatggttttattttgtttcgctgttagtttttctctgtacttcaataaatcaccattatatctctattagtggttaggaataataagtttttgcgacagaaggagttgttagtatagtgcagttacgtatcttatataatagttaagcgctcaagctacgaagctgaacttgttaaagtaatttttactgttgtgtcttctgaagaatggatgaaataaaatataagtattcgaataattatttaattagtttatttttttttttaaattttaattttggtcacattctaacgatataaatgttttaatcaaattgtatctattattttaactaattattgttaataaaatttcatgatttattcaattattattattattat

SEQ ID NO: 158849 - DNA, 612 bp, Cannabis sativa
catgaaggccccatgaactaaactcaaagatctggcattgtctttgaaaaatataataagattatctgcgaaacaaagattggccatctctagagatttacacataggatggaacccaaagctctaagcacgagaggcttgggttaacaacctagtgagatgatccatcaccaaaacacaaagcaaagggaaaataggatcaccttggcaaaaacctctttgttctttgaaagagtcatagaatctcctattcaacattagcgagtaagaagtaccacttaagcaaaccaacacccaacatagggaaaacataacccttttagaagatcagccaaaaaaattccaattcacaatgtaacgccctaaaaattaggcacgttaccctagcaatttaagaaacactaatcccatagtccaggattactagaaagataagcgcgggaaaattaaactttaaactaaaacagaatgaaattaaaaattgtaatagcattaaactttacaatcaaaagtgacaagtatcgggatcccaaaaatctcttacaaaatattataagtcttttcactagccgacctaagcggcaaaacagagttacaaaaagtacatcgctg

SEQ ID NO: 158850 - DNA, 590 bp, Cannabis sativa
agcttgagagaggatgcaccaccaaagaatcttatgacgctccattatgttactattccaaagtttattccaaagagctggggcgacattacataggggtgctctctccaaagcctgagtcagatatgctgatttacaagagaaatgtccattactctccaacgtccatatccaactgtcctttccaattccagggggttccatctttcagaatagctaaaacagtctcatgatcgaaaagactttttagtttataaatatcccacccacccctaggagataagagatcagccacacaattattatccgtaactacacttctatttggttttgggacgaaacctttcaagtgagggatccaggggtccctccaaatgcaagtgtcccttccatcagccaccctcttgcaagccccttttcggaggattgcactggcttttacgacgttcttccaaaaccaggaatcagaatctttgtacatgcagttaagaaaatcctttcccctaaggtatttagcctccaggatcttacaacataacgactgactcccagtcaataaattccacccccacttagccaaaaaggcaagg

SEQ ID NO: 158851 - DNA, 682 bp, Cannabis sativa
attatgagcaggtatcagtcgaatcgaagaaaggaatattgggatacagttaagcatattctgaaatacttaaagaggataagggattgtgtgttagtctacaagggtggtgctctaaatcgcgtaggctataccgacttagatttccaagattatcttgatgacaggaagtctacatctgggatggtattcactcttaggggtggagtagttgtttggagaagtgtcaagcaatctgcaatatttgactttaccatggaggctgaatacatagctaacgttgaagtttctaaggaactggtttggctaagaaagttcttcatagaacttggtgttgttctaagaatggaaaacaaccactgttactttgtgacaacactggtgttatagccaacagtaaagagcctcgaagccacgagagaagtaaacacaatggaggaaataccacatcatcagccaatatcttgcaagaggagacgtgcaggtggaaaaggatgatagtaaagacaacctagtctacccattcaccaagactttgacagagactacacttgaaaaccacagagagaatctaggattaattaaaattaactgaatattttatgttagtgcaagtgggagttttttgggttttgtgctctaattaaaaatctattttaatgtaatcttgaaaattcattta

SEQ ID NO: 158852 - DNA, 830 bp, Cannabis sativa
  modified_base (805)..(805): a, c, t, g, unknown or other
tgaagaatctcttgctgaatcatacaaagtcatgtatgaaaagtggattcaagtttcttttgaaaatagagagttggttaaaatgaataaaaaattgtctcatcaaattgaaacttttgagtttaaaataaaagattatgagactgatttttgtgttaaagatgaaaaaattactcttttaaagaaggaacttaaaaattttaagaaaaatatctaaatgcttaatcccggatcttctatttttgaagaagctcagaatgcaggtcaaagaggctttgctgacatttgatcaaatggtatggaaagttctggaatcgcaaaatgtaaaatctagtgttccaacgaattttcctgttgctgcaaatttgaagtctgctacaatagattcaaaacctgtcgttacggaagttgtttctactgacacaaagtcttcaggatttgcaaaaagagtaaaatctgaggtaaaaagattcatttctacttgtcatttttgtggtagaaaaggaaatatcagacccaaatgtttcactatgcaaaatattttttttaaaaaaattattttggtaatttgaaaaaatctcaaaagaaacataatggtatgaaataaaaatggattaagaaaaagtgtctagctagtttttctaataaaagtgttgcatctcaaatgtggtattttgataatggttgctctagacatatgacaggtgacaaggattttttgatcaacatccgacctatgaagtgtggggaagtcacttttggcaatgggctagctggaaaagttgttggtatgggaactcttaantttgaagggttgcccagattgaaaa

SEQ ID NO: 158853 - DNA, 594 bp, Cannabis sativa
cggagcgaaatcaccatctagtttttttctttcactctctatttttcttttatgtctatttttgtttcagatttaatcatggatgtttattttacttttatgaattaaattctcattcgggaggatgatgaatgttgtttaaagttttgcctagttaatgttaattctcattcctccaatcttgatttgtgaaattatatatatttgtgtttaattccatgtgtaagcttgatcacattctacatgttctatgatctcaattcaaaatttgaaaagtgaaaattgagaatgctaaaattagataatcgaggttctatgtgaaacgagagtgtttgcataacctatgtgacacttagattattacttaatgctgattacatgtgattctaactaagagattaattagagaacatgtggtttagaacctaaaagatctgaaaagagttaggttgaattgtataatttgtcattcacatcaagaaaaggatagcaattataggcattaacaattgggtaagcaaaacaacatggttctcttccctatcttctcatcttgattaatctttacttgtttctttaagtttcttgaatttc

SEQ ID NO: 158854 - DNA, 660 bp, Cannabis sativa
cctcttccttgtctctctctcgctcccgttctctctctctctctgcgttttctcttgcgcggtggcactgcgtttttttctcagatttgaaggagatttgtgcaaaagatagaaattcatccacgtctactaagaaagatattcaccatagtccaaatgctcatgttcttaattaatatctgctaaagtgcttcatcttggtatcatgtattttcctgtaataatctttgattttggtataattttaatgaattatgatatatttttttggaataaattctgtaatgaattatgatatttaaatttagaaatatataaattccatttattttgatcaatattatttttttttataaaaattaatgctattatttaaaaatatatatattaaaaaaattaatttaatttaaataatacttttgccaaaagttattaacagtcatttaatgtgactttttccaatagttgtaaactgtcatttaaattgactttttccaacagttataaaccatcttttaaagttctgcatttttatgacacccacatagccaacggttttaggaaccgttgggaaacagtataaaccattggcaaaagccaattttgtagtagtgcccctatgtgcagataagtaagcatgtaagctttcggtgacaagtt

SEQ ID NO: 158855 - DNA, 669 bp, Cannabis sativa
ttgatatgtttgatgcataaccatcaagaacctttgtatcctttaaaagctcccacaaagtacttttctcacaagatgaaaatgtgtaacacacggttggaataaaaaatttgtccccattttgtattagatgtagtgcttctctaatacacatgtgtttgagatctagttgagctttcaccttatctttagattttccttaaacattcattatagtgttaagtacctttcacatacattttttttaatatgcataacatccaaattatttcttaataacaatgtacgccaataaggtaactcaaagaaaatacttttcttcttccaaccattttgatgtaaagattcttttcattttctttttccaaatggagcaaattgaagataacgtaaatgattgagcacatcattgccccacaaaaaactcaattttagctcgggtcatttcatctgctaactgcttggacatctgcttcactgtattcaactgagtcagtccttttcttctgaaggcatcagctacaatgttggccttcccagggtgataaagaatctcacagtcgtaatccttcacaaattctagccaatgtcttattggaatctattttacaaggatcttagatctactcacaagtatgttattttaacaccctaaacatgaacttctaa

SEQ ID NO: 158856 - DNA, 784 bp, Cannabis sativa
ctcagaaatgggacctaggacctgaactagaacaagaccgagacccgtgacagtgatctagaacttgactcgagattcaggaaagggggctggaacagaccagtagttggtgtctaggtctgggactcagacttggaccataacccaaacgaagaaacaaacccgaacccaggccaagacatgggacccaaaattcgaacctgaaaaagaatcttcgaactaggaccctagaactagacaaggaccttgaccaggacccgaacccagacctagaaccgagcacagacctagcctcagacccaaaccgagactggaactttggcccgtacacggtcgtgtgcccagaccaaaactgagacctggacctggacctaaatctgggagacgatcccaaacacagacttggacctcgatagggatctggatacgaacctggactcgagccaagaccatgattgggatcgaaatgttggacctagatctggaccgagatcctgacccagacccaaacttggaccggcactcgtgacccgaacatggacctggacccaaacctagacccagattagggtccagacctggacacaaacccggacacagactcggacctaaactcaaacatacagctagaatcaaacccaaagttagacctggacccagacccaaagtcgaacataaaacttgggactcagacacagcctagaccaagacctaggaggcgaacccacacctggagcctcatctgaccctagactgaaatctagacccaaacccaaactcagac

SEQ ID NO: 158857 - DNA, 609 bp, Cannabis sativa
tttatctcttctctccttaattctttatttttattaattttttattagatttataaatatttatttatttttttatattttctatcattttatgattaacaattattttaattaatatttttttaaagttttttttttaataaaaacgtggctttttttatatataaaaaaatttacatatatttatttatcattttacattaattaataatttttttaagtttttttttttttaatttacaatttttatcatttcaaatctatatcatcattcatcacatgtttatagccatatttttaattattttttgtaatctacttcaagtcagcatacatatatatatatatatatatatatcattaaccaaaaaattaagtcatatctttttttctcttcattatattaatcttttattactatatctcttctctcaatctctaactgtcacattttttttattattattttctaaactcttcatgattgttattattcattctctttttcttagatagcatcaaataatctttttatattcacaaataattacataatttgtaggtacatgtttaatttcataatcaaatattatatagcaatctctctct

SEQ ID NO: 158858 - DNA, 649 bp, Cannabis sativa
tgtttcttttataatatcatttttttgttattatttatctctgttttaaatttgttttgtaattatttttttattgtctttggtttaagtattaagtacgactggctgcgatactaacggagatttggaacatcggaggagtaatcaaaacttctaccagaaattaagaagtttgtgtttttagttttcagttggtattttattttttgtgttttgaaaatttttgtaattggtatatgaatttatatatatgtgtgtatggttgatagtgtaaattataagtgtatgattttgtttatatatatataatatgtttatatatgtgttgtatgtttatatataatatatacaatatttatacagtatattatatttggaaatatgtgtaagttttgattttaaatttgtatttacagtatattatatgtatatataatatattgtatatactgtatattgtatatacagtatatactatatatacaatatatatagtatattattattatatatattatgtagggacacgattttgtcccgttattgtactgtcacgaattgaaatccgtgatgtacggcaaccgtcggatgggcagttattttgatccaaaggttggggttcatctaggggtatttagggttaaataaa

SEQ ID NO: 158859 - DNA, 685 bp, Cannabis sativa
ttctatattattaataaaaaaaaatcaataaaatattaattactagtaaacaaaatcattaatgagaataaaattaattaatacaattaatataattatataaaatggtaataaatatattttttgaaatgtaatttatttgaatatagatattaaattaaaaaaataaataataatcaaagcttttaatagctatttaatttgaattaaaataaatctctatgtaaaagtctgagaaataaaggagttacttaaaatatattaaatttaattccatgcaatcaaaattaaatgaaaaattgacaaattaatacagacaatgaaattaaaattgtaaaggaacaaaatactaattattacactgcaatacaaaaatacttcaattatcaaaacaacaaaaacgtttaaaaagcaatatacatactatacttaaaacataattaaaaataaaacataaattttacttaaaaagttggataattaattacaattaaattatttaaaagataccaaatataccaccgaaaatagatataatatttaattaaatataacacttaaggaaaaaatatagaatgactgaacaattaaaaattagggtcaagatgcaaaatgctctaaatctaacaattaagttaataaatgtccctttttttaaaatattaacaaaatgtctttttagtta

SEQ ID NO: 158860 - DNA, 506 bp, Cannabis sativa
tttacttcaaagtacttctacttatgattagtttactgtgttgtaatgtaaatgggttgctcatgtcttgttgtgacaaattttatttggtggcctagtttcatacctgattgaggctgagtcatcttttaatcatggccttcctttttaaaggaaacacattttgtaaataagtcttgattatcactctctattacaagaatttagactaattataataaaggatttcatatattatgtcagtctaaaaattgatgtaggctgtattataaaagatggaataaatcaagttattggcagtgttttataataataaaattaattgggtacaagataatacaatattaccggtaaacactgcctaaatagtatgtaatttgcatacgtatatatacacagaggaataatcaatcattaataatgatcattgcgttgatatgagtatgagtttcggggatcattgcgttgatatgagtatgaggttcggggatcattgcgttgataag

SEQ ID NO: 158861 - DNA, 704 bp, Cannabis sativa
actggtcaggagtgatcctgaccgggtgccggcacctactccacctttgccagtgcttctagaggctaaaaagggcaaggagatgctagcccattacatgaaccgggtggtttctgaggtcagtgagcaactggctggtgctgacaatgactcttctttggatttgctaatgggcggagtcttcaaggagttcaccagggtaagtttttcttgatacttccccttaatcttccatacttagctcaatatgctaaagtttttcctttgtgcaggccaatctgaagttggcttacacttactcccgggctaactctgctgcttccaagaacgcgactctgtccgacaccctaagggcggaggcagacttggtcaggaaggatgctgaagaagccaaggcagaagccggagctgttcggttggaactgggtgaagctaacaaggagttttttgctgctcggaagagaatcactgtgctgactaaagatctcgaggctgctgaccgttttgaggagaccattgagaccttatctgctgaggtgaacaatcttcaagacgagaggacttctcttcgagcagttcttcattagatgaaggaggaaaagcaagccaaggaggaggagctttcggtcgaggtggacatgttgaaggagaaggtcaatgccttggagacagccggtctgaagctcttctttgatttttggaag

SEQ ID NO: 158862 - DNA, 595 bp, Cannabis sativa
aactactatacattatttaaattgcatataataatcatatcataatcaagtcataattatatcataaccatatcataatcatatcataatcatatcattgtttaaataatacgaatttattgtaccgtccattatccaaacaacataactagtttaaataatgagaatccattgtaccgaccattattcaaactacttatccatatctatagtttaaataatgcgaatccattgtactgtctattattcaaaccacatacacatatctattgtttaaataatacgaacccaatgtactgtccactattcaaacaacataatataataatgaacaaataaaataggttagaagtcttatacctcattcccactccttttgaatattatttcatacagaaaacttaaaaatttctacttaatttccttacctcgaatgtgtagtgtaacgccctaaataaataggcacgctacccaaaatacttatgaaactctaatcccctaaatgggattactaatcaaaatagcgcagaattaaacttttataataaacagataaaaaataaaacttgtaataatttaaactttacaacaattg

SEQ ID NO: 158863 - DNA, 655 bp, Cannabis sativa
taaaaccaaataaatgcctatcatcaaaatgaccatttttccctctcataacccttgaactttaaattaaatgctatgggtattatagtcatctcataattaatgcaccaaaccgagaatccaaaactctaaactagtctggtatacaaatccaattcaattcatcttttattgtcgtgacatatctaacctcccgtcaagttccatagttaccaggcctgaaaatattttactcaaattacggtatctatgatacccacatattcctctgccgaactagttcccaaatctttctttatacccatggtaattcaaagtcaccctgctgggcttttattaatttttcctaataaatcaaaccacaatgtgatattaacaagttccctaaccatgaactcaatcctcgttctggttagatcttcaacaacctttggtgagatcttttctctttacaaactcgtcctagacctctttgatttacaatacctactaccaatttacttctcagagtggtaaggaatcacaccgttataatcttcagtcaactctaactatcgttactgcctcctaattaaatctttccaaaagaagaagtgtttaagacttttgtgatccgtatagactttgcattcttcaccatacagatgatggtgcc

SEQ ID NO: 158864 - DNA, 808 bp, Cannabis sativa
gtccaggtcctggtccagctttggctcctggtccgagtccaaaattaagacatcgactatgggtcttgttgaagccccttttctgtgatcccgggacaacatctagatcccaatcacgggtcccagtcttgtttcagttcatgtcccaggtctgggtctgggtccacgtccaggactgagattggggtccaattctaggtctcgatcccagttttgggtcccgagtcatgtaaatgttcgagtctgagtttaggtctgggtttgggtcccgagtcccggttagggtttaaattcagcttttggacccaatcccagggtgggtttgtgtccgagtcttgatcctggtccggttacagttttgggtctgggtccatgtcctggtcttggtcttgttcctgggtcctgatatgcttctagttttggttccagtttcaagtaacgaggtacgggttcggggcaaggttcaggtttgggtttcgatctcgagtagggttcgaggctggctctggttccgggttcggtcctgggtctaggtctcattcccgttcaaagatctcggtccggttcaagttcaagtttcagtttttattcccaagtgtgggtcttggtcttggtatgtgttcgggtcctgatttgagtttgagtttgggttcgcgttctggtctaagtcctagatctagacatcgacaacgaatcgggtccaaccatcgagtctgggctcccaagtcccgaggtgggtcctatgtccaggtttgggtctagggtcaggtccccgatcccgatccaagttctaaggcccaagttctag

SEQ ID NO: 158865 - DNA, 501 bp, Cannabis sativa
ggtccttgtctcgcgtcttggccttgtctgggattgggccacggttaggttctcaggtcctatgtctcagtatcaggtccagggtcccggtcccagtcctagtccgagttctagtactaatccaagttcaggcctcggtcctagtctgggtctgggtcccattcctgatctaggtccgagtcggatttcaagtatgagtccgggtctggctctgggtgtgggtttgggtctgggtctagggttcagtccgtgtctaggtccgggtcttggtctgtatctgggtctaggtttaggtccgagttctggtatgagtttgggttctggtcaaggtttcgagtcatgggtcctgggtcacaggtactgggacaagtctgggtccgggttcggttctgggttcgagtttcgatcacgttctaggtttgggtccgtgttcggtttcgcgtctagatcctgttttggttccaggttcaattcctattccaaggtcctgatttcggttct

SEQ ID NO: 158866 - DNA, 611 bp, Cannabis sativa
accatcgactccaaaccttaccaaacctcctagacctgcatattatgcttcaatagacataatccaagaaataaaacaactacagaagctcaaaattaaattaaaacaccattaaagagccaagcttgagttctaaaactcaaagcttgctcaaccaacaaaacagccctcaaaataagcttaatttaacatatctaaacataattcaatctccgaaaacaataataaacaataacagcaaccacatcaccttaaaaccaaaatcatgcaaaaactcataacttcaaacttaagaaactaacgaggaagttgctagaggctttaccttgacttggatttacttagagctactggaaatcatagtaatttgattaacaaaaatagaaccctagctggttctaggaatttcgagagagagagagagagagagtttgaaagagagagtttcttacttttttcaatttttgtattttttgcaaaatgaaataaaattagataggttttaattaattaatttatcacattaaaacataaataaaaattagattatttaagttaattaaccaactaaaagacaaatcacataaaagtaaaattactattttgccctt

SEQ ID NO: 158867 - DNA, 947 bp, Cannabis sativa
aattttaaaatgataaaaaaaaaattgttaattttaaaaaattagaaaattgaaatgataattaaaaatgttataaaaaatagttggcatatttattaagttaaatattgataaattagaaagttcatgatttaattaaaaaaattcatttaaataagttgataactttaaaatgttaaaaattaatttgttgattttaaataattgaaaacttaaaaatattaaaaaaaattgttaatttaaacaaattagaaaattaaaatgataattaaagatgttataaaaaatagttagcatatcactaatagagaaatttattaagttaaatattgataaattaaaaagttcataatttaattgaaaaaattcatttaaatataagttggtaactttaaaatgttaaaaaataattttttgactttaaataattggaaactttaaaatgttaaaaaaattgttaatttaaacaaattagaaaattcaaatgataattaaagatgttataaaaaatagttaccatttcagtaatagaaaaatttattaaattaaatattaataaattaaaaagttcataatttaattaaaaaaattgaatgaaaaataatattcaaattttaataaattgaaaactttaaaattaaaaaataagtgttaattttaataaaatataaattaaattattaatttaaactaattgtaaaacattaaattaacaataatagtttatgagtggtacataaaatagcataagatattgtaagataccataagacattgtaatatagcataaaataaaattcttatcttcatttgatctatttggttataaaccaaagataggatagaataattttacttgtattatcacctagtgataatttctttcacacacacattttttcttagacccgtttgaagaggctgagccagtaaggactcttaaatac

SEQ ID NO: 158868 - DNA, 839 bp, Cannabis sativa
  modified_base (368)..(368): a, c, t, g, unknown or other
gaatgaaatttagcaaattaatacccaaaatatttgacttgccaaaacaatgattaccttaaaaaatacaactataaagcataattattattatgttatattaatatttttatattattatttattaatatttatatattttgagaaacaaaactaaaaacctcacaataattcttattattattattattattattattattattattattattattattataaactaggcaacagtgcgaagcacggtttttatactaatcaataaatatttttttaggttaatttatgatttttttttatttttatcatttacggtcacttcattaagttatgttgcaaatattttttttattgtattataaaanatgtattaacttttgtgttattttaaagtagtaacgaacaatggttagtttggcaggatttaacaattttaaatttcatatttttgtcataaatttattatataaaaatacaaaaagctatctctaaagtacaaaaaatgcttaatttatttccccaattttaactatttaaaaaattaagactaatttatgaaaaattaaaataataacaaaaatatttaaatagacaaataaatttgtaaaaataatgatattatattttttaaaattcaaataatgaaataaaaaaataacaaagattaaaacattgaaaaaaatttatacactgctcaagtatgaaatatgataacatataagcatataccatcatacatataaatatattcattcaattatttttcttttttatctgattacttataaataaaataaaaaattattttcaacttttgggcaaataaaatttagaga

SEQ ID NO: 158869 - DNA, 790 bp, Cannabis sativa
attgaatctttctcaattaaattatagagcacctaatataaaactaagtatacgtgccctgcacgtaactttcttctagtttatatatataatgcaatgtacataaactaaataagtttatatataaatatatagataattttaccttgtgctatcttataataataaaaaaatatgaatatatatttagatttatatttatttaattagtaatactcttttaaatacatataatcttgatgaataatttataagcaatttttctttcattcatgtttttttacaatagttttataaaacaattgaatttatatttatgcaataatatgtattttgaccaattaccattttaggctatatatattttataattattttttcttatgagaatctattttgatcaatatatttaatatgaatatatttatttttttacactacatactgaaatttttaatttttttaatttttttactatggggtggaatttttttaaaaaaatatggtgtactgtgttaagtttttactgttgttccatagttattttttagttgttccactattgttttaattgtttgctttgttgttttacggttattttataaaaatacagtattttttgtaaaaaatttcgtgtgactgtaaaattgtaaacttttacccaaaattcagcatttttgtaaaagccccttaaaaatttcatcaaacacctaaattgcatataaatggttgaaaacacataagaaaaactcattataattctattactttactgtaaagcccgcttagt

SEQ ID NO: 158870 - DNA, 542 bp, Cannabis sativa
cttctataaatattatttttcctcattaacaatggttgttaaccgatcttcctctcctgttgccaaaaagtccccaaaacaacctcagaaaaataaaatccgagcatcaattgacaagaagagtttgaaagataatcctcctagccatacttccacagaacctgctaaaagaaaactaggttctggtacttcaaagaataataaatcaaaaatactctcaatctgtgttggagaactccgactatgattttgagtttgagccaaagttccaaaatctcccaaatctgataaggtttttttttctattgatcttgtgttgttttagggtttttttcaagttgattatatttcctatttcttttttttttttgcttgttttttttattagtcctattttatagttttctgtttgtttgactctgtgtcttgttgttgttttggttttattttgtcaactcttacactatgtttggtaggagggagagatgggtggatggagaggagtggagggagagtgatggaaggatagactaaatcacttg

SEQ ID NO: 158871 - DNA, 677 bp, Cannabis sativa
ttttatcatttttctacattttttttatgcttttagtaatatgagagtcatttcacaaaagtcccacattatttaaaaactattgtggatgatataattttacattcattagatcaatattcttttttttttatttgtcacaaagttagcataatttattttctatgtaggtgattaatgaacttaattttacctaattagttatattttttttttcagtgagtgcaaattatatttttatattttttaatctttatcaagtttaaaataattataaaaaatcatttaaatatttttccctataaaaagaattttttttatataattctttattttaatgtatttaaataattaaaactatatgttcaatttataggttatatatatattttatttgttccaaaattaattttatttattttcacatatttttgcactatttaatttttgtcaaatatttaaatttttttaaaaaaaaaaaccttaagttttttaacaataaaaataatatataattttagaatttttattttatactattaatttttgttgaatatatcttcatttttttttttcatttttctacatttttatatgcttttaataatatgagagtcactttacaaaagtcccacatggtttagagattattgtgggtgatataattttacattaaa

SEQ ID NO: 158872 - DNA, 767 bp, Cannabis sativa
  modified_base (584)..(589): a, c, t, g, unknown or other
tgaaaaatcgactaagtcctaggcaaaagggaagaatctcagggaggtgccccccggaggagagcacaagaagtgtttctactctccgggaggccagaggtatgctaagactgtttcgggaggtgcagagatctcttgaacagtcaccccgcatttaatgtcgcgtgggggaagacgtattaaaatctccataaacgacatgacaaatggcgtaacctcccttttcggctattatgctataatcaataagactagtgatggctactttatgtgggatctcatcaatcgagaggggataaaagattatatccatctaaatcctaagatacctacggtataggtcatgtatttcctattttgtatctgctgggaatatgtgcccctatgaagctaacacaaaaagacaagtgatccattcctagggatcaccccagaaaaatactataaataccccacaaacagactgaaaaagtggtgaacatcctgggtttaaaggaatcaaagagagaaaataggagagaaatccaccaagaacattctctgcaataaatactctcattaaaaaaaagactcgtggactaagnnnnnntaatgccccaaccacgtaaaatcccatgcattaaactttctacagctcttcttatatattacttaactggttgttgaaaacctcggtcaacagtatggaaatcgcaattttttgacaaaaaatatttttagttttgtactgaaagtatttttttctagaaagtagatgaaaaattaat

SEQ ID NO: 158873 - DNA, 530 bp, Cannabis sativa
ctcggtccagatctaggtccagcatttcgatccaagtccttgtcttggtcagagtttaggttcgtatttggatccctatctaggtgcaagtctgtgtttgggagcgcgtcccagatttaggttcgggtctcagtttcggtctgggtacacccgtgtgttggcccgaatttcagtctcagcttgggtctgaggctaggtttgtgtgcggttctaggtctgggtccgggtgttggtatggtcctagtcttgttttagggtcctggttcggcgattctttttcacgttctaattttgggtcccaggtctaggtttgggtttgggtttggttcttcgtctgggttctggtcctcgtctgagtcccagatcttgacaccgactattggtctgttccaggccccgttacctgaagcccgagtcaagatatggatcactgtcacaggtctcgagctcgttctcgttcaggtcccaggtcccctttttgagtttttgttcgggatcgagactgcggtgcggttttaggtctcgaccct

SEQ ID NO: 158874 - DNA, 711 bp, Cannabis sativa
  modified_base (655)..(655): a, c, t, g, unknown or other
tcattcagcttgggatagagaatttaatgttcttttcatattgcaaagagctttgttgggctacgaaaaatcgaaaatggccaagatgggagcctgttgttttgattatgtttcttttttttttctggtcgtggtgttttagattctaatttcctttggattttcaaaaatgataacaatttggcggatgtcttagcctcttgagttagacactctaactttactggttctccttcttttagaggagttaacaccgatttgttctaataaagcttcttttagcaaaaaaaaagtctcccttacatttagtataagtcttactcttacatatagttgaagatcaaatgaaaaaaaaaatgtttgatattaaatactagagcacatcgtaagatgtcaaatactatatgaagtaactaagtgttattagtatattaatatcatgttggtatatttgacaccataaaggcatagatttacaattaaaatgtcatacttaagataatagccgataaaataatattatcatgaaaataaaatgtaaggatcgtcggacaccatctatttctccattggaatgatatggtccgctttgggccaagccctcacggatttgtttttgggagccttcccaaaatgcctcattccaatggagatngtgttcatccttatatacccaagatccttcccatttctagccaatgtgggactttg

SEQ ID NO: 158875 - DNA, 993 bp, Cannabis sativa
ctccccacggcatcctcctcatgggtgatctgtaccattgtcttgtggggcaataggtccttgtgcatccttcctagtttgttgtggtgtaggagatggtgcattattcctcctattctcaggacccgaggttgttactcgttgtccttgttgtgatggaggacgctcgctcctcccgccatggttgtcgttttcatgagaaggtcgttgtggtatggaattcagattagcatcacgaacttgggtcgttgttgacctagacctctcttgaccttcgagagggtaacgtgttgaacgactcccacggggtcgtccccttcttgctgtaccaggacgtccgcgggttcctcttctttgtggccttgtggcctcctgggctccatacctctcttgccactctctgttgagtgtgagagtttcatctaaacgctagcacaatacgtcgttttccatgaacacctcatggacattggtagttcgtcgtacaccatgggatggtgatgatgagcttcccacatcttggacttgaccttcgttgtaaggcataggttgtttgtttgcacatgaagaggtcccttcgcgagcgggctcagcatgttggtactcttcatggtgttccatggtgtttccttcattcatggtgtcatcatggtcctcctcctcatagttccttcgtctagtactcaccgtgacggtaaggggtgattaacacttgtgttcactgctctcaatgaaagcaccaaactgttgacgcagtttttcgtcaacggatctaagaagatcgtaaaacgagtaagatgaacacaagcaatagttaatcaaagtaaaccggtttgcaaaagtaaattcaccaaagacgaacacaagaattatatagtggttcacgcccttttagcggtaataggctagtccacttggagtgttattgatctcaatgcttgaggagagttctccagagttatgttctcgaagagttcactcctcaagtgagtt

SEQ ID NO: 158876 - DNA, 600 bp, Cannabis sativa
agttagtaatctactatgtgcgcgggcagtttattatctaccaggcttttgatttacgagaagttatcaattctaccttgcaataacagttataacctgtcttaagcaaacttgaatactcttttaatgatcttatcactttgtacatttttgattgcttacatgaatagttatattatctatccatacactaggtttaagtacttttgtcaagacaccttgatgtctcatttaatactttcctatattgtgcaagccgttaatatttagcttcacacgagagttatgagttatatctaatttataacttttgattttcctttctcatcagacaggttttaagtcaaagagttacgatggtttgatccctttttcgtcagaaaggtttgatcaaaaacttttaaaaaaaaattagaaaatttttaaagttgtgggtttgcactatatcatgtatttccagatgaattctggttaattatacacaaatgtcccttaactaaagaaatgatccactttattcataactgaagtttaaaatattacatcagcaatgcgagttacaatcattaattttactggtagtagggtcgcaaatgttcc

SEQ ID NO: 158877 - DNA, 531 bp, Cannabis sativa
  modified_base (326)..(337): a, c, t, g, unknown or other
ataattcattaaatggatatgatttctaaattaataatatgcgtaaatcaaaatgagtaaaaaattaatacaatatttcttatactattgaaataatgaaattttaaaaactagttataaaaatattaatttatttttaataacaaaaatattaatttatttttaaaaactagttataacaaaagtaatgtatataaatattaatttatttttaaaaatatttaatttaaaaagctttaggaaaatagaaaaataattatatagtaagattatataaaataaatttatcaagacattttagttaagtaataataataataataatnnnnnnnnnnnnaataataataataataatcaaatcagttactaattaagcgatagtttctcgccaagccaccatcacgcattcaaagcgaactactacttcagctactattcatttacgcaaccgccgatggcaactgacgacgaactcaaatcttctcagtgcttggccttcggtcctttgtcatcggtgatggagcttcggga

SEQ ID NO: 158878 - DNA, 622 bp, Cannabis sativa
agaacccatctgaagaaaaaaatctctttcctttttatattcctattaatactttcctctaacaatttatattatcacacagtttggaaagtcaccgtatgattagaattgagtatgatttagagtaattacaatatttaacatatttattcaataaggtattacacattaattatgtaattggaaataattaaaaagtttcaatcacaccggatgagaattaggtgtaattacaaaatattactaattttagataattaatgttattaaattatacaattactaactcatttgtcaaacataaaaaataagaatttatatacaattactaattacatttaaaaatacattatattttaaaatatagtgtaattactttagtgtataattactatcctaataattacataattacttcgaaacacaccataagagcgtgtttgaaaagccaaaagaaaatttgaattttgtgtaattatataatttttttttaccacataattatattgtaacttcgtaattggggatagtttaggggaaacttacaaaaaatactggaattttggttaacttttacaaaaatactgtcacacaaaaatcttttcaaaaatactgtgttttt

SEQ ID NO: 158879 - DNA, 504 bp, Cannabis sativa
gcaccctctaggcggtcacccgtccgccagagtggttcccacattctccttcatggacctctgctaagattagtttaccctcctgcttcgttatgcactttaagtacggcccgtggttagatcttctatataattggttccaaagtatagtgtatcttgacgccctcactacgatttttctcgcctgcttggggtccgatggtaacttatcatccttcaagtattcgaggattagttgtcttaagtcttagaatgtgtccgccagaatttcagcgtacttaacttcttcctccgctaaaatactaggttccgggataaagtcgaatggtattgtccttgtaatgtggagggggaagaggaccccaagacggccaaggcgtcggcacgcatatttgcttcacgggggatttggctaatttggaagtactcgaaagtcgtaatcaacttttttacttcttctaaatacctagccatttttagttctttagcctcgaaatctccttt

SEQ ID NO: 158880 - DNA, 839 bp, Cannabis sativa
tgtaactaaaagattatcactaaaggtaatttttttttttgtagtgtttatatatattaggtgaatattactgcaatgcttgtatactattaattatatttttagtatttactttaattatgtatatttttagttatataattaattattttaatttttcatgttatttaataaataatattattttttattaaaaatatttaagtgttatttatataaaaaaattatcaattatgatataagtttgaccgtaataataattttaattttataatacttttcatgtttttaaaaatatcatacatctttacttttttttttaagaaaataataataaaagttttttttgtaattacaatacgaagccacatcataatagtgattttttattatttaaaaagaaaacaataataaaaaatattttttattagatatgtaaattaagtaaaaaaaaataataaaatatatttattaaatatatatttgaatcgcaatattaaaaaaatacttttatgttatatatttagtataagataaaaataaaaaatatatatgtatatgtgtagtgagttcaattctttttttttcttaaaaaaaaaaaaaagaaaccatatctagagtagctatcaatttctatactccttccaccaattttttattgatcgatcgatcgacttagatgagatttataatcattattgggaagaatatacatacatatatatatatatatatatataatcatatatttgtgcatgtgcttaattaaggaactagctgctatatgctatatatacatatatgtaacgccccgatttcccgagacgtcacactagcta

SEQ ID NO: 158881 - DNA, 527 bp, Cannabis sativa
  modified_base (136)..(138): a, c, t, g, unknown or other
  modified_base (289)..(292): a, c, t, g, unknown or other
  modified_base (481)..(490): a, c, t, g, unknown or other
ttttagtatagtataaattggctatgtctatttttatatttacaattataataaacatactaataatataaaatactttgtatatatgtatattttttttgtatttattatacatactaatttaataaacaaaatnnnaatattcacatatgtttattatattactctatgtgtgtcatgtttatttttagtaattttaaatataaatttatatttttatacattaatatttataatttttatattgtattttattgaaaaaaacttattaaattataataattcatannnnaatagataataaacatttattctttaataaaataaatatttaattggtttatttttataaaactatttattatttatttaattaattttacggaattatttattttgaattttaataaacatatttcattattaataattttaaaaatattaatataataaacataaggataagatattataaaataannnnnnnnnnattaattacattaatctatttatggtaattagtttaa

SEQ ID NO: 158882 - DNA, 729 bp, Cannabis sativa
  modified_base (33)..(35): a, c, t, g, unknown or other
tacatggacaatcactgaattagtaaaattgannnaaattggacaaaagtccttaaatccaacaatttcaatagtttaggagaatttataacgaccagaaaagtttgggggcatgatttggtacatgttaaagttcagcgggtaaaaatcctaattagccttatttttatatagaggtatactttcttaatacaagagaaaatgtataactaattataatttaaaaattattcttatttataactgacccaaattaagacttatttttttataataaattagaaattatttctgaataaagtattcttagataaatgttctactatatgtatatacgttaattatagaataagttcactatttttttaggcaatatttttagaagggagagagaaaattctactaaaatagaaagataatactaaaattttacattaacaaatgaaagtagagctatatgagacaatattgatcatatatataaatgaaaagggaaatttcactttttgtccctaataaaacccccaatatcaaaatttagaccttccactaatttgtacaaattaattccattgattacatgaacttctcattttaccctttttttaaaaaaaataaaaaaaaaatgttaaaatctaaaaaacttccccctctctcttccctctcgtgcacctctctctctctagaaaaaactgtaaaagcttccctctctctcttccctgtcgaatg

SEQ ID NO: 158883 - DNA, 505 bp, Cannabis sativa
ttcttttgtagatccgaagctcgtgtgggattgaaactcaaaagatcaatggctagaggtattttaatctctttcgtcgtatttgtatatgatcgatttctttatttgtttgcattataaatcgatcatatatactttatatttttcatatattaatgtcttatataattgtgatcctacaggttttttatttgactttattttagttttttttaaaacaattcaagaattaggtagccgattaattggcttgtttttacgattctaattctagttgtatttccagtaggggagatatcctgattgggctgcttgctattaataaaataactgcatttcaaaaaaaaaaacagttaaatatttctttctaaactttattttggtaatcaaaattgatttccatcaaaatataactttaattgtaattcaaaatcaatatataaaatcgatggtttgttttgatggaaaagtgatagtttcagtatgtgcttaaataattattaaa

SEQ ID NO: 158884 - DNA, 882 bp, Cannabis sativa
  modified_base (42)..(52): a, c, t, g, unknown or other
  modified_base (80)..(84): a, c, t, g, unknown or other
gggcataaaacccaacagttgctcatgctcctcttctgattnnnnnnnnnnnaggatgtcgtcgataaatacaataacannnnnatcgaggaaatccttgaatacccctattcatcaggtctataaaagttgtgggagaattggttagtccaaaagacataaccaaaaattcataatgcccatacctagtatggaaagccgtctttggaatgtcctcttctcggattctcaactgattgatagcccgatcggagatcaatctttgaaaaaccatctttccctgaagttgatcgaagagatcgtagatcctaggtaaaggatacttattcttgattgttagtttattcaattcccggtagtcaatgcacattcgtaaagacccatctttcttcttaacaaacagtaccggagctctctagggtgacacactaggccgagaaaaccctatgtgaagcaacccatggagttgaattttctgttctttaagttctgctagagccattctgtaaggggtcttggaaaccagttccgctccaagtgccaagtcaatgacaaaatcaatttctccttacggtggtaaacctaaaagttcatcaggaaaaacataaaggaattctcgaaccaccttgatgtcttctggccgaacagagtcagatcgagtggtatccaataccacagccacaaaccttagacatccctctcgtaacaattccctggctgttagtactgaaattacttagatctgagatccctgaaccgatctgacaaaagcaaacatttcttcgcctttgggttggaagattaccatcttcctcttacaatcaatactggctaagtacttggacaagaaatccattcccagtataatatcaaaatccacta

SEQ ID NO: 158885 - DNA, 691 bp, Cannabis sativa
  modified_base (475)..(480): a, c, t, g, unknown or other
aatgacactaaggtgttacgctcgaccctaagcattgtgagtgaccaaccacattgattacctcgggatgctccttcttcggcttcccgaggggcgacgttctgaagataatgcgctcaagccacacggtcctgagcttcctcatcagctgggacaggaacctactgtcaagaagaatacttaggatatttataatcacaagtaaactccttgtcagtaaggagacccacaaacctcagattgacctcgttcaagaggaactcagatgaccgaagaccaaagggaagacccatcaggagcctgcgacactcaaccatctcaagagtcaaaactggtcttttcgaaacagctgtcgaatacaaaagaaaaattaaagtcagcaaaccaagagaaaaaagacatggaataatttaaacaagtcttaagtagaaattacttacgtattatgtgaaaggtggttgtgccaattggagannnnnnggtcgtccagaagaattcatctttaaagggagttttatttggaaaatccataatgatcttacgatcgcttgtgtgagtcccaaggtagtaaaaaccccatgatgcattcttcctcccaggaacagccttgacagagtaaagatactctatttcgtggggagtggggcactcctaattcaaaattttgtacaaaaccttcaaacttgtgagg

SEQ ID NO: 158886 - DNA, 571 bp, Cannabis sativa
acgggtgagttgcgtttgcagctgaaagattctagggccatttccctcattgaatctttcttgaagatcatgccacatatcggtggcaagatcaaagtacatgatgctctgtgcaatctcaggggacacagagtttatcaaccaagacattaccatgttattacatctattccaagaattgagtaagggattaccagaggccggccgagcaagggttccatcgatgaaagaagatttgttcttggcattcaacgccattgttatgcctctccttccaagattggtaaatttgcaccattgagcacagtggagacgagaacaagccctgggtgatcggctgtgctgagaaagaaagggcttgagacatcttcatgagccaatcgatcgagagagggtttgcgattagagggagcaggttgaggagcgggttgaacaggggagaacacatctggttcgacaggatcttcttcctgagaaggacgagctctagaagttggaggtcgacgaggtgccatggaagggttgacgactggtgcagaagtggaatcgggatttgattctgatgtggtct

SEQ ID NO: 158887 - DNA, 554 bp, Cannabis sativa
acaccatattaatcctagagcctaagagctgtttggatgtggcaaaacaggatggtaggagtggataggattgtttcatcaggtagaaaatacacacctaaagccgaaaatttaactgtaatatattattgaaaaaatgacagaatataaagaaaatcaaacaacaaactagaaaatcaaaccagaaaatgcttctttggcctgcgtcttttctctgcctcgctatggttcttcaaagactcaatggaagagcgtactcgtcgtcgtcagaggaagagtaactgaaggggtcgtcgtcgtcagttgaggaagagttgggggtagctgtagcgatcagagagagggtttgagggtcgtgggtttttagggtttgagctagcgggttgagagttttgagggtcgtgcgtaagtcatgggttaagggtttcgacaaaagggctgagggtgtgtaataaactgccaggtcgactgatttccgcggtgtgatgatacacacctttgtcttcggtaggtaccaaattaccgaaaacaaagggctccacgtggagcccttt

SEQ ID NO: 158888 - DNA, 595 bp, Cannabis sativa
ttatgtgaggttagggtttggaagctcaagctttgagctttaatggtgaaatgagatttggtgtaaattgttgagttctattggatggtttgggtttatttgagtgtttacaggtattctggaaattattggagagtttgggattaaattgaattgtacatggggatcggttttagggttcctagcacagaaccggtcgaccgattctggggaacgattagaactggtcgaccggttggtaccttggaactgggattccggttgggaaccgagattctggttggtaaccggtctgccggttggcgctttttcccgagccccagttttttccgtttttacgtaatttagggttttagcatcgtaattattgatagggtaattcttagttttgattttaaatccccgacagatgttttagcgtgtctctcatcgaattttgaatattatggtttagagtcctgtaaagcgttgagctgcgtttccacttaggctgaccggcacacttaagcgcggatcgaggtaagaatagcatagaacatattatataagcatgttgtgtttatgattgtatacgttttgggtgatatcatagcgg

SEQ ID NO: 158889 - DNA, 527 bp, Cannabis sativa
ttcttaccgctcctcagggtaattgccttgcagttttccttaagattaacttcagttgtactaggcaaatttccttgaggacgggttgcaacctgagtttctagttgccccatttgagtctgcaaatctataatggaagatctagtttcagtcgtaaattgtaacaataaatttgtctgcaaaccagaatttccagtagagctttgttgctgagtatactgttggttctgtgtctgaatttgatttctctgctgatagaacccactgttccttcggttacatccttgattgaacccatagttgttgttattctgagaataatttccaatggcttttgcttcatctattggcaaatcatccacatctgcctgacactcagaaaagtgatggggacctccacatatctcacaaaccacttgagcttatttggcttgccctgcaatcagctttgttagggccttaacctgacctgtcagctttgtaatggcatcaacctctagcacaccagctaccttcttagtttgact

SEQ ID NO: 158890 - DNA, 734 bp, Cannabis sativa
tgtgaatcccaagatagtagaaacccctgctgcattcttcctcgctggaacagccttgacagagtagagatactcaattttccatgggagtggggcactcccaattcaagattttgtacagaaccctcaaacttacaaggattctatgtgaaatgagattcaattagaatagggcaagcccgaggttgttaaggaagtccttgaaataatctcgcaagggatttattgttgtagccctgatgtgttcaaggctccagcgccaatcccagtgaacacttgtactggtctcgccactagtcccctcagaggttttgcatgtaagtcacactggtgggtaacaaccaaactcgcctactactactgatctaacctggtagtctcacttatacaccataccaccactccccaatgtatcacctacataacatgcgatggcttgcaccatcgaatctattaactctacctcaaaagtgacattaaggtcctggggagtccttaatttacatggcttgaaagacatgatttcaaaatccaagtcacatggttcaaaagcaattatgaccatgggtaaaaacataggctactggaatagaagacaaattggggggttcaggccaagcagcatctcgcaagaaatggcgcctacattcagtaatttcttacaagaagtgtctgtggcgactagcaatgtcttcttcgtgaattttcactaagtgttctctaattctttcggt

SEQ ID NO: 158891 - DNA, 782 bp, Cannabis sativa
agctcgtcaaatgtatttttaggagaacccaaacaaaaaaaaccacaaaataaccatagagaagaaaaaagaaatgtattttatagcatccatcttccacacccacagatagaaccaccacagcaccatgagaacacctagaaaataatcattaattccagcaagaacaatgaaatcaacgttaaaaaaaataattatgcaaaacaaccgtaaaacaacactaaaacaaatcaaaaaacaaaacaaaagaataaatacagtatactacaatataaaacttataaaaatacgcagtaaaaaagtaaaaaaatattgcctagtagaggtgttcaacaaaatttacaaaccaccaaacccgaataaactgcccaaaccaaaccgaataaactgacaaaaaatacaacccgaaataatataataaaaattcaaaccacctaataaatatattgggtggtttacaaattattctaaaccgcctaattaacctgaataaaatgaattaaacatattaatatattttttaataaaagtgtatataatatattacatgaattatatttattagtcaaactattttgtatttaaagtttagatattttagtgtttaacttaaaatgtagactttatagttaataatttttcttgtatttggatatttaagttgaagtttaaaataaatacaatattattacttttttattattttatttaattatttcatgtttactgaattatatttatcttatattaaagttttgttaaaattaatttagactataaca

SEQ ID NO: 158892 - DNA, 600 bp, Cannabis sativa
aacgtagcaaacttagcagctagacaactaccaatcacaacattaatggagtcgtttagagctttgatacaaaaatagacatacacaaacaggaaacaagcacaaaaaagcacaacaattttgacacctacatcagagaaaaagctactcaacaactttgtggactcattgacagaacatgtatactcaattaaaactacaagttgccttatagtttctttttcagttttctttatagttagaacattgattatcttgacctaatatgcaggtaaagccaataaacgagagcatgttcaaagtggtagaactaacaagatcatgggtgatcaatctaaaggagaagacatgcagttgcaacagattctaacttgatgaattatcgtgtgctcatgtgcttgctgtgataaaagagatgaacttaaatatttacaattattgttcacattattacatgacaagaacatgacttaaaacatacaacgtgtcaatatatcctatacacaatcacacaacatgggatgtaccacaaaacataaaagttatccttgttctgccaccaaactagaaaataaaatctggaagaccaaggaaaagaag

SEQ ID NO: 158893 - DNA, 573 bp, Cannabis sativa
ttcttcttgttacacagattatggctcctgccttctttccccttcacaatctgttgggactcaggcttggtctgcgccaccgaaagattgggttaaaatcaactgcgatgtcaaagtcggaggtgaaactatgtgtgctgtggcgattgggagagaccataacgaatcagttttgtgggtggcggcaaaaaggctacacttctctgacccactcactggagaagttgcggcctgtcttttagctatggagacggcggtctcattgcatcatcctttttttttggtggagagtgattcagagattgttatcaagaacctaaaaggggatgactctatttggggagttgagaactatgtgcgtcaatgcaagctcctctctacgtttatgaataattgtaatttttcttgtataactagaaactgtagctacgcggcccataatgtggccaaatgggcgtttgccaacaatgttacgggcatggtagagatatctactataccttttaatatcttttctaatgaccatgaggtctaactttaattttatttataaatgtatttttcaaaaaaaaa

SEQ ID NO: 158894 - DNA, 738 bp, Cannabis sativa
tctgactcaactcgctaggatagcaatccaagtttaagtagctggagctgaaataagaagaaaataaatatggttagtagaccccgaattaataacctaagggaataataattttctaaaacacatgaatttataacaaagttagaaatacctcgtttctttgccaaaaacttaggacatcgggatttctagtggtccttttcgttgcaatagaagcactttctctttttctttgcctttggattagtagcctttttcttattagccgtgttaacagctttaagaggcttcttgctattcttccatttcttcttctttttgagtttcaaagttgaggcaatgtttgcctcaggcttggtcgtaccatttgtagcaataccataactaggagctttgtttactcatttctacggtcctccaatcaaattttcaaatgtttgaatattaataactaaattattaataattgaatattaatctatatcttttttttattttcttttctatttttgaaataaattttcattaataatagtatcattatataatatatatatatacattattttttatctgtgaataatagcgatttaaatttaacgaaaaataaaatatatatatatatataaagttaagaaataggacgctgacatgacattttgtaattactccaattacattatttatttttttaattctctcattttttaattttttattagatttataaatattaat

SEQ ID NO: 158895 - DNA, 558 bp, Cannabis sativa
ttagaataattaataattttgctttctaaactttcaataatattgattctgcctcttaaaatatatgacttgttcaaaattactcttgaacttttatcgtgtctttgtaaattagcaaatttgtcccctaaactttgacaactatcaaaacacaccccccaaaataaaattgagaaagattcaatattcttttagtaaattttaaaaaattaatttagatcttaaaaaaaaataattttgaatgattaagaaaattaaaattttaaaattaattaagagatttaaaaaattatttattttttattaaaaaatctatttagatataaaaaaatatattaaaaattttaattttgcaaaaactatattttacaggaacaagtttgagtctattttttttctccaaaaatctaaatttgtttaagtaaaaattaaaaaaaaaaaattaatttataatattttttccaaaatatatttatgtttattgaaattttaattattatttttttttattttttaagatatgagtttataaatataaataagcttgatttttttttt

SEQ ID NO: 158896 - DNA, 607 bp, Cannabis sativa
agagaatgatcttgtcaaaaccactatgaacaagatgtaaacattatagatatatattatggttgtggtcttaggatagtccaattagattctggtcacagaatacaaaactcatattccatacataacatacagtttagatccattgatagaaaatggatattaacaacttgtgaaagttgtattgtaatgttcaatgtattccgggaaactgaaatttaaaatttctatttggaatcttaaatttaaagtcacatacttaaatttataccaattttatttcttgagtaatttcattcttagaccaccactactaatctaactctaagtctaggttgtcttaagtaagaatatacaagtatgagagttctaagatcgatgatttatattatttcgggatataatttctggaatatagtcatttgtgtcattcaatttcgtaaaaaaaaaatagaatgacatcattagcagaggatttataaaccatctatccaattatatactatctaagcaatttcataataaaaaagttaagagaaaaaataaaggataattttgattaaaataagaatcaaacgatgtcccatttaggcgagagtcaaagtta

SEQ ID NO: 158897 - DNA, 573 bp, Cannabis sativa
cggacccaaaccttagatcaagagcatgctccggacctgaacctggaccaaccccaaaccctggactcgaactcggacctcggaccccaaacccaaaccaggacccagacccgagaccgagacccatggaccctaccaaactagccctagaagtagagagctccctatttttttgttaatattttaatcaaaagcattattattttattaaattaattttaatttaacaaatttaaattattaaatattattaaaatgatctaatactaactaaaatagaagcatggttgaagcaagaataataaaaaaaaatgactaactttttagctattttagctaaaattgaattaaaaaaataagagaaatgctaaaagacctcgaagatgtaatattgcaattaagtatcatgtctcatataatttattataataatttttatagagcattactaaccatttgtaatttgtcatctctaggtggtgttaggcattactggtgcttaagcgttgctaataggcaccagtggtgcctaacactttctagacgtgtcaccttgcgattgattaacaatat

SEQ ID NO: 158898 - DNA, 696 bp, Cannabis sativa
tgaagcgggaaatcgaattcctgataaggaaaaataatcggcacgtacagaagtatgtcaaggtcgatcagaatcagaggggagacaacaaccaagatgtgctaccaccactagtagatggacatctgcaagtcattattggaggttcgcacatagctagagattcaggcaaagcccgggagaggtatgccagaatagtacagcacgagcaagaagaagtagtcctggccgtagaagggaggaagccgaagatcccacgagcaggggaacccaccataacaaatgatgaagatactatcaagatcagatttccgcacaacgacccgttggtggtggaagtccagatagccaacaagatggtagccagaaccatgatagataatcgagcctcttcccacatcttatcaagaccacatatgaaaagatgaggctccaactcaaagatttaaaccctgtctttagcccgtgtatggtttcgtcggccaaggagtcgcacatctagggcaaattcgcctacccctctctgttggacaagctccaacaagcataactataatggcccaattttttgtattggacattccctcagtctttaacgtcatattaggtcgaccagctttgtatgacttaaaggctgttacgttgatattccattcttgccttaagttcatgacaaagaattgggtagggtgtcta

SEQ ID NO: 158899 - DNA, 561 bp, Cannabis sativa
gctaaaaccataaagaagctggcgaatctggagaaattctcccttcaaatgtgagaaactgtaaagaccgcatatgattaatgctttgaattattaaataattaaggttcttaaatgagattaaattaataattatgaaaggcatattttggaaatatatttaatatatcatatatgttattatgctattttatgtaaattactcaacttctgtgattgtgttcggaagctgtggacagcgacgttgggcctttagagagtcatattgtatatattttgatgtatgttatttgctcggggtgttttgttaagtgttgaattgtcgagtttagtaatgaccaattagcccttgagtggtggtaactagtttaatttgttagaggggtaattaggtcttttcttttcctaaacccttattttggcttctagtggaatatatggctgcctttttattgttgtattattaattttatttgaagagtaaagggattagtgaagcttagtctagaagtctcaatttgcatctctctcttcctctctctttcgtgcaccccaaagaac

SEQ ID NO: 158900 - DNA, 611 bp, Cannabis sativa
taataataataataaaatttttctatatatgtatgacatatataatcatatataatataatataacaaaattctacaccatgcatataaaaaatgtccaccgatatacttttatttattttggtatttaaaagatttaattttttttataatcgtgtacgttataattattttaaatatcttgcaaagttttgagacattcgaagaaattcaacacactaaaaataagatttaaacagtttgttgcacgtgtgactcttttattttatacgcatatgtgaaatgtactgtttgaagactactttctatattgtaaattattttaaatttcttagaattttacaaaatatcttaaataactataacgtacacgactatgaaaaaaatagactaagaaattcttctaaatgccaaaatagataaagggtgaatcagtgtacttttttattatagaagaatatatatatgggtattcattggatcacatccaatagatttggacccaatcgatctaatccaattatttattggacattagatattttcatccgatccaatccaatcgaattaagtcatccgatccgatccgatccaatggatgtattggattgg

SEQ ID NO: 158901 - DNA, 775 bp, Cannabis sativa
ttgggcccctgggctgggtgggccctaggcacaggcctaacccgcctatgcccagggccgggcctctgtaagatttagcaatgcatctccataaaaaagaccaacaaatagcattaatctttttgagcactctctttggtaaccataatttgtgctcaataaaagtgaattgagataagaacaacatttactaatgtgactctaccagcaaatgaaatatttcaggatccctaaactcaaattctttgcaccattttttccactaacacttcataatctgttgttgaaagtcttctagcataaattggaatacccaaatatttaaatgacatctcacttcaagtaaaccctgaagctcctaggactactcttttgatctcagtatcttccattccacaacagtaaagggttggaataatactaactaaaatctcgaactctaacatgaaaatacaatcatattgtaaaggaagttagttatgttagttataggggttagttaactgttagagtttattactccttctttaacattcactaactcaatgcttatgtatataagcttgtatctttcctttctaaaatagtaagacatttctttctatatctactttttcaactaatctctttctctttctttctctccacctttctttattctccggttcacacttcaaaaaatttacttttagtcacaataaaatttgtagctaaaagtaaaaaaattgtgactaattataaattattattcttatgctgtgactaaaaagtctgt

SEQ ID NO: 158902 - DNA, 566 bp, Cannabis sativa
  modified_base (27)..(30): a, c, t, g, unknown or other
actaatcagattgtaaagagttttatnnnnggcataaaacccaacaagaacttatggcttagatattcggaaaataagaaaaatttttggctaaagatatcataaacacaatagaacccaccaacttctcaaatttaaaatttcccgaagtgttcccacaactaactatgattgagattttttctatttttttttccaatcactggacatcactgaaatttttcttttatttcttattttcattcattttcatttttttctctctgaggagagcaaatactcttcaaaatatttttcaagtgatgccgagtaaatttttttttttcacatgtttcccaatcacgcaagatttttgttttattttcttcaacacttccacacactctatttttcactcccccacacttattgtaaggcttatgataccattcaaaatttaatgaggacaacaaaacaacaatgtggatacacttttagttcaatgggtgaagaaacgaaacaggtttaggctcaaaagggttcactaaggatattcattttatggtaggcttgaaaggctcaaaata

SEQ ID NO: 158903 - DNA, 1025 bp, Cannabis sativa
  modified_base (360)..(365): a, c, t, g, unknown or other
agttttttccttactccttcactctttagttttatgttaaaatctcaccctacacatctccaaaagtcgtgaaatttcacggggacgaagccaagaccgttgtacatcacttttgtataggatacgttgagagaaaattagttttcatgcactaacgagaattttaatcgaaacggtgaaaatctcaaaatagtaatagtggtaaccgtttctgaatgtggccttgaccaatctcagaatattttttgccactagtcacaatgaattcatactactaagacgtgaatataaagataggtttcaggtgaaaatttcttgaaattgccacctaattaaaaaatagaaaatattcttcttttnnnnnnaaattttaacaagttttttcctcactcctccactcgttagttttctgttaaaatgtcaccctacacatctccaaaagtcgtgaaatttcacggggaggaagccaagaccgttgtgtatcaattttctattggacacgttgagagaaaaattagttttcatgcactaatgagaattttaatcgaaacggtgaaaatcacgaaatactgatagtggtaacccaatttgaaatatggcctggaacaatctcggaatattttttgccactagtcacaatgaattcgttctactaagacgtgaatacgaagattggtttcgggtaaaaatttgttgaaatggccccataattcaaaaatagaaaatattcttcttttgagtggaaattgtaacaaggtttttccttactccttcactcattagtttctgttaaaatctcaccctacacatctccaaaagtcatgaaatttcatggggactaagcagagactgttgtgcatcacttttctattggacacgtcgagagaaaaatttgttttcatgcactaacaagaattttaatcgaaacggcaaaaatctcaaaatattgatagtggtaacccttagtgaaatgtggcttggaccaatctcgtaatattttctgccactagtcacaatgaattcgt

SEQ ID NO: 158904 - DNA, 726 bp, Cannabis sativa
ttagaaatggttaggtctatgctgagctgttcaaccatatcaacgtccttctagggatatgctattcagatggcaaatgacattctaaatgtcataccatctaaatcagtccctaagacacccgtagaaatatggaatggtcgtatacctagtttacgctattgtagaatctgggagtgccctgctcatgtcttaagaaaggaagaaggcaaactagatgcgcgaactaaagtttggatgtttgttagaaagtctaaggagactaggggtggactattttatagttacaaggataataacgtgtttgtttctacaaatgccacactccttggagaagactatacaaagaacttcaagccgcaatgtaaagtagtgttagaggaaattctctaagaaataaatctaactaaagttccatcatcttatactcaagtagaggatagtcccactccctcagttgaaccaatgcaagttgatacaaccgagaaatctaccactgaggttcctgttcagaagatcacagctcctagttatagtgggagggtttctagaaaaccacctcgttatggcttggatggtgaaattaatatggtcgttggtgacggtattggtgatgatccattaacctataaataggcaaatgaaagttcggaacagaaacaatggtcagtcggcatggattcaaaaatggattccatgaaaaagaacaaagtctgggaatatgta

SEQ ID NO: 158905 - DNA, 518 bp, Cannabis sativa
aataacattgagcgttggaccaaacccgattcaaatacagtcaagttaaatgttgatggagctttgtttgagaaagaaaatgcttatggctttggcattgtagctcgtgattcgttgggccactttattgatctctgagcaagatatcatgggggaagttacccagccgaggtggtggaagctcttggtatcaaagaagcactaagctggctaaaagacaaggaatggaataaggttgacatagagactgatagcatggtaacggtacaagcaatctttagtaatcaaattatgtcctctacttttggtttgattgttagtgattgtaaaagtttatttcagttttaaataatgtaagtgttcgttttattagacgatcagcaaaccgagttgcccactttgtggctaggcgctatcggtttttctctgatcgtagcattcataggaatgatttccctaacgagctccaagctcttctgtacgatgaatgctaaatttcaatgaagttgatatttcat

SEQ ID NO: 158906 - DNA, 583 bp, Cannabis sativa
  modified_base (539)..(545): a, c, t, g, unknown or other
ggtttgagttcgggtcctgagtcctggtttgggttcggatccgggtccgactcccaattcgggtctaggtctgatttggagtccgggaccatgtccggttacgggtctagatctatgtctaatttaagttatggttccaagtccaagtaatagttgcagtcccaggcaacttccgattttggttccaattttgggtcactgggtacgggttcgggtcctcttttgggtttgggactgggttcaggtccgagtgagggttcgtgtccttgtcagggttcgagtcgagggctgggtcccaaatccaaacacctactattggttttgtccaagccctgggaccaaattcggatccgaatcttgggtccccgtctggttccattttttgtgtcgtgtcgcgaattgggtccaaggttcaagttggggtcttggtcgggtactatgtccgagtcctagttctgtttcccaggtcactatcctgattctggatcgaggtccaagttattgtgtgagttttggtcccggtctaggtttgggttcgnnnnnnngtctcggttcgggtttagatctctgtctgggttttgat

SEQ ID NO: 158907 - DNA, 500 bp, Cannabis sativa
tatcgggattaagtggggttatggaatttgaccattttacccctagattttgaaataccctagttttatgagtaagggcatttttataattgccaagagaggggtgttaagtggctgcctaactttgtgacacctagaaaattaaatttcagctacggttagttaggaaatcctttcccatttgaagaaaatcaaaaatcaaaagaaaaagcaaaaaaatagaaatcctctttctctttctctgtttcggccaaacccaaagcaagaggaaccaagcttctcatctgtgattttctggaattcagctaggaatccaagagttcttaaggttgaggtaatccctagctctttgttcttggtattttttttagctttgaatttggtttcatgtagtgagtttgtgaaagaggggctgctagggttagtaatgcttagggttctgattttaggttaattttaagttgattctaagttctggttattgaatttgagctatggag

SEQ ID NO: 158908 - DNA, 515 bp, Cannabis sativa
tgatatgagactccaatatatactttcattttgtttgattcataatattatgcaagaaaagataaaactattttgataaaaataatagaatattcaattgttgaccatgatatatatttgatgatcaatgcataaaatattgtatatagggtaggttaattagttgtagaatagggattgagaaacaacaagtactatgaattattgaatacataaaaaattaatcagaccagatatgaaaaaaaaaattaaaaaaaaaactaattaggaagttttttcacgacatgtactaattaaattctgtttctcgaactttttagactgtcaaaaattaatttaaattattggtattgttggatttaattttttttcatctaattacataaatagaataattagtgttttttatcattctatatggaagattaaacatatctccttacataatagtattagattttacttatttttactattaaaatattgaacagttagcgttttatcttgatctttaa

SEQ ID NO: 158909 - DNA, 501 bp, Cannabis sativa
atacaagtttatttcaaggttggtggttcactaaataacccttggctagataaagggagaataatagttgcttggcaaccaaatgtttattctgtagacattggtctttgcacaagtcaacttattcattgtactgttactccaaaatagagagtggggaaatttcaagttacttgtgtgtatggcttcaatgatgaaaaaagaagggagaactatggactgaattggaaggtttggccactaacattgcagaaccatggctggtatggggtgattttaatgagattctctttgctaatgagaggattggtagaagagctcatgttgtaccttctcagagaattaaggattgtatttcacaatgcaaccttgaagatctgaaatattatggggcctttctcacttggaataacaaacaaaagccagaggagagaatttattcaaaaattgatcgagcaatgatcaatccttgttggatgaattttttctctagctcagaag

SEQ ID NO: 158910 - DNA, 853 bp, Cannabis sativa
  modified_base (165)..(173): a, c, t, g, unknown or other
tatttttaaccatttttaaccattagattaaccattagatcattttagatcattgttgagatcattgttgaatggttgtgattaatttagaaattaaaataaaaataaaaaataaatacttgtaacctgtaacttgatattttattttcttttaaaaacttaatnnnnnnnnnttatatttaaaattaaattattaataattattaatttattttgtgcaatttgttaatcagtaaagatcttttagtaattattttttaaaacttaaataattgaaataattataacaaaactctttataatttaaattattacaaacataatcttaattaataaaaaatagtatgaatgacctctaactagaggtaattttacgctaaatcttatttttttaacacttttaagtgccaaattagtgtgttagttcaagattgtttcaagttcttttattttttttaaaaaaaaataaaaaaaataagtaaaaaatgtaataataactataaagtttatgattattaactatttttgctcctcgttgaaatcatcttcatcaatcaaaatattgtaaaaaaaattatcaaagtagattaccaattaattgaaattgttgcttatttttaacaaataagcataacattaggaaaatagcaagtaaattattaaaaatcaaggagaaatctaattgtagctggttgaatagagaaatgggcttgtgacatagatgtaggagattgtatcgaagtgaaaaattcacataacgttaggttggaataaattaaaatcctaaattttaaattttttttataaaggaggaggatgggtgtgacaccctaactatcttaggcgtattacg

SEQ ID NO: 158911 - DNA, 604 bp, Cannabis sativa
  modified_base (541)..(564): a, c, t, g, unknown or other
gtggactagtaacaatctgaaatgattgttgaaaccacgtacaaaaaccctgtgtgtttttaattttatgcactgtttgtttttctggtttcttcttgagtcacagagttgtattctgtaactacagaaaaactgttttcaataccagtttcattattttgcatttaattaatcatttaattaaataattaaactgagaatattaaaatatggaatttcaattggtatcagagcgggtcactaaattcttagtgagatctcgaatttattacgtttaatttgtttttgtgtgagatgtcttcgtttgcagaaggaagctctatctctcgaccacctttgttaaataaatccaaatatccttattggaaggtcaggatgagagcattcatcaaatcacaagatgagaaggcatggagagctgtacttataggctggacacaacctactgaaagtgatgaaaaaggtaatactaaggtaaagcctgaactcaattggattacagaagatgaaaattgttggaatatgttttaccaagatctannnnnnnnnnnnnnnnnnnnnnnntaacatcctaatatgaatttgtaaaacaataaaattaaac

SEQ ID NO: 158912 - DNA, 585 bp, Cannabis sativa
  modified_base (221)..(225): a, c, t, g, unknown or other
  modified_base (316)..(324): a, c, t, g, unknown or other
  modified_base (419)..(429): a, c, t, g, unknown or other
acactatgattgaggactaacttgctatgggtggacatgcattcaatcactaaggctccaacttttattgtgaagaacactaagagtttcgaaatagtagagagaaaagaagaagaagaagtctcaaaacactagttgtgtgacagaatgaaaactaggtttagaagcattagcagcactagttggataatgagacctttcttttctttttatactaattnnnnnagggttaggattgaattatttggaataaaaattgataaaataatagcaaaaatagagcttagtggttggcccctatgtgggtccatcactnnnnnnnnntttgccatttttctcaaccatttatctatttttcacaaatacaatttttttgctacttcaatcttgtaaatcccaaaactatttatttaataatnnnnnnnnnnnatcaaataaaattgtcatttatgttatttattaattagactccataaagtctctgaattgataaataaattctaaaattctatttcttcaaaatcaagccatattatagtgaaaattcataaaatagacatattctaattttagaattacaattga

SEQ ID NO: 158913 - DNA, 505 bp, Cannabis sativa
atatacatatgtgcagctaaacctaatacaacataacctaaacccattcatctctctccaacaaaccttaacagccgtcactctcatcatctcactttactcagccttttttctttttgaagaaaaagctcagacctccatggagttggaccatagtccatagttgtcttctctctcactcagctactctcagtctcacgcaccctcgcacgccagccattgctcctctcacgttcatctcgcaccagcacaccattcaaatctccagccgcgccagccatccactccacaccaggaaccagcgaccgtccaactgagctctccacaagctagccgcaccttctaagtttttattttcaacttgtaacacttttttttttctcattgctatgctgaaatggaaataatttttttctcattgttttgctagatggaaatgaaactaatatttttactttttttttctgtgctgaaggaactcgagctctttttttttttttttttt

SEQ ID NO: 158914 - DNA, 778 bp, Cannabis sativa
tattttttgattaatagctatattgtagactttgagacttttttttatatggtctataatattgtagattagattggataatggatatggattagacttttttttttcttttgtgggttttctattgagttttggttctagttttctttttcatgtatatgttttgattaatatctatagtgttttttttttttgaagtaaaatagctatagtgttgtttgttttaaatatttaaattggtaagtaattgtgaataatgaatgattatttatttggacaaatagtttagtttaagttttgaattgaatgcatttttgtaattgggtatgaaccaaattcaattcactattcaggcccaaaaatattaattataaaaaaaaagatccaaccaattttaaaaatcaaagaaaatggcatttttaaaaattaaatttcatttcagcccataaattaaacttttgggctcagcccaataggacccgaacccgactacacccaacctgcaaaagcccgacccaatactcgatgcacctgaacacccaaaaattgggttcgtatgtgcatttccaagactcgaaaacctgaacccgaaacccccaaaacccgacccgtgtgcacccctacccaaaatgataggaatttgagcatttatgtcttcaacaacatgagcatcaataacaataaaatcaataggaaaataaaatttatatacttttatcaaaatatcttctatgatacttctaggaattttcacagatcgatcaactaactgaagtgt

SEQ ID NO: 158915 - DNA, 674 bp, Cannabis sativa
taatatattgtccttgtaatattttgtttagagtaattgtctttgtcttttattcatcttattttattcttccattgtaatctatctattatttctaacaactaagttgtgagtggttttaaaaaataaaaaattgcttcaattatggtgttggttttcgtgatacatactcatttgcttgattttttaatatacaaagcttaacttgtctaatttataatattagtaaatgaataaagttgtgaaacttttgcttcattcaacacaatgtttttgttaaaataaaattttagaaattataatacttcacagcgcccgtcaaattatttagaaataattttggtataaaaaataataatagtaataataaaactttgacatactgtgtatatttgcatatactcaacaataaaagatactcaacatattttcaaaaaaaaaaaaaaaaactcaacagtaaaattttaatttttcaaaaaaaaaagagagtaaaatataaattaaattaataaagtaaaaaataaatctcataaaccctagctctaacataacatcagtgcaacctatttttttaaagtttttattggttctgttgaccgaggttttcggcaactaataaaatattataaagttagtgagctgtaagaaactgagagaaggatttttacgtggtt

SEQ ID NO: 158916 - DNA, 725 bp, Cannabis sativa
taataacacttctttcaaaaaaaaaaaagtctttggttacaattttgtattatttttgagcttaatttatgatcaaattctttggacttttaagtttgttatggtttaactctcgtaagaaaattatagctaaattttctaatttctacaattactttattagtcagtattccttccgttaatttttgactgttgagtgctaagagaaatgctaaagagcaccagtagtgcttcacactctcctatgtgtcaatattcctattagtccaactaagtatcgagtttcacataatttaatataatagcttttagggagtattgctagccaatcgcaacgcgacatgtcgagaaagtgctaaacaccactggtgtctaatagcaatgctcaagtgctaaatagatttgtcactgtgtacacaaatatacacatggtaaaattttattaggccacctaatattaataattaaaaaaaaaattaaaatattaaaagaattaaaatcagaaaataaaataaagatttctcttttttttttctttttctttttttctttcttttttttttttaattaattcttcttcttcttcttctttgatgcccaaaaaatcaacctcccccaccccccacccagggccagccctgagcataggcgggctaggcttgtgcctagggcccacctagctcaggggcccaaaaaaattttttcccttttaaaattacacattt

SEQ ID NO: 158917 - DNA, 511 bp, Cannabis sativa
  modified_base (342)..(344): a, c, t, g, unknown or other
taaaccaaaaacctatctactgcaacttaatatggcaataccctaaactaggagggaattaaaccaactagaaacctgaaactaacgcaaatcgcaaagttgaaattttcgggaatcttgctgcagaaaccagttaccgagttttacaggtacctataaaaccgattacccagttttctacagaaaacccaaaaaacttcaaagcttcaccaacacgattccaaactcaatcaaacttttcagacatgcatattatacccccaataaaccattttaaagcaagaaaacaactacctaagctcagaatctaaaatcactattaaagctccaagtttgagttcnnnaactcaaaacttggttaaatctactaacagccaccaattcaagcttaaatcaacataatctaacatattttaacatcagattcatacctcaaacaacaacagcaacaacagcaaccaatttcacaaatcatgcataaattcactttcttaaaactcaagaactaaag

SEQ ID NO: 158918 - DNA, 603 bp, Cannabis sativa
ttaattaaattgactgaggtcagctgcaattccaaattcactctaaattttccccaaattaccccaattatttaatatcatcgtaatttgaatcaaatggtgtttcctttttaaacaaaaggattgtaattaagagattattcttataatcttggatgtgtcaaactaaaattaataaacttttgtgctataaatttagcataggtgaaattatgttttgcatttatttttaatattctaaatgtgaaatttttgcttaacaaagtgattttagaccgccacgtcgccgcctcatacttctcttatatatatatatatatagattgggattgagagtttgattttttatacgggaattaaagtttgccttttcatttcattaattgaaaaatattagtagaaactttatggaatgagaattttgaatatatgaaaatagaattaaaaaatagcatttgaatcaagaatcaaagtttattgttaatctccttacaagaaaaatttatttttaatttgtaaagtgttgaccaaggttttgggcaaccaataaaatattataagattcgagagttgtaagagaattagagaaggatttttacgtgg

SEQ ID NO: 158919 - DNA, 527 bp, Cannabis sativa
ttactcatgtttaattattagaacgagataataaaagcaagaatgtaacaagacaaagtttaggttagagttttcctttttatcaatttcttgataatttcagatttggcttcttcaatgttttggtaatctttcttatttcttgacgttatttctaggtgttgttgaatcttcttgcttccccgagctctgataccactgtaagaaatcacagcaacccgaaattgcccctacacccaacaccccaacagtcacaaaataggggtaaaaatgtctttctggttttgtgcggatctaaaaggaatattccttttcaaaccagatccccttttattcaaaaccctactgccattaaaaaaaggcagtatataatctttcttttcctttttgcttagaaaaccctagcaacaaaaattcctctcttcaaaacaaacagccggcctccttcatcttctctccttcttctcttttctttgaacagcagaccaaacccagccgagcttcttcttctccttccttctctcttg

SEQ ID NO: 158920 - DNA, 623 bp, Cannabis sativa
cagggggccttctatgttaaaaactttaggggatgtttggcttcataacttaaaaaaaactgaaaaacagtttttaaaaactaataggggttgtttggcaaaattttttaaaaactgagtttcaaaaactaaaaaacggaaaacatcaaaatgatgttttcaattttcaaaaataatttttttttgtctaacatattatattttatatttttactcacatactcggatcctagacccggccccgaatgggttcatatcatggtatggtgttaaaatattaatttttttagtaagaaaaaaattaaaaatagttttaaaaaacttgtgccaaacaccattaaatttttaaaatgacaaaaaactgtattctattctcacttttaaaaacacaattttaaaaactgaaattgtgtttttaaatgtgagaatagaaaacacttaacagttttttgtaattttaaaaatttaatggtgtttggcacaaattttttaaaactatttttaatttttttttatgaaaaaaaaatttaatattttagcaccataccatgacattaacccatccgagtctaggtttgggtatggtttcgagtctaggatccaagtatgtgagcaaaatataa

SEQ ID NO: 158921 - DNA, 616 bp, Cannabis sativa
ttatttaacaaaaaaaaaaaaaaggtctaatttcttgttatatatatatctttatataaaaaaaaatatgtatatttaatttttattagtttaacagaatattttttaaaaaatattaaaatattctattaaatttaattatatattttttgaataaattaaatttaattatattaatatggtataaatatataaatattaatactatttattttagaataactcaatttatactaattttaaaataatttaaagggaaattacttcatataatttttttttaactttttttttcaaatttacgatttaggtttctaaagtggttgcagcgctagttgcaatagagatttttatacaattttttgttgcaatttaagttgcagcgctagttgcaataaaagtttctacgtagaattccgtaaaaatgtaaaaaaaaaaactattttaaagtgtaaaaataaaaaaatccctaatttaaatatatatataaatattaatatattctttgtaatattattatttttatataaatattaataataaatcttttagtttttcttttttaatatcataattttaaaattaataatattcaatgtagtgataatcattgaaa

SEQ ID NO: 158922 - DNA, 692 bp, Cannabis sativa
tgaaataagttttatttagggcacaaaacccaacaattgacaccttagagccaatacctgtggagtacctagagaagcctaccatcaaagaggagcaagcatacgtggtgaccagtaaggactcttggatggtctcctatcagaactacatccaaagaggagagttacccaccaacaagaaagaagctagggggtagtgtattaggcgacccgttatgtggtgatggatcgggtgttgtacaaaagaggattttccactccccccccttctgcagtgagtgggtgaggaagaagcactacgaatcttgtctgctatacatgagggggagtgcgagaaccatgccaggggatactcaatgtcataaaagattttgaaacaagggtactattggccctccttggaggacggcactgaattttccaagaagggcgataaatgtcaaaggcatgtgaattccaatcaacgtccgcccactaagcatggtcagcccttggcccttcccagtatgggggatagatctgataggagccttacccacatgaagggcctgggtgaagtacgctatcgtggcgatgaactactacaccaagtgggtagatgttgagcctctgatgcacataacagccaaacaagtcgtttccttcgtcaataggttcatcattttttcgtttggggtcccctataagatcat

SEQ ID NO: 158923 - DNA, 802 bp, Cannabis sativa
  modified_base (50)..(64): a, c, t, g, unknown or other
  modified_base (147)..(156): a, c, t, g, unknown or other
ttctataatgacataaaagtgaaataataatttcctttgagcttggcttnnnnnnnnnnnnnnnaagagctcttacttcagtaattatattagtttactgagaatcatttataggaagctaaaggggtagaacggtaaatttatccnnnnnnnnnntagatcatctatagaggatctttaattatttgaattgaaacaatgataattaatatcgtatctatgtttggaacatatagagaattctatataatcaagagtgtgattccgaatctataatggagtcaggaggaattaataagttaggaagtttacttggtaaattttagatttaattattgaaagcttaattatataggtccatggtccccacacaagtaaagacaatattggcttgtagacttagttaattggttttaattaatcaattataattttaaactcgattgtgtcttgtttataatttttcactaaggaaggggttaattgagaagaaatagaggatttaggatttatttgttaattaagagattttataatgtctaattaattaataagttaaatgataattttatttgataattaattataatattaaatagatagatttgatatttataggattagaattaaaatatggcatttgtaaaagaaaatataagttgttaaataaaatggcaaaattgaaacttatagcactcacatatagggttagccacttaaggaattaataagccattattttatcattttttttaatttcatataatttaaatcctaaccctagatgaaacactataaaaga

SEQ ID NO: 158924 - DNA, 618 bp, Cannabis sativa
ggtctacctgcctaccacttggcccacaggtggaacctgtgactggggattggacggctgaccatttagagtttgagaggagttcacagcgggatctttgtctgtttcgcccagggcaatgacagttgcaggttgttgactggtagcctgataggcttttcgtatcaacacggtagcctgtctagtttggtcgtcaatggctgcttgttgagccctcagcgtttccatctctttgtccctccattcaacaaacatgcgcctttgctcttcaaatgcaagattcaccacaacacggagttcctcctgatcatgatgcagggtgttggtatgaccttgtatgattccaagagcagcacggaggttcttgatctcagtgtcatctccaatggttgttcaattatttgttacgggcagaacgacagtgttgggaatgccctgattagctgctaaaatggtatttccagtctcttgcacaccaggcgcgattccactcccagaagtcatcacaccgtgacctacatttgatggttgttcaggatttgtggttggcggaacccttgtattccctggattctacagtgtaggatccaccgactatggatttgccggatcaaccac

SEQ ID NO: 158925 - DNA, 645 bp, Cannabis sativa
ttttagagatacaactagttaattaattctattttctctcgtatactaatctattgcgataataatactactgtattcttttcaaagaataatgagattagtagcgctttcaaatatatatgaaaataaagtgtctcactgttagagacttggtcaagaaagaagacattgtgatagaatattgcaataccaagtcgatgttagtagatcatctaaccaaaagattaagtgccatgttgcttaataaatgtgttgttgatatgggtattttataatcttttattcttttgatttagtgggagtttcttgttctatcatttgagattatatttatatgtaattttcttattgatgttatgaactacttgatttgttttgtgggtcaataatttttttattggatatttatgctttcaattatgttttgttatattatcgagaatgattgaattaaaagcatgtagttcatattttgttgtgattattgtcttttaagttcaattgtttaatgacaatgatattttgttggcgtaattttttaagcatgtttagtgacactgacttatttattaactagtgtttgattaatttcattgacttagttattaagcatcacgatatcagtgaaattgaggactgataagg

SEQ ID NO: 158926 - DNA, 580 bp, Cannabis sativa
ctctgtatgaaaggttccgcaagctagcacctccagtttttctgggaggtctggatgttatgaaagcctagcaatggctaacagtttactagaatcttgaattttatgggcgtcattggtaatgatagggttatctgtgccaccttccaatttcaagaagacacattggtatggtgggacatggtgtccatgattcacgatgtcacgacgatgtcctgggaaaagttccagaacttttcaatgcgaagtattataatgaggcaatcagaagtgccaagagaaaagaatttactcatttgacccagaaggaaaacatgagtgttacagagtatacgacctagtttgatcgcttggcgaggttgggctcgggaattgtgccaaccaatttcagtaaaaaggaaaaatacctggatgggttaaatgcaaagattcgacatgatttgatgattactactgatgacagaaccacctatgctgaaatggtggataaggcactgcgagctgagggcgcagtgggatgcatgatagagtctggtgggactcctgctgttggcggggctcctagccctcctgcatcagg

SEQ ID NO: 158927 - DNA, 500 bp, Cannabis sativa
gcctaagtgagagaaataatactctttggcatgatccccccaccgagtggagggcatcctaaacctatggagacgttcattgaaccctataggcctaaggcaagcatactctcggacagaagggatgtagggtgtcattaaaggggacttaccagaacaagaagtgctggcatcgggagcccccgtattcggcactgggaccaaaggctttggtcagggggtccttcgctccaccgggctcccaatacgaaggggccttccggcggccacctgggccttattataagcccgctcctgttccttctggaggaggtatttctggtactcatcttctgccgtggcgatgatatcctcccggagtagcttctctggggccggaaccctcacatttgggcacacgactttagaaaggttagagttgtccaccgactgatgcccctggatcagcttggccttccggcagtgctccgtcgtgaccaacttgttggaaattattttac

SEQ ID NO: 158928 - DNA, 558 bp, Cannabis sativa
atttgtggaatttaaactttattatgtgacaagaaatttaatttgtctaagaatggcaaattttctttctttcacataattaaatgtttaaatcacaaattttatcaacaaacatgacaagtatcataaggagaggagtgtcattgatacttaacacaaataacatgggccaaataagccaagtgcattttggaaagtcttggccataagtgtgacacggccataaggcctttttcttttattaatgtaatttttcgctctttttcaaaacatctcactcaattcaaaagcaaaccattcaagagctcaaactttcatttttaaggaccatttaagcaccattcgaggtaaaaaaattttctttccactctttttcattcccatttaacctctcttctcatccttttcattaaacttgaaattcaccaaagctccagttttccctattgtaggtgtaacaccctactagtttaggcgtgttaacgtgatttaagggtatttattccgtgatgtaccctaaccgttagatggattagttatttgatttgagagttgggg

SEQ ID NO: 158929 - DNA, 549 bp, Cannabis sativa
atataaggctagattagttgttgaacgatatagccagagagaaggtattgatttcaaagaaaccttctcacctttttttaccaaagattctttgtgaatcatcatggctatagttgctcattttgatttggaacttgaacaaatggatgtgaagactaccttcctaaatgaagatttgtatgaagatgtctacatgactcaacttgttggttttgagaagcctgacaaggaacatatggtttgcaagctcaataagtctatttatggacttaaacaagcatcaagacagtggtatctcaagtttgatgtgtcactgtaaatggtttcatggagaataaagtcgatcaatgtatatatatgaaggtcaatgggagcaactttatttttctagtattgtatgttgatgatatcttgcttgcttctaataataaagatctgttatctgagacaaaacaattgttatctgaccattttgatatgaaagacctcggtgaggcttcatatgtacttgggatacaaatcctctaagataggactaaatgtattctt

SEQ ID NO: 158930 - DNA, 558 bp, Cannabis sativa
  modified_base (49)..(76): a, c, t, g, unknown or other
caacataaataattatttaaataacaataaataattttcataattaaannnnnnnnnnnnnnnnnnnnnnnnnnnnaaactaagcggtctttacatatcacgtaagataaaatgcagttaatatttgaatatcacacagctgtgattagtccgcttttactgggtcaaagtaatcgtgtattaaacacgttataaatcatagtgttttgggatgtctcgataagaacccagtaccaatgaccttgatagcgagctaaagcttttcccgtatctttctgaggttgataatataaatctcgtcgctcctgcgctgaagacataacgctctatctgacaattgcagttctcggtgacaaggttaacttctacagtcatgcgcatgtcttccaatggcgagatggacgcctcgctatcacttgcttgggtttacccgtctgttatacttagtttttatattgtatattatacactaagtgtattcacattcattatatcttgcttacgtctactctattggaatatgttttaccaggaactagatttactaccatgtatgtt

SEQ ID NO: 158931 - DNA, 535 bp, Cannabis sativa
  modified_base (26)..(26): a, c, t, g, unknown or other
caagggaaaaaacatttccaagtagngagcttcccaaggcggggatgaagatgtggatcctcgacttggggaccaaagcagcaatgttggactgacggaagaatgagaagagatcgagatcgatgcagatatctcagcgagaaagctaaagatcagaaaagtttgttgctcgaagtaaaataagcattcataaaatttcagagagcaaacctagacatttttgcatggtcacatgaggatatggtcggaattgatccttctatcatttcgcacgtcctaaatatttatcccaacttctgaccagtttaacgaaagcgaaggctattggacaaagagcgagcactagccctaaaagaagaagtagaaaagctacgcaacaataatttcataattgaatctttctacccagcttgggttacaaatcccgtactggtgcccaagccggacatgaaatggcgagtgtgtattgatttcacggacctcaacaaagcatgccccaaagactgttttcaacttccaagaatcgatcagctcg

SEQ ID NO: 158932 - DNA, 567 bp, Cannabis sativa
tttccttttcctttttttttttaagaaattcgatattatttttacttgctaatgacacaaagaaaaaaaaggaaaccaagtagacaagctttatgaaacaattttggaaaaccaatgagaaacaaaaataaggaaacagatttgttacacaaatagggtaactagaattcaacaataacaaattggagtttttttttcgaatttcaataaaaaaaaagggaaactaattgacagaaaatttggagacaagaaatcagcaaaaaaaattaagagttttgaatttttgattttttttaagaagaaaagaaaagcaaagacacgatgtttgacacaagaaaattatcagaatgtggttctaacagttttcggatttcataaagaaaaacagaagaaatgaaacacaaattgacaagaaaatagaacacaagttaaacaagattatagaacatgaattgaaaataaaaacacaaaagatagataggccaaacccgatgaacctaagctctgataccaattgatacgaaccacaccaacacttgtgatgaaacccgataccaattatggcag

SEQ ID NO: 158933 - DNA, 565 bp, Cannabis sativa
aaaggttgggggcacgtggaggacctatgcgagtgtttcaaaatccttcccagctacaacatgaagctcaaccctgtcaaattctcttttggtgttggctcagaaaaattccttggattcatagtccacgccaggggaatagtagcaaatctagagaagatacaagcccttacagacatgaggtcacccacaactatcagggaagtacaaagcctaataagatgcatttctacattaagcagatttgtgtccaagtctacagataaatgtatactattattcaacattctcagaggcaacaaaaaatttgagtggacagaagaatgcaaaaatgcattctaggagctgaagaaacaattggtcgaaccacctgtgttgtctaaacccctagaaaatgaggagctaggcgtgtacctagcagtcacaaaacatgttgtgagtgctgtcctcaaaagagaagaagacggtgtacaacaccctgtatactacatcagtaaaaggttaatcgacgtaaaaattcaatacccactcatggagaagctgacctacagcttgctcttggctt

SEQ ID NO: 158934 - DNA, 548 bp, Cannabis sativa
  modified_base (32)..(38): a, c, t, g, unknown or other
  modified_base (66)..(72): a, c, t, g, unknown or other
  modified_base (98)..(104): a, c, t, g, unknown or other
  modified_base (174)..(182): a, c, t, g, unknown or other
atcacaattaccttccactgtattgacatcannnnnnnaccttccactgtattgacatcactgtannnnnnntccactgtattgacatcactgtaatnnnnnnnaactatatgttctggacttaacaagtattgtatatattaaaccacaaacatgaaaactacatgtaaacannnnnnnnntctaatcttctattgataacaaattaggttatattgaaatggattttatttatggcataaaatcccaacatacatattttgtaccaataatagtttaaaactattgatttcaagaaataataaaatatgtatatattaatttgcttctggcattaccaatatatgtaaaatctatattctttgaaataaaatttttcatgtctattcattctcttcaaggaatgatatttaatattctaaatgtacaataaatttgtgatatactaaaatatatgtgcaattcacatttcattcaataatcaaatataattttattttgattataagtgtgtccgtactacaagtacgtgactactattattcaat

SEQ ID NO: 158935 - DNA, 549 bp, Cannabis sativa
gagatatgagttgattaggaccacttggaaacccttcttcaattgctggacaattatcgatgccaattctccgtaatgaacaatctctgaacattccctctggtaggcacttgagtttaaaacaatatctgatttctaaggactgtagagcaataaggccattgaggaagtcagacggcaactcctgaatccgccaaaaatcccgaattgtaagttgttgtagactagtgagattatgtagcatattttggggaagggaagtcaaatcacaatgatgcatgtcaagctcattaagaccacagagattagagatggattctagtaactgttggctaacaccatacaccctcagagacttaactgatcctagtttaggtaagctcaattttgggcatttatccacatacaatgaagacaaacatgggaacatttcatttccaacttcatgccttgaaaatccttccaaatttggtaactcatcaatgctaagactttgtaaacatccaaagctacttcttatgtctccacgattgtcaatgtactgtacta

SEQ ID NO: 158936 - DNA, 625 bp, Cannabis sativa
actcaattacaaatttaatctcccgggtaggtggcaatcccggtaaatcttctagaaacacgtcaagaaactcgcacgccaatcttgtgtttttaggtccagatgtcacaggttggcctgtatccactgtattgactatgaatgccagacaacctcttctcatcacgtcctttgttttcaaaagtgttattcttggtatgcgtgtctcttgaactttacccacaaacaccgccaggttagcactattaggctcaaacaccaccatcttctgcttgcaatcgattgttgctccttacttagacagaaaatccattctgaggaatattatatcaaaatcaaacagttgcagctcgattagattggcggttaattcacaaccgtcaatccaaaaagataaagaccgaatccacctagtggatacagtaaggtcttctaaaggtaacaaggtaccaaaccccgaaacataaatatcacatggtttacggaaactttcaattactctactcgacccataggagtgagtagctcccgagtcaaacaatacagtataggaacatccacttatagataactgacctgtgaccattgacggactagcatcagcgtcagcctgagtcatagtaaa

SEQ ID NO: 158937 - DNA, 556 bp, Cannabis sativa
  modified_base (36)..(43): a, c, t, g, unknown or other
  modified_base (182)..(186): a, c, t, g, unknown or other
  modified_base (369)..(381): a, c, t, g, unknown or other
taaacacatataagtttaagaaaccttacagtgggnnnnnnnnaattaaatgactccttccgcttagatctctaacccttgtatcctttttgtagcagggtatcacgaaaatctgaggccaattctccttcttgttgattggattcttcacagtcttaaatactatgattgaggaccaactnnnnntgtgtgggcactcactctatcacgaatggttgaataatatttgtgaagaaaggcttagtgttttttgaaattgaagaggaagaggtctaatcagaaagctaggtttttagctttggaggcattagttggatgaagagaccatagccttccttttatattatcttcaatagggttagggttgannnnnnnnnnnnnaaaaaatgataaaaatagagtaaaataagcaccttatagccgaccccttaatgggccccacattggtttggtccttgtaatttttgtcaactattttatctatttttcataaataccactttgtgtactttcaaccctataaatgccaaaaccatttatttaataattaaaataa

SEQ ID NO: 158938 - DNA, 532 bp, Cannabis sativa
atatatttatatataattaaaaaagatctaggaacagaggcaaaaactcaaattaagggggccaaaatgcaacagaaaagattaaacaaagtcaaaacataattttttaaaagaaattaaaagaaaatataaaaaaaataatataaatttttaaaaaatattaaaagatgagggggggtcatggccacccctccctacaacatagattcgttcaattggtgcacattctatcctcactttttcggtttaataacaattttggggacactttttcgatttagtaaggcacacaaacacttactactcccaaatgagcgctaataaagctacaataaaaaaatagaaatgttaaattttaaacatgctatattctttgtttttttaatctattatttttctaaaaaaattaagattttctaaaactcggggtgtgtatagggagtgatgtatctcaaacataatataaggaagtttcaataaaaaaattaaaaaaaaaaaagagtttataagagtgcgtttggtaacacttttt

SEQ ID NO: 158939 - DNA, 574 bp, Cannabis sativa
atttaggtccaattagtattgtgcttattcaatgaataacaattgtttaattaaggttaaattcctctcctttgggccttgagtgagagttaggggggcattagtaatgggtaggacatattgaacccagtcatctttcgcatgaataatcgcaattgtgaaggttcatttattttatttgaataattgtaataggttaattacattagtttaacctaataaaattgattagcaacatatttaatttttcaaaataaatggtatctatttttcatcagattattttgaattaaattaaaaaaaatacacttagtttaataaaattaatttaagataaactatatgtatttttatacatttaattaaatagagaagttataactaattagattttcctagatacctaattatttgaattttcttagaaaatatatttaagttgaaaataaacttttcaaattgatattggatcaactgaaattagaatatttttttttaaaaaaaaattaataattaagtagatttttctaagaaattagttattaaaatgttctttaaaaatatatttaagttg

SEQ ID NO: 158940 - DNA, 570 bp, Cannabis sativa
gatagaagtgaagtcttattcttatacctcactctcactcccactcccactccttttgaacattatttcatacagaaaacttaaaagtttctacttaatttccttatctcgaatgtggagtcctagacttgattgtaatgagagtgatccttgagaaataattgtcttacgaaaaacctaaaattcatacttattaattaggatttatcatggtatatatatataaagtctaaccttaaattaatctacacatctcaaaagtaagataacatgatcaccataccttaacttgaaaagaaaactctagtcgagtctatgaataattattgagcccaaaacttgtagaaactatcaaaggttgatcaaagaataacatcgaatattagaatatttctatttaaagaaataaataaataattgattttgtgataaatgaatattttataattattgaatttggacaaaattgattacgtaatattctatatatagtcagatttcaatattcattacttgatttgatttcctaaattaattgtcaaaatattctgacaattaatgtggcacaga

SEQ ID NO: 158941 - DNA, 678 bp, Cannabis sativa
  modified_base (545)..(547): a, c, t, g, unknown or other
gaattcgttcaattactgtgagccgttgctcagccttcattacattaggacctcccagaaacactagaagtgcttgcttgcgaaacctttcgtataatagctccatacggttactagcaacatgttgttctgctggcaccgctggagctacaacggcttgagcttgctgaggaggcacggcaggaagaccctgctgccttaatctttttatttcttcatcttgctagcgaattcaatcttgcatttccgcaaacctctactccaaatccggaggagcttgtggtggatttacaggacgaccaccctgagctctgccatggccacggccgcgaccacagggattcagggggttttgatatccctgaccacctccggtctcaaccatattaccctaacttcttgtatttcgctgggcgtccattttataggacttagcctgcgaacccataagccagacattttagacagcgatcataaagcttaataccgctcttatggacttaaagtcaacacacttgaaataaataattataatctaatatgcnnnctaacatgctttaataatcacataaaatactaaaaaggtacatgcttactgaaccgtgaactgagctttctctgatgaagattgtacatgtcttggcaagctttggtaaacctggcggctctaataccaaa

SEQ ID NO: 158942 - DNA, 520 bp, Cannabis sativa
cactacttcaattaccataacaactattaaacacttattcctcatattcacctatacaaatctaaaccaatacaaatttattcttaaaccatcaatcccccaaaaaaaatacaatttttagagaattaattctctattatacacatttagcaaaaacaattctcattgttataatttttttggcattaccatttcaatatataataataaattaataaccataattataataatcataataatagggtaataagtaaacataaaattaaaattcaaggaggattttgcattgcaattggcaatgtatggttggtcttgaactgtcaataacgtgggagatctcaaggttcagtatccatatatatgtatgtataatgtatatggagaacttttatttaagaatattctattcaagaataatttctaatctgttacaaaaaaatcaaatcccaatttgagccagttataaataagaataacctctaaattataattagttatacattttctaagtcccgta

SEQ ID NO: 158943 - DNA, 521 bp, Cannabis sativa
ttgatcttctttcgttggcttttcatggagatctctgatcgttggtcgcgctgccataacagaatatcgaatcaaagtttcttaccggtgttaatggtgattggcaaaaagctttccgccagcgttcatggtgttcgacaaaaacctctacatctttggtggtgttgtttggagaatacgtcgattatggaggagatccaagattttttggaggtgatccatgttcatgttgatttcagatctaaaatttttgggagaagctattttgggaaggtctcatgtagagaccgtatttttgaaaaaagaaagtttacttttctatttttgtttatttttgcatctagaaataaaaaagtaaagtttagatgtaataaagctataattgaaaaaaccctataatgaaatcgtatcacaatctaaattattaataaattgttataaaataatataaagtagatgagaagaaagaagaaaaagatgaagagagaaagagaaagtgaatgagaatttctcagttgttt

SEQ ID NO: 158944 - DNA, 611 bp, Cannabis sativa
tatagaggtatattttgttaatagatgacttagaaaatatataactaattataatttagaagttattcttatttataattgatttaaattgagacttaattttttttacaataaattagaggtgattcttaaataagatattccttaaatcattagagattctactatatttaccaatatataatagtatggttttgagtcatttactataatttttattttcaaaacatggacgttggcaacacatatgttcagtaagttgaaagtaataataaaacacaattatggtttttttgaagatgccgaacaactaatttactaaattgtatttgtttctcataaggttaaattaattagaaactcaaacactgtaaacgtatgagccaatgtttctttattcagtaattagagggctaataagtacaaacttaatttattatctcttattaataaaaatttaagcatacatctttgatcggtaaagacaatgggatctgtatcgacgacccaccaccagaactttgttgacaataatttactgaaattgtatgtgtatgaaaaaatagatactttgtggcttccatgtcatatgttgcatcacttaattttaa

SEQ ID NO: 158945 - DNA, 555 bp, Cannabis sativa
agattagggttgctgctacaaaaaattttcgaattactgctgtgacaaattttggaattgctgctgcgaagaaggctgttgttgaggaggttgttgtttctgttgtggatgagtggcataactctgagaagacgaaccaccaggcgactgcgactgactatacgtctgaataaacttctcaaatcgtaggttatataaatgagcacgttgttcaggcgtcaaattaccccccatgtggcacgcatagttgagaatatttctggcacagtgctcatcattttagttgttggtggaggaggcaccgtcgactgactttgagtgaatgactctttccttttatcttgagccttttacccacgcctctttgatagtcagatctttcgcctagaactgattccagaacgttgaactgataaccagtatcagattcagtactagatgtatcgctcaaggattgtcgttcaagtcttttcctatcaagctccttcaccagttcctcctatttagataaaaattattagaatatataaataatataaactataaattttaata

SEQ ID NO: 158946 - DNA, 770 bp, Cannabis sativa
  modified_base (163)..(167): a, c, t, g, unknown or other
  modified_base (230)..(233): a, c, t, g, unknown or other
ttggtgattgaacagttcatgcgtcgtttgaggcctacgatacatggtccaatagcccctttgacctttaacaacctcactaagtgtgtgacagcagccttgcgaactgaggctcatgtagaagggaatgagaagaacaacacaagcagaggaagaggaaatnnnnnaaagatgaccaagaagaatcaaggacagtgttcccaaggacaacaatttagtgggggtagcannnntagtggttcatctggaaagactcgtagtggaccatgctggtgtttcagttgtggtcaacaaggtcataagaagaaagattgcccacaacgacaacaaagatttcaagcatctcacggaggacccatagggagctatgtagagtctactccttttcatggacagcccaagataaaccagtctcagtcttcatcctacggttttacaccccaatcgggccagctgtctcagtatcaacatccgtttaggccacaaggttcaggattcaacatggggtactcacaaggtttccaaacttctgctcctagtgggagtcaaataaggtataatcaaggtggagggtctggtgctagtacaagccatcctagtcagggaaagggaaaagcaaaagcaaagtcgtccgctcaagcctatgctcttggggttgatgatatacatggcagtgcagaccaaggagttgttgatggtatggttcttatctcacactcttgggctcatgtgttgtttgatactaatgcatcacattcctttatatcttt

SEQ ID NO: 158947 - DNA, 626 bp, Cannabis sativa
aaaatattaattaatttttaacaaaagtctactttacgtctttttttgaaatgataactttaatgtcaattatcacataattataactaaagagcattgcaattggacaccaatgatgctcaataccttttataaatgtcaccctacgattgcttagcgatatttcttaaatcttattttttaaaattatatgtgacctgctacttaattatactaatagtggtatgatatcaaggagggttgccttttagcattttttataactaaaatatcacttttatatatatatacatatatatatatatatatttctttttaatcactttttgaaaacattttaattaataataacagaacaaactaatgaagtttctccaatgtctaaaaatataaaaaattcgagataaaatctaagattaagatatagatttagaaaatataatagtgacgactataagtgaactacggtaatgacaagggatgagatacagtgatgacaacgggtgagatacggtgataaatataactgagatacaattagacaacaagtgagatacaataataacaatagttttgaatgatcgaaatataaaaataatgcattatggggaacaccgtaatttttt

SEQ ID NO: 158948 - DNA, 747 bp, Cannabis sativa
aaacaaaataacacacaatgcacaccaataatctaaaataaaatatacgtgtgaaaactagtttcaaacctagaaacaaaataataaaaggaaacttaaaataaaaattataaaataacatcataaaataaagcaacctcattacagaacctttaaaacctgtaaaactagttttgaacttatgaaccatgtaaaaccaaattcgacactatgaaaaatcataacaaaatataaatgctaaacaataaagttaactgaaacaagtcatcagaattggaatagtcgccagagttgctgtcggcaccgagaaagtcaccagagttgttgccggtgccgaaaaaatcatcagaattgacattattgtcgaaaaaatcacaaaaaaataccaagaaactggtatcttgatggagaaactggtttcttgatggaaaaaacagtttctatggtttcttgatgaaaaaaccagtttctttgtgatttttccggcgacaatgccaaatttgacaaatttcccggagtttgctgttggtaccgaaaaagtcaccggagtagctactagtgtcgaaaaagtcgttggagttgttgccaacgccagaatagtagtcaaaattagcattgtcgtcagaaaaatcaccgaaaaaattaccaagaaaccagtttcttagtcatttttccagcgactatgtcaattctgatgattttttcgaagtttgctatcagtgtcggaaaagtcgccgaagtagctgc

SEQ ID NO: 158949 - DNA, 559 bp, Cannabis sativa
taataggtgaaccaatcaagtaagctcgaaatttgtcaagagccaagacaacagcaagcaactctttttcagtagtagaatagatcatttgagcactattaagtgttcaacttgcataatagacaacaaaaggtttcccctcccttcgttgtcccaaaacagctccaatagtaaaattacttgcatcacacatgatttcaaaaggcaaattccaatcaggtgattgtatgataggagtggacattaattttgcaacaagtgttcggaatgcatctacacacttttgcatccactcaaaagtagcatctttggctacgaggttaaaccgtagacaagaaatcattgaaaagtttttgatgaacctcctataaaaaccagcatgcccaagaaaagatctaacatctttgacagtctttggagtgggagtgggaaaattaaaattgagatcaattttagactgatcaacctcaattcctctttcggagacaatgtgtcccaagactatgcctgaagataccatgaaatggcatttctcccaattgagtacaagacctttctc

SEQ ID NO: 158950 - DNA, 930 bp, Cannabis sativa
  modified_base (42)..(56): a, c, t, g, unknown or other
  modified_base (371)..(384): a, c, t, g, unknown or other
  modified_base (449)..(458): a, c, t, g, unknown or other
  modified_base (526)..(541): a, c, t, g, unknown or other
  modified_base (811)..(814): a, c, t, g, unknown or other
  modified_base (890)..(903): a, c, t, g, unknown or other
atgaattttcactaagctagggattaattgtgaagaaaagannnnnnnnnnnnnnnttgttaattaagagactttattaattctaattaataaatatagtaactgacaattttattggataattaattttaattattaaatagatagttttgacatttaagagtttgaataagaaaatatgacatttgtgaaagaataggataaatacttgagtaaaatggaaaaattgtaattggtgacccacatcctaatggccggccacttaagctcaacttagccatttacttatcaatttttaatgcctaataattcaaacttaaacctagaaggatgttggaatatgtttcaccaggatctagatttactaacannnnnnnnnnnnnnacatcctaatatgaatttctaaaagaatgaaattaaacaaatataaagtttcagaaaaccttacnnnnnnnnnngcggaatataatgtctccttccgcgcagaactctaatccttgcatcctgtttgtcgtagagtatcacnnnnnnnnnnnnnnnnatgtccttctcttgattctggatttttcacaatcttccacactatgattgagatacaacttgatgtgtgtgggtactcactttatcactcaagggcttcggtttagaggagaggaagagagagagagaaggtggcggctagggtataggaagaaggctttgagtttttctctgaaggaatgagatgcatcatcttttttctttaagccatcactacctatttatagtaaaccacctagggttaggtttgatttatttggcattaaaatannnnaaaaataaatggtaaattgcactataagttgccgaccatgtatggataatgtgccccactttgcaattttgccatnnnnnnnnnnnnnnatctcattttctcaaaaacgccacttt

SEQ ID NO: 158951 - DNA, 787 bp, Cannabis sativa
gtcggccactatgtggtttattttgctattatttaatctttcttattccatataatttaaaccctaaccctaggtaaaatagtacaaaaggaataggatgctctcattctcatccaacctattaacctagtatacattctttatcagacaactagattttttgagagcctcatttcttgctattttcaaaattgcttctctttctcttcataatttttaagcctatagtgatagagtacatgcccactcatatcaagttaagtactcaataatagtatggaagactgtgaagaatctaacacctgaatgagaatcaagctgagatcttgttaatacactacgacagaaaggaacaaggttagagatctgagtggaaagagacatattattctgctgccaccaatgtaagattttcttaactttatatttgtttatttttattgttttaggaattcatgtttagggtgttagattatagaatataatcaacatacttgttagtaaatctagatcctggtaaaatatgttccaacacttcctagctctcgtctgcttgtagtagcttttatcgagcaaccttgtcttgccaagtgtttgttttttgcgtggcatgcttttagatctttgattttctctctccatatatgccacatcttctcttctttgaaatctcttctttgaacatgccattgttaagttttaagatttaagaaactttttgattctcacgttagattgtaatctttttggtatgttgatccatatgacagttttagaatgtataatg

SEQ ID NO: 158952 - DNA, 563 bp, Cannabis sativa
  modified_base (334)..(334): a, c, t, g, unknown or other
cttaatttcttacagctctttaaactttcattattttattggttcccgaaaacctcggtcaacattttggtgctttcattgagagcctgaagaaagctttagtaaacacacaccacgttacaacaatggtggagactcgaagcactcgtcaaccttgccctcttgaagatgctcaagacctgaatgaggaagacgtagcctcaagagcagctgagggttccgaggaagaagaaggaattcctaatgatgattacgagggaaacctcgatgagtacgcctacgatgatggtagctactcggaattggtgctcttaagacaaaaggctgtcgatcntgaagctgagatcgcagcccaaaaggcacaaaatcaaaagatgcaagaggtaatgctggccatgcaaaaagccatggaggcagctagaatccacgtgcatcccaaagccatgtcagccagacttggaaagtaaccagaggaatcctcgccaagtacccaaaggcaaaaatctagggaaccaagccctataaggtatcccgctgaagggaaccaaaagaaaaaccctcct

SEQ ID NO: 158953 - DNA, 689 bp, Cannabis sativa
caacaagagaaaagagttaagtgttagaatatctgtgaaagcagtaaacacttaaaaagcaatcaagctagtcctaccctgactctctaattcggccccatcaacgttccgaatcttaacactggctgcatcatccccgagatagatgtctaagggacggaaccagctagaagaaagataggccgaaggatccaagggaacgggcaccggaggtccagaacccatccgggaccgacctaaataatctcttaagttggagaaataatactcctttgcatgatcccccccaccgggtagagggcatcctaaacctaaggagacgttcatcaaaccctacaggcctaaggctagcatattcgcgaacaggagggacgtaatgtattgttaaagaggacttaccagagccggaagtgctggcatcaggagcccccgtattcggcacctggacggtaggccttggtctgggggccctcttctcaaccgggctcccaatgcgaaggggcctcccagcatccgcctgggccttagtataagccttctcctgggccttccggtagaggtactctcggtacttatcttctgtggtggcaatgatctcctcccgaaaggtcttctccgcggccggaacccttacgttcgggcagataaccttagaaaggttggaatcctccaccgactgatgccctagg

SEQ ID NO: 158954 - DNA, 634 bp, Cannabis sativa
attcaattggattggatcagatgaaaaaaattcaatatctaataaataattggattggattggatgagtccaaatccattggatgtgatccaatgaacacccctaatttactacatgtaaaaaagttatatttttaacactaatttacctcctcaagtttgttccaataaaaaaataaaaaaaaaatcgttaagtacaattttttttttttttaagatttcttaatttcatgatccaactacgtgagagatgtttttactagaatcatttttttttttgtttagatgaaaggttcaaatttcactacaacatttattgtgaagaattataattggtttcttaagagatttgctcgttgtaattgaagagttgattttttctataagaaaaaaaaaagtgtagaatatattgtcatataattctcaaagcaagtatatatgtttctcgtacattacatatatgtaaataaaaatttgattatcatatatttagaataatcataaaaaaaataaattaatagaagaatgtcatgtcacttatattgagatgaaaaaaaacgggttaatttcacaaatgcacaaaaataataaaaaaaaaaaacaacaaaaatacagttttacggaattttaaatat

SEQ ID NO: 158955 - DNA, 558 bp, Cannabis sativa
  modified_base (304)..(306): a, c, t, g, unknown or other
ttctctcactttcttacagctcaatagtattataatattttgttagttgccgaaaacctcggtcaacattgtatattaaaaattaccgtggaaatatattttttcaccttataagattgattttttttgcttaaaataatttagttgttcatcaataataattttaagatttgttcaagatgagataattaccttaaacaccccaaacataacaagaagtatataaatcaaggatttttgaagcactaattagagttataaacgttaaaacataaatggttaaaaatagctagtaatatgaatnnntatagtatgactcttgtgtggaggcaggcgggtccgggaaatacgcattggagtggtcattaaatgagtcagatcttgcttgattgtttgcagattgttgcccctgagatccagtattttgttgacggtttgggccccttgagatccagtattcttttgacggtttgggcaccgtcgataatcatggtctgatgagcgacaaatgcgacagagtctttagtttcttgggatttgctccccgtttggtccttc

SEQ ID NO: 158956 - DNA, 907 bp, Cannabis sativa
  modified_base (60)..(65): a, c, t, g, unknown or other
tccatgaagcagccaaagtggcgtactcgtgtataagagtcattcattccgtgggtgtannnnnncaatggaggcttaaagcggggacgctacattacataaataagtccatttacaccaatgaatgcacttgttgtgatctgaggatccccaataaaagcgagcaaccatacggtgcaagctattgatagtactcttagtgattttaaaacaaatcatcgtatatgttggcattgcttgaaggatagctttgataagaacctcttttccggccattgaaaacatagatactttccagcctttcactttttgccatactttattcttaatcatttcaaacaattcctttttattttttccaatgaaacacgacaattccagatccttccataattatccactacctggacccccattagagaagcaagtctcacacgatcactctcaattactggggctctaaagcacatctctgacttacggaaattgataatttggctggacgcagtagaatacatttttagtaactgtttaaaacattggcattcttcctctgtagcttcaaaaaaatacaaggctgtcatccacgaagaatagatgggatacttgtaataccccacgaccaaacaccaacccccgaagacgattttctctttcaactttatagatcaaacttgaaaaagcctttgcacaaaataagaacagaaacggagataacagattgttgagattttatgccctaaataaaaacccatttcaatacaatccgatctattatcaatagaagattagaagtcatttatgtttgcatgttgttttcctgtttttagtttaatgtgtacaatttctgttaagtccagaatatatagttattcacaattacagtgatgtcaacacagtggaaggt

SEQ ID NO: 158957 - DNA, 581 bp, Cannabis sativa
aggcatcctaaacctacggagacgttcgtcgaaccctatatgcctaaggctggtatactcacggacggaaggaacataatgtattgtaaaaggggacttaccgaaacccgaagtgctggcatcaggagcccccgtattcggtactgggaccacgggcttgggtttgggggttctccgctccgccggagctccaatacgaagggtccttccggcgatcgcctgggccttaatgtaagccagctcctgttccctcttgaagaggtacttctggtacttgtcctctgccatggcgatgatttcaccctggagcaccttctctgcggccggagctctcacgttcaggcagatgactttggaaagattgtagtcatccaccgactggtgccccaggatcagcttggccttccgacagtgctttgtcgtgactaactccccgacatcaagggccttcttatcgtacatggcgaaggtcttggcctgttgaagaaatattggagtaggttcggtccacatataagggggatcctcacccactccgtgagaagctccggatggtccatggcctggaaaccggaggagaa

SEQ ID NO: 158958 - DNA, 764 bp, Cannabis sativa
tattttttaggtatattaaatagtggtagtgtaaatattgtgtgtcagtatattttataagtaaaacatagttgtatctataaatttatgatttgtacattgttattaataataaaaagtacgttaatcttaatatatacgtactcatatagtagttatcttgacatgaaacttttgtatttttttttaggaagcatggttctcccccttaagcaactcaattgatcatatgctatctatatgattaataacaaagttaaaagtattcctacaaaattaattattatttttcaattagggctatttgccaaaccccataacatttgaggagagaggaactacaatatctgtgcaggtaccactcaatctcagaccttgtgggagcataccataggccagatcgtttaaacttacccctctagattacaaaaattataatattagaataagcataacttgagcagtcagaatgtactttgtaagatttaaaagtggaggttcatcaggatatttttctgtatgcaaaaaaatcaaacctagctgaactgcaacagaatattttaaaaccacaaggttaaagaaagtgtaataattcaagattaaaagaaaagtgcaaagtttaattttgtaagtaataacttagagaagattcaaattctgcttcatcatcttgttgaaatagagtaaagaaatatttacatataagaatacttattttcatgtcattataagtcatattatggaaagggccgcaattaaatggg

SEQ ID NO: 158959 - DNA, 554 bp, Cannabis sativa
atccactcatcatttatttgactctgtaggaacctccattcgttcgccaccctttcattttcaaaatgtttaaaagcttatatatattcttgcatttcttgagtaatttcgtcactaggttcctgtttgatcttttcggcatatagaagtttgtgtttgttctctttattagacatatagaacttataagacaagaacactctatggttaaagaataagaaaatatgtaacttatgaagatgaaatttacttttatatatagagcagaatagttgttaggaatgcaagaaaaattaattagcattaaatgtgtaattgtacacatgtatggcatgcaatgtgtatttatcgatataatgtcgatatattatcgatagtttgtcgataataggagaaaattgaggccacactttatcgatattatatcgatgatatatcgacagcttgtcgattacctcgacagataaaacagaagttggaaaggtgggaaaaattagtagtatatgtccagttgtacacgtgtatgacatgcaatgtgcatttatcgatagaat

SEQ ID NO: 158960 - DNA, 536 bp, Cannabis sativa
ccctcaaggacacactattggtcggccaaccccatgcaacatcactatggctggccagcctgcaaaaatgccaaaaaaatgagcaaagttaagtgtgcaactcaccacagataaatcctaaaggctagcagagtagagcctgcctggctcactctcgtgaagctcttgaagctcatcatccatggaaggaaggactctctctaggtgcctgtgagctgcctccatggctctctaccactgcgactgagcctactccccaactgagcttcggggcacccctgcccgaaggccgttccctcctagccggaggatcatcaatcatgggctgcccagctggtgaaagccttggaggaggaggaggaggaggaagagattatctagcaacatctctaccgcgggtggtctgagccaccttggccctcggacgacccgaaggctcatcaagaggtccaccagcaagacctttcaacctggaagacatatgtgctaaaagaaagtagcaaagtcagaaggaaggtcacaaatcttcaatgcat

SEQ ID NO: 158961 - DNA, 915 bp, Cannabis sativa
aaggaacttgtctttagccttctgaaagtccaactccacattacccaacctagcatgattaaaagactttaaaacatgcttcagccgagccaacttagaccaaatccccagtaaaccagcagagaaaatcggtttatgccagctatccataaccagattcttgaaatcacaatgctctgtccaatagttgaagaatctaaacggctttactcctatctccaccataacagccgaagaaacaactatagcacaatgatccgagacctcttcccaactgaacgaagctgaagaattaggaaataagtccatccaatcctcattcttaaaagcatgatcaattctcgaatatattctatccttactcccttgattattagaccaagtaaagaaagaaccctgccttttcaaagtatccaccaaacccaaactaagccaaccattaaaatcttcaatctcagaccttgaaactggcttaccaccaactctatccccataattaattaaggaattaaagtcacctaaaaggatccaaggcttgaccgggaatctcagagtagctaggcccttccataacaccttcctctcatctaaaccattcatcccatacacaaatgtaacacaaaatgcctccgtatgactagccaacttcacatagcaatggacaaattggctagtttctgcaataactatcactctagcaaacgtcttcttccaaattattaacaatcttccttctattgttgggctattatagctctcccaaccacaaaaggttttagacatcatatcttgaaccttctcacttttcatcttagtctcaaccaaagctccaaccccaatttccttttttttacaaactttaagcacggcctcttgtttcttctctttattgaggcctctaacattccaacacat

SEQ ID NO: 158962 - DNA, 760 bp, Cannabis sativa
  modified_base (513)..(513): a, c, t, g, unknown or other
  modified_base (699)..(704): a, c, t, g, unknown or other
tcaataccgtcaccaacgaccttattgatttcaccatctaagccataacgagctggttttgtggaaaccctcccactatgacgagcagccgtgaccttttaaataggaacatttgtggtagatttcttagttgtaacaacttgcgttggttcaaccaagggagtgggattatcctctacttgagtagaagacgatggaacattagatggagttatttttgaaagcattttctctaacactactttattttgcaacttgaagttctttatatagtcatgttcaaggaaagtggtgcttgtagaaagaaacactttattatccttgcaactataaaatagtccacccctagtctccttagacttttcaacaaacatgcaaacttcagttcgcgcttctagttttccttctttctttcttaagacaggagcagggcacccccagattctataatagcgtaaactaggtatacgaccattctatagttctacgggtgtcttagggactgatttaganggaacaacatttaaaatgtcattggccatctaaatagcatatccccaaaaggacgttgacagggttatataactcagcatagacctaaccatttccaaaagtgtgcgatttcttctttctctaactccattttgatgtggagagccaggggcagtatattgcgattcaattccaagttcaattaannnnnntttgaactgcatatccatatactctccacccttattagtttgcaagatctttaatg

SEQ ID NO: 158963 - DNA, 506 bp, Cannabis sativa
aatttgaaatgatcttattttgacattaaaatattaataaaactaaaagataatccacttaaaatttcaaatttgctaatcatatcaaatttttaaaatttgttattttaaaatattttttattaaattaaattatatgattataaaaatgttagtcttcacattttatcttattggatatttattttaattaaaaatatattattttggaaataacatgaaattttgaaaagtggttaattttggcttgaatagatattttagggttttccaaccataaaattttcaaaattaggatattttattttatttatttttattaaataaaattgataatatcctaaccttcaaaatatcatattttcaattttgtttattttgttaaatttattttattaaattgtaagattaaaaatataatatcagaattatctcaattttcaaattaagatattctattatattatcttattagatatttaactaatttaaattatttaaataaa

SEQ ID NO: 158964 - DNA, 560 bp, Cannabis sativa
  modified_base (219)..(220): a, c, t, g, unknown or other
aatcccacttattatctaattaacccatcatataaatataaatccaaattatttaccattagacttatcaggatattacattaaactttttcgagtttcttaaaattttagcaggatgttttaaataactataatttagatgaccatgagaaaaaatgactaaaaaattattttttaatactaaaacaaatagagatgtatcggtgtatcccttttaanngggtgcattatagaatttccctattttattttgtttagaaaataaattatgctatatttattttagggtgattctacaatgcaaccccttaaaatggatgtattatgtcaccctctacttgttttaggcatccagaaaacttttttagtctaatttttttaatattcatgtacgttatagctatttaagatatcctacaaaattttaagaaattcgaaataatttaccatatagaaaataatgttcaaacaatacattttgcacgcgtataaaataaaatagtcacgcgtgcaacatactacttgtacgcaattttcagcgtgttaaacttttccgaatt

SEQ ID NO: 158965 - DNA, 886 bp, Cannabis sativa
aaaacataaaaaaaaaaaaagacagctgatagctgacgcaagtaaaaagggaatgtcaaatgttttttcggtaaataaaatagttagagttatttatttttgaatttctttctaatattgcgtataaaattaaaacttcccctttatggtatcctttcatatttttggcatccagattttattttttttatatgaaaatgtatgtatcagtaattaagacgtacgtgttacaaattttttaaaaaaaaaactcaaaataatttaacatataaaaacaagatctaaaagtaattgattaatttaaccgaattagtttaaactgttaattttaatgaaaaaattaaaaaaaaaaccgttaatcaataattttctttaaataactatatttaatataaaaagatatactttttaattttaatatatatggtatcatgtgttaaataatgtatgcatataatttagttatatttagttatatattttttatttttattttgtttttatatatatttttagttatataattaattttttattttatttaataaacaacattatttttattaatataatattaatttaagtactatttatatataaatttattattaattataattttaattgaaccgtaatattcttaattttatattacttttcattatttttttaaaaaattattaatcatacattttttattattttttcaaaagatttttttttgtaagtacaatcatacatttatagaaaaacatattttagatatatgtaatctttattaaaaatatttgaaaaaataaaaagcttgttatatagttacatttaatataacatacctgaatatcgtccgagttgttggtctggacagcaacttcccaaacggggt

SEQ ID NO: 158966 - DNA, 599 bp, Cannabis sativa
acccaagacccagaccctgaccgagacttgggacttgggactcgggacccagatccggacccggacccgatcttggaccgagacccaggaccggaccaaggacccaagaccaggaccgaacccgggacccgagaccaggaccgggacgtggacctaggacccgggatcgggacctggatccgaaacccgggactcaggacccgacccgaacctgggacgcggacccagacccggaccaggacccaagaccgagatcgggacccgggaccgagaccgagacccgagacccagaccgagacccgaactcggaccctgacccgggactcggacccggacccaaacctgagacccatgaccaggaccctgacccggacccagactcaaaaccctgactcggacccaaactcagacccgaacccaaacttggacctggacccgactcgttgttggtgttggggtagagtttattaaaaatatataatctttacacaatttattgatacatgtcaataccaacacatagtattgtatttaataatactagtacaaaattaaaatggatataaaattataagttaatattaaaattcttaaaaaaa

SEQ ID NO: 158967 - DNA, 857 bp, Cannabis sativa
atgactcaatttaattggattggatcggatggaaatatccaatatccaataaataattaaattggatcagacagatccaaatccattggatgtgatccaatgaacacccctaccacccaggattgaccagttagtggatgccatcaccaacaaagcctaagtaaaagccttaacaggaaggatggttgcactcaacagattcgttttaaaatcaactgatcagtgttttccattcttgaatgtattgcgaggaattaagaaatttgagtggacggaagagtgtgaagaggcttttcaaaacataaaaagccatctagcgatgcctccacttttggcaaaactaataacttgagaaattttactcctctatctggctatctcagaatatgcgattagtgcggctatagtgcgagaagagggtaagcacaacaacccatttactatgtaagtaaaaggttactaggggcagagtcaagatatccccctctcaaaaaactcgctttgtgcctagtccatgcgtctcgcaagctacgaccttacttccaggcacaccccataaaagtgttaaccgattagcccttgagagaagttttatcaaaactagatgcttttggaagattgataaaatgatcaattgaactggggcagtttgacataacataccaccctcgaacatccatcaaaggcaaagccttagcagacttcttaatagaaagtataactcctgaagaaattccacttattccccgagatgcggacacttgaaagttatacatcgatggtgcatccaacgagcagggctcgggtgcaggggtaatattaatttcaccagaaggctttaagtttcattatgcttt

SEQ ID NO: 158968 - DNA, 649 bp, Cannabis sativa
tttttttttacttttttttttctctttttctttctttttcttcactctctatgtttctttgttacttttttttaattttctctctttttatcttaaactaatttttttttatctttctatatatataaatatataatacgtgtatatttttatatctttttttaacactctttctctctcttaccaaaaaaaaaaataggagcattcctcctgtatttttttatcttttacataattaataaaagtagtatatttttttttggatgttttatagtttattcagagttaatttatgaatgatttgcatcttataacaagattgatatcttgttatttttctgttgatttctaattatcttttttgttattttatatttatttttatgttgttattcaagtgtgtttacgagattttcagcaactaaatatttttagatcttaagaaagtaataataatatagatagtagaataacgaatacaagatttttacgtggttcaggcattaacaatccttagtccacgagtccattttattagactgatcggctaataactgtttacacaagtaaatatacaataaactgaaaaaccttttctcccgtgttccccttgaagaagaggaagcttagtaggaatactctagagtta

SEQ ID NO: 158969 - DNA, 556 bp, Cannabis sativa
  modified_base (93)..(100): a, c, t, g, unknown or other
aatgtaaggttttcttaagcccttatgtgtttatttcattgttttagagaatccatatttaggatgttaattcaatatacttgttagtaaatnnnnnnnntggtaaaatatttccaacaatgtcaaactgtcccagttcaatcgaccattttatcaatcttccaaaagcatctggatttgataaatcttgtctcaagggctgatcggttaacacttttatggggtgagcctggaagtatggccgtagtttgcgagacacatggactaggcataacgcgagtttttctacagggagatacctggattctgcccctagtaaccttttactcccgtagtaaatagtttgctggtgcttaccctcttctcgcactatagctgccctaatcgcatcttttgagatgtctaaataaaaaaataacgtctctccagttatgggtttcgccaaaagtggaggcattgggagatgcctttttatgctctgaaaggcctcttcgcactcttttgtccactcgaactttttgtttcctcgcaatatgttgaagaacgacacacattt

SEQ ID NO: 158970 - DNA, 621 bp, Cannabis sativa
agtatcgtgccccagttgtctcctgggtttcgtgatttgatgtactctagacttattctctaactcactcattcgcaaatggaatgaatccttttgcatgaatttcattctcatgagcctaaatagtaggttagcaatttttgtttgatgctccgcgtaccccagattgtaccctcagactttcctgagtttcctcaggttgcatctcctgagagctctgagcatatctctgggtcatctcctgccccttgacttatgagccgtgaggtttgcctcataaatctcttttctcaaggtcaggttgtttttgggtaccatctcccagcgctgcctttatggcagctatttcacgctccaactcggcattaaggtcagttttccttctccaatcggcaagatggcaattttctaattccacgatcggtatgtatctggttgggtcgtaagggcaatcctcatcaacctgattagggagtgaccgattgttgctcttccaaggttcgtcaagccaggggccccaatgttgggtcttcctggggcttgcattctgttcatgcgatgattcagcagatcccttgggactcaatggttcttttccgggacgatgattgattccttctt

SEQ ID NO: 158971 - DNA, 511 bp, Cannabis sativa
acaaaaaccagttaaataaaatagattaaacaaaaacactcattcaacatgctccaacccaccaaataattacacccataccatatctacctaaaaaatacaaattcattatgtctatataaccgatctattttagttataaccggtttgagttatttcgtgttatttgtttttattaattataacattgttataaaactggttcattataacactgttatagaaccgattctattttaattatatttggtttacgttattttgtgttatttatttttattcactatgttacaaaaccggttatattttaattataaccggtttgtgttattttgtgttatttatttttattatgttaaagaaccggttctatttttattatattcgagatattttccaaccttttttttaaaaaaaaaatataaccggttttatgaagtattatgtgttatgaagtattttattgtaaaactagttttgtttttactttatatttcagtattttaggaat

SEQ ID NO: 158972 - DNA, 660 bp, Cannabis sativa
  modified_base (605)..(606): a, c, t, g, unknown or other
agcttgaatggccattttgattcgttgggagacatgataattcttgagattgtgacgttttcaccgatatttgttccagaaataatgtcagctctaatggacaattttccaaaatgtgtaacaatcaatcttgttccattgcattagccttctgtttaatttagatttttaaggagcattactggaacaccttccttaagtcgaatgtcgtgatttggtatgccattaaatttcagactatgtaaaaattcaggtggatacaaaagatcatcatcacttgtccttacactagctttgcatacagtgtctgagctataatatattctcccttcacctggtataatattcataatcatttcattcaattcatggaccattttattttttgtgttaatattgctctttctttcaaatatgcaggatcgttgtagttttgtaaaagtgataggtagatagctttaactatggatttcactggatcttgagataaattttttcatatatcagaaggaagtttaattaattctatgtcaatgtcatcatatattgaaccatctcatatctgcaacagccatttattaaaagtagctattttagcagcctcnnatccacttaaacttccattatatagcctcatattttggttgagctcatatattt

SEQ ID NO: 158973 - DNA, 531 bp, Cannabis sativa
tatttgggttgtatatttgtttatttggccagctggaagtatttttgtaatattattactttttttggttaaaactggaaaaaaaaaacctatttaaaatctaattgtttaagaaaatgatgtggcaacttatcaaattataaatctaatttctctttgtcatgagttttccaaatttttaagtcttttcttaattttttttcttattaaaagctgcacacgatttattacttattactctttagtttttttttactctacaacaattatatgtgcctcttttcctccctgtgttgcatcttcttccccctctctccatgttggtcattttcttctatattcttcttcatcatcctcttcaccttcttaaaaccttttatgtggcatcttaaatgatctattcttcttaatctttcttctcttttttttttttttttgaaatttttacaccataaatacaaaatgcattctttattactgaaataccctcacacggttattgttacttttttactcatcaagtttatttta

SEQ ID NO: 158974 - DNA, 644 bp, Cannabis sativa
  modified_base (30)..(33): a, c, t, g, unknown or other
tcaaaaactctgcgcagttggccgaagctnnnngaaggattaccgttgaaatattccataatcaactggtcagaacttcctttctctttaatgtcttccttagtagggccgggcaacaagtttaacccggtcacgaagccgaactccaccctgccaaatctaaatctcttccttcacacatagaaatgcacctcgtccggcttgtcagatttgattttgtgaagcatgaactaatgaaaaaatgctcctgaaaattgtataggctctctctcgaaaaattgtttgaaaggggattccctcaccctttcccataggttgaattcttgaaatttagccttaatcttcgggtagtaataactaccgccgcgccatgtgacacggcctgtgtaatggtccgacactagaattattagatgtggagttccctgaaaaagaaaaaacccagaattatcaacaattaataataaaataataaaaaattaaacaataattaataaatcaataaaaaattaaacaattattaataaaacgataaaatattaaaataataattaataaattaataaaacaataaaataataaataataaaacagtaattaataattaataatagaaccataaccaataattaataaaacaataa

SEQ ID NO: 158975 - DNA, 672 bp, Cannabis sativa
tccaccacattagttttcttgcatattttttagcatctttactcttgttttattttattttgtttgtgtgcaaaggcttcatgccttttgactttatatgttggatgttatttttttctgttttgtttttcttgttagatgttattttttcttagttttgttggatgttatgagtttgatatttttttttgcatggtctgtgttactttatttttctctttattttgtgaattccttgccaccctttttgatgaatcaaaagggggagaaaatccatatgattatttctggcacaaactcaactttttttggatatctaatattttcttaagtataaaattgagggggagtttacaaaatcatgcaaggtaaaatttcatttcttgcacacattaaaagggagctaatccaatatacattgtttaaattttttctttcccttttcaaaataataatatatttgatatcataaaaaagggagagttaactcaaacttttaggtctccttattttgatgattaacaaatatttgattattatttggtactaatatgttaattttgtagcaaatttataaaagaaaataaatttttaagacaaattggtatttttaccaaacttcataaagtgacccaaaatggattcaacaagcatatcaagagcaaaagattc

SEQ ID NO: 158976 - DNA, 510 bp, Cannabis sativa
gttttctagattaaagttaaggcttttatatgcctaaactctaatttacaatagaaactctaggatatttgtacattttaatttattaattacaaaagaccgaaattcccttaaacataggtattattcatctattttattaagcttttaaggcccaattcctagcccaaatctttcagtccacgtgtagagttacacaagaaatcttgcaggccttctcttggccggccagacacctgcaaggagtaggttggccggccatggtgtagcccaaagactggccgggcatagggccagccagggatggccaaccagcttctgtgaggaagctggtctattacttgatgttccgtttgagtgtcagggtccccgtttgcttaggtactaacttggcctttttattggtgagttgtactgtcacgtggcataaattttgtccatgtaagcactgccacattaggtgggtaaaaattataataacatttgccccaagtccctgtgtagagatct

SEQ ID NO: 158977 - DNA, 668 bp, Cannabis sativa
cttcaatggaggttgaataaaggtggattcttattgaggtaataattctcaaactctctacacaattataaattggttaattttggattgttggagaactttggaattttagtgtgaatttttgggattgtgttcaatacattgtttgatagagttgcttgtgattaggaattgaattaattgtgattgggttgatacccgggaagaggatttttaagggaaagtgctgccgaaattttcataaattttgagaattagaaattttggtgagatgggtcctaaaagatctagagcgaggtttgtgaatatggaggcccaagagggatttttacaattgaaagatagacccttcattgaagatagagggatagttattggtaacccgagccaaactacaaacatccctgttgtatttgcgcccatcagagaacaaatcctaaatcggcggtggactaagtttgtggatgtcactgagcgcagcaaccaaatcttagctttagaattcctagcaaattggccagaaagggaggatgacaaggtcaaagttagggggttaaagtgcctgtttccatagccgccattcatgttgtttatgacctaccaacctttactgtagaagagcaaccattgagacagcaacttcgagcaaggagcttgaattatgagga

SEQ ID NO: 158978 - DNA, 609 bp, Cannabis sativa
  modified_base (216)..(223): a, c, t, g, unknown or other
ctcacaaccctggcaagtcagaagttaacatttaaatgagtttcgaagaatttattgtacataagaaccgtgatcgacatcaaacatgcattgtcgacctcggaaggaagaatggccccagctcgcaattgacatcactagaaccaagcttctgtcgagacaactccagaaataataattaaagacgtgatttaaaacacgatcattttgacccannnnnnnngagaaaatcacagctacatgattttcaaatcataaaccgcatttttactacgtgatatgtaatcaaatcccatgattttagggatgattgttgtaaacatattacagtcaactttgtaattaacagtccactatgtaattataaatagtggcagacaagatcaaaaatggggcgaaaaaactcatacaaaagaggccttaaaaaacaattagaaatccgaataagattgacttgtggactatgcagaattttaattgcaaaaccatgtaaaaaaccccgtgttcatattttatttctgtagcttttaatttttctgtgtgaaatcactactgtgaggctcaagtttagttaacgaaattctacgttaacagtttggtgctttcatt

SEQ ID NO: 158979 - DNA, 515 bp, Cannabis sativa
aatattttattttaattttagggtttgaaaattgagaaaattcggaaatttggaaaaatcccacaaaaatagggtttttcgggttggctgcccaggaggctgcacgcggccttgagcgcgcgcggaaggagcatactgcagggtcctgcgccaagaaatctcggcatttgcagggttcgtgtgggtggatgcagcgtcagtcgtgtctgaacacacaggcgtgacacagcttcatacaagcgtccgtgtccccatactcgcgcgtcttgtctgagtgcttggtgcacacgagcacccactcgacaccattgaaccccgatttttcaaacttccataactttctcaatttttatcgaaatcgagttccctaaaaaccaaaattgcttaatttttcacaaggaatccaactaaaatagtttaagaacaaaaataaaattattttcatggaaaaaattcgtaaatcgcatacattcatcaaataagcaaataaaccatcatgaaatcatccaaatcaa

SEQ ID NO: 158980 - DNA, 528 bp, Cannabis sativa
  modified_base (29)..(39): a, c, t, g, unknown or other
ttcagggaaaatttttaacggctaaaaannnnnnnnnnncataatttggtacatgtcgaaattcgggagaaaaaacatcataattattattaacatgaaaaaaaattatttttacactataattttttatttatataaatatattttcaatgaaaataataaattatttttttgttattttatagttattatgatatttaatttataattattgtgaggttaatttctagttaaattttcttaccttttgttaaataaaatgtattttataattttaaaacttcaaaatatatttttaaaaataaaaattttaagtttaaaattatattggagaagattgtcctacatagattaaatgtaaaagtattgagccatatataagaataatgaactactccactcattactaattggtatcgagatggaacccgatgattctcaacatggtatcagagtcatatccttagcgggctttcgatctacacctatctagatagttagccagttacacgagatccagctggtgca

SEQ ID NO: 158981 - DNA, 609 bp, Cannabis sativa
ttcagatggctctctagccattgaatctgctttgatcttgtctacccttgaatactactttgctcagttgtttacctgtcagaatcctggcaatgacattattgatagaattttagtcgagatcactgagcatattacaaaggttgaaactgctagccttcaagctttgtatactgggagtgagattctaaaggctgccttctaattgcccaatgacaaagcacctggaatagatggtttcaacggtgcctttttgttggttttatggtactaaattagttacggaacggaagaatttcgtattatctgattattattgtaccatagcccttaggatctccagatgtgtatattaaatcaaaacaataaaaacaataagtttagagtatacttcttgaagcctatcaaggtatcctcgacacttctcgtaagttgtatcccttaatccaattgatgaagaatatgcaatttagactcacaccagtgtcttcaaacacttgtaattttcgtttcatttgactacgtgtcattgactaaaaacgaggtcaacaaataacatggatgactgaaaacatgttatacaataagcgaaatccaatctttccaaaa

SEQ ID NO: 158982 - DNA, 502 bp, Cannabis sativa
cctggagcgtacgattctcgggacatcagggcttctgttgtttagtcgctaggcgacaaatcttttgtaaatggatagcaaacttttgtaatcgtattttgtaaacgggaccccagaatattataagtataatatgttatgttttaattaaaaggtaaaattttaattattcatgtttttctaataacctcgttgattagcaacgagctgcacagtatgttaaaaatcacgttaacacgcctttgctagttagggtgttacaatagctggaggggaagtcacgccatggcccacaataggtggctgtgtattggcctgtttgggattggtccctggtggtcctctcgtattcccagggttttgtacgttaggatctgtcaccattggatctctttgatcgaccaggactctttgagtttgcaccaccattctgtacgcctgttaagacttaagacaaacaacaaacttgggtttttgcttttaatgaaagcaccaaaatatt

SEQ ID NO: 158983 - DNA, 631 bp, Cannabis sativa
  modified_base (235)..(235): a, c, t, g, unknown or other
atcacctattgaaatggaataaaacatatatttcgttatttacggggaactactgatttaggtctatttttccccaaaagctcaaaccaagaattagttgggtttgtagatgcaggctatttatcagatccacataaagctagatctcaaattggatacgtgttcacatatggaggcactgcaatatcacggtgttctcaaaagtaaactcttgttgctacatcttcaaatcatnctgaggttatcgcactacatgaagccagtcaagaatgtgtatggttgagattagtaacacaacatattcaagaaagttgtggtcttttaacccataaagatccgaccatactatatgaagataatgatgcatgtgttgctcaaataaaagaagtttgcatcaaaagtgatagaaccaaacacattcctcctaaatttttctcttttacgcaagaacttgagaaaataaatgatctaaatatacaatacattagatccagtgagaatctatcaaatcttttcacaaagtcacttcctactacaatcttaaaaaattgagacatggtattggaatctgtcatctataaaatctatgagaagtaaccggtaatgttattgtgagggggagtttattcaa

SEQ ID NO: 158984 - DNA, 726 bp, Cannabis sativa
  modified_base (668)..(672): a, c, t, g, unknown or other
cagcataccaggttccctaatcttgatagcgtgttccattggtgcttgctcggtcggtggagctttcttcttcttcttgctcggcttctcctgctctgaatattcttgagcatacttctcctgctctgaatatacttgagcatactattcggctccatcgcctcccttcaacttagccccacacttgagttgaataagctctttctcctactcggcatcatcagctcgctttggcttggccttcttcttcttctccttcacgggttttggcacaaaatcatttgggaagagcttgtacttcacaaactttgcctcagtggtcaacaaagtgattttgagcatcctctgacagttgaagaatcttttgtgccctctccctgagtcccaatgtgaaaagagggcggcagtacgagggaatctgctggaactgagtgtgggaagtatccaagcccaacacgaagtagtaagcgtccccaaaatgccctactttgttgacttcagggtccacagtacccttcaggcattttttgtcagctgggagaagtagaagtaccccgacctgcttttcttgggagttgacttcaggtcgaaaagccagttggtatcgtacagagatggctcgccccatcctttggaagcatagaggatgaacagggtggataaatatnnnnngccctttggtgtgaactgggtcgggcagagatggtaatagtccgcaatcctctt

SEQ ID NO: 158985 - DNA, 723 bp, Cannabis sativa
  modified_base (678)..(678): a, c, t, g, unknown or other
cagtataaaagttaagttgagcgtgtaacagtataaacgaaataaattgggaaaaaacagtaatgtgtgtaaatttcccttaataaaagctgttcattttagtaaaaattacccaaaatatgagaaaattttaagagtttacttttttatggcataaataaataaagttaagtcgttatggctttttttgtttttttttttttacatttatatgggtttttttatgccatatttttcaaaaaaaaagtagaaattccatatttgtaaaagaacaataagttttgccagaaaagtcgccagcacaggaaaaagtcaccggcaccgaaaaggtggccggaaaagtcgtcggaaaagtcaccagaaaagtcaccgaaaaatcatcgtggccagaaagtcaacgaaaaagtcaacgtcgccggaaaagtcaacgtcgctggaaaagtcaccaaagtaaatgtctcatatataactaaacatatagccggttatatgaataaaaactaaaaactgaaaccggttataattgaaatataaccggttctgtaacagaataaataaatataaataacataaactaactcaaaccaataataattagaatagaaccggttctataacatcgttataatgaataaaaacaaataacgcgaaagaactcaaaccggttataactaaaanagaaccggttatataacataatgactacaaacaagtaacacgcaa

SEQ ID NO: 158986 - DNA, 525 bp, Cannabis sativa
ttggtaatgaagtaagattacgatattacttagggtaattagtgaggatttattaaatgattatataaagcgtaattgattaattacggaggttatattgggatatgtgggtatcaaggataccatttttgaaataaaaataattttttcgggcccaatgattgtggaatttaatgacgtggtcagaaaagtcacgacattaatgggagaattattttgacgatattccggactaggttagaatttttagaatgtcagtttaattgattagtaaaattaccaaaatgcccctaggttattttaaaagttgttggaggtgtagattagtcttttattaattgttggatttttgcccttttgacttttagggctgtctattataaataaaaagaaagaaaaaaaaaagaaattaagatatatataaactcataactatgaaataagtaaccaaaacactccattcttctcctctccttcgtgcaaaccaaccagccagcaagagaggctctcctcaccattttcttt

SEQ ID NO: 158987 - DNA, 568 bp, Cannabis sativa
  modified_base (515)..(518): a, c, t, g, unknown or other
actgagcttaatgaaactcgggaaaatatttacctcgcacatgagcagaagcggcaaacccgagtctatgaggaacaaaagagatcgtaacaaatattgtaatttccataaagatattgggcatacgaccgacgaatattgccaattgaaagatgagatagagagtcttatcgctcgtggtcattttaaacagtatgtgaaaagacagggccagggatacaaccagcccagtcagcctaataacccaaacaatcgggggttacaacctattcctgtggaaggagagtacatcctggttattttgggagggccgcatatcgcaggggaaagcaataatactcagaaaagatatgtgaaggagataaagaacgagcagtcgatctttaccccaaaaccttccaagaaggtgaaaaccaaggaatcccccattacattcacataggaagacaagaagaacgtgagagatcctcacgtctatatgctggtcataaccattcaacttgccaataagaggnnnnaagagagtgttaatagacaatgggagctcgataaatatcatttataagga

SEQ ID NO: 158988 - DNA, 570 bp, Cannabis sativa
ttattaaattatttatatatatatacgttttcatcataactaatataatatatgtgtgtgaagattttttttttactttgcataatataagaagtgtatttatttaatagaagaaatatattatgaatcaaacattatgaattgaacaacaaaaaaagcaagtgtgaaattatgtagaagaaacacgtgtgagataatgaatcaaattttttcataatgcattatttttatatctcggtcatataaagttgatatcatcattgtagttcctattgatatatatcctcaaatttctaaacttaacacccaatttaacgttttgttagttgatcaataaagtgccacatgtaaatatagtattgatcaaactaataattcttttaaaaaaataatttaaaaaaaaaacaaaaaattaattaaaaaaattcatattattcaaaaaagaaaaaaaaatatattatatatatatattaaatggaataaaaattaattatttattattttctatcttcttccagccatgttatttttacagattaacaatagattttttttgtaaggagattaaca

SEQ ID NO: 158989 - DNA, 599 bp, Cannabis sativa
  modified_base (49)..(60): a, c, t, g, unknown or other
aaatatagtatttaactacaagttgtaactaatttagttttagtcacannnnnnnnnnnnactaaaaatacatttaatcacaacataaaaatgatgatctataattaattataacctttttacttttagtcataagttttgttttgactaaaagtaagattttttggtagtagatgtcacgcagcaaagaaacaaacaatgttgtggatatgttttttcttaaatacaaaataacttaggaacataatttaataaacagttataatgagcttttatttttttttattttttttttggagaatttttataaatactattttttttatgtttatttacaattttacggtctaaagtttttattacaaaaatatacttacaaagttttaaaattacaaaaatacacattggtcagtaaaaaataaaaaaaataaataaaacaacgagaaaccaacctcacgataactataaatcaactataaataaaactataaaacaattagaaacaattagaaaaataacttcatgacaactataaataaactatataaaaaaactaaaaaatttaacaaagaagtatatttttgtaaataaaaaaaaaa

SEQ ID NO: 158990 - DNA, 541 bp, Cannabis sativa
ggcatgcttacatggaaaaaatcaccaccacatggtagtacagttgaccaataagaaggccaagtcaacacctaagcaaccagagatcctggtgttatacctgaaattcggctgtactttagagagtgacatgtgtcaatcttatggaatatgaaccaacagatataatgataagtatatcattaaatgcaaaatagaataactcattaactatagaattaataaagtatattcatcattcgttgactatatagtcttaggcgagacaaggatacacaaactatcaattcgtgtattgacgagaaatcatcttacctcagaaggcataatcccaagggagctacggacgttgcgtagcgagacatctaccttgctacatgtaagaaggtattgacgaggcgaatcgactgttgaaatgcttagcatataatttacgttataataactaagtgtaacaactgggaaacatggacaacatgattgtctaatctgcaaggccttatggtcaaagagcagttcttaagtttgctcagtacactgg

SEQ ID NO: 158991 - DNA, 615 bp, Cannabis sativa
gaagacatcaaggtggttcgagaatttttagatgtttttcctgatgaacttccaagtttaccaccgcaaagaaaaattgattttattattaatttggcaccttaagaagaactggtttctaaagccccttacagaatggctccgacagaacttaaagaattaaaaattcagcttcaagggttgcttgacctagggttttcatggcctattgtatcaccctggggagctcctgtgctatttttcaagaagaaagatggatctttgcatttgtgtattgactatcgggaattgagtaaattgacagtcaagaacaagtatcccttacctaggatcgatgatcttttcgatcagctttaggggaagacaatcttttcaaagattgatctctgatcggggttatcattagttgagaatctgagaggaggacatcccaaagatagttttccgcactaggtatgggcattatgaatttctggttatatctattgtactaaccaatactcccgcagcttttatgcacatgatgaatagggtatttaatgatttcctcaatatttgtgttattatatttatcaacgacatccttgtgtactgtcaatcagaagaggagcatga

SEQ ID NO: 158992 - DNA, 522 bp, Cannabis sativa
actgtcacctcatggttgatctagcttttctttgcctttacctgcaccatatagcacccgtgagtcacaaggactcagcaagaaaagtaataataacaatcacatagtttgttattcgcacattatcatttatacacaataagacttaaacaatcacccattgttcataagatgaaatccaaatcactactggcatttgccacgaataaacatcagtatacagatatttggtaatacaaaattattataccaataatagaattcatattcatttatttatatacattatatatatgttacctcataaagtgaccatcttcataacatcacgttggctaatcaggtaagttgatgctttaatctgataattctgtattgcattgcctaatcaggcaagcccgtgccatagcccagcatccacatgtcgcataactgcatcacctaattaggtgagcctgtgccaaaaacctacacacatatatcatataattgcatcacctaatcaggtgagcctgtgtcata

SEQ ID NO: 158993 - DNA, 593 bp, Cannabis sativa
  modified_base (347)..(347): a, c, t, g, unknown or other
catacttatataattacatatataactttcaatttcctacagttactaatgattttgttgtggtgtggtgatctttattgctagtccaaagcagggaatgactaaaaaataggctactgcaatatggtgtgaagcagatttgtgtgctgaagcaataagtcctagttgttacagcattgcatcagcatcgcttcagtattttgaagcagggactctagtggggaagagtctgaatcttgagggagtatctctttctccttagttagttaatctagtttaaatgttattgtgcttgtgtgtgctgaaataagtgtgttagtttaagtgttgctactatttgtgtttgntactttgtgagtctacttttgttgttgactttagtattatgtgtaataaacattgtgtagattagatgtgtattaatctgttattttgtcatgtttgttatattctgttttagcttgcaaataaggaaaatagtgcttgtatttttggctcggtttagggtagcgctcgatgacgaaaaatatcaattttcctccatttgtggagtgccttggtttgtgtgttgaaaatgctaattttaagtgtta

SEQ ID NO: 158994 - DNA, 507 bp, Cannabis sativa
ctaagccaattaactctagccctttgacgccaataaatctcttctttatataagagagcatcaagttgagattgaacatgtttaatataagaaattacatccctatctctatgatgagaagactgaagtctctcaatatcctgctgaagataagaaatacgaagcttaaagtcttgtctaatggacttgccccaagaagtaagagaatcaatagaagctctttgggaatgaaggaacctaggataagcacctaatgttgaatcattatgagaccaagcactgttaagggtggtatagaaatccggattttcaagccaaatattttcaaagtgaaatcgcttaggaatatgaagattacagtttgatacattttgattaaccataattttcagagctctatgatcagaaccataataaggtaaatgataaagaacagccgaaggaaatgaattaagccaagaatcagaaccaattgcccaatccagtctttcaaaaatagtattatta

SEQ ID NO: 158995 - DNA, 544 bp, Cannabis sativa
tcaaccctctcccaccaccatctttaaaccccatcttcaaccatgataatggtactgctacgcccaaagtaaaagacactttctttctttgatccttctttactacccaaacaaaaataaaagacccaaactttaaatttttaaacgacccaaaaaaaaaattgagggggggtttttattttcgccataaaaggattagaagctcttcttaatcttatatgggttgtgatttttgtattgagtttttctgggtattattccagagttgcagaagatgatgtgaggtatttacaggggattgggcaatcgttggtagatcctcaggggaagctatcttcatgggatttaagaacacatcggtgggagttgtgtgcaaattaaaaaatatcaaataaaacctcttgaggttaacactggtgatgaaagtgttttgtcccctattgtatactatctctcatttgcaaataaaaaaaaataataaaagaagactcctgctgcgatcaacagaaaaaaaaaaaaaaaaaagaaaaaaagaaaaacaaaa

SEQ ID NO: 158996 - DNA, 624 bp, Cannabis sativa
tgtaaaacaccgacgggaatttgggattttttagtagtgcaatcactcccccttatgggtctgacgtcctcatcgactacacttccggctaggttaaggctctgatactatttgtaatgtccccgcatcaagcctacattaggcccttacacccacagaataatagctcttatatacgagtacgccactcaggctgctttcgcgattatttactgaccctcagaccaacacgagggtttccagcatgctttgtcctcacttgcatgcttcctgggaaaacttcccaggaggtcacctatcctgaaattacccaggtcaagcacacttaaccgtggagttctttcgtgatgggctacagaaaaaaaaagatgcaccgtgttgatataggtagtactaatacattcatttaagcccttttcaactgtgtagtcccatacctaccgtctgagaatcattccacttaaccttccgaggtcgtgtgggattgcacactttacccggtatttctccttatggatcacgagagttagtactgtcataatcactcccccttacggggtccgaggtcttcgtcaaccacacttccgactaggtcaaggatcttataccatttgtaacgtcccc

SEQ ID NO: 158997 - DNA, 569 bp, Cannabis sativa
gcttgctcatccaactaattagccataaaaacctgcttaaatcacttcaaacaaatataatataactacagcaaacatccccaaacacaaacaacaactacagcaagctaaacaacatttcaccattaatgagccaaacttgagttcaaaactccaaagcttgctcaaacaacctaataaccaccaaatcaagcatagatcaacataataaatcataattaaacctctgaaaacaaagacaaccaaccacagcaagtaaaacctcaaagcacgcaaaattccatttccttaaaacccaagaaactaaagaaaaagctaaaagaaattacctagagcttaagcactccaaaaccttgaagattcttgctggaaatgcagaaagataaatcaaaccctagctgctcaagtagtggcgaaaagagagaaagagagaaaagcaatgctcttgaattttcaattttttaatcttttgaatgaatgaaccaaatagcataatacctatcttatttcagccaaccttaaccaaaataaatccattaattacttaatactaagtccactaaaggaca

SEQ ID NO: 158998 - DNA, 509 bp, Cannabis sativa
acccgattagaggccaaaaatgtcacaacagttttagttagaaatattgatgagattattaggataagttgatttcagaaataccaaggtattttgggatactcgaagttggccaataccctaaaagtagatatttcttagtgactaagaaatgataagataactattaataataaattttttattaatattatattattattatattatatattaatatattatattatattattatgattatatataaacgaaacatatacatttcgttttaattatatatatgtgaagctttaacagaaaagaataaacgaacaaaacccttgtcctctctttcgacaaaaccttctcctcctatatccattttctttgatttttaatccaaaacttagcaatctaagctcatgtagtagcaggataacaaatccttgaaaagggaaagcttaaggtatggtttaatttcgttttaagttttaaaacaattggtttcgtatagggattttgtgaat

SEQ ID NO: 158999 - DNA, 751 bp, Cannabis sativa
gggtgaatttaagaaacaggtatgggggtgggggagcaattcccgcacccgccccgccccgtttacatccttaaagggtatattaagcaactcattcataaaaatgggtacatattttaatgaaatataatatgagggtatttttgaataatgaatacaaaaaagagatattcctcaatttatcccctaaatatttaagtttgatttttggcggtaataatacttaagttatatttttggaactatgtaggtacttgaccattaaatgttaagttattatcatgtgccatttttttattggtatatttaaattaatttttttaaaaaaaaataaaaatttaataacttggaccaattaaaaattaccacatatcaatttacttaaatcttaaccgttaagtaattataaaattttatagaattattaacttaagtattagacaaacaaactcgaccaattatcgctaggacgaaacaaggtatactcatggggtctttgcgctcaccttccaaatattttctatggcaattgttctaagttcgtaaatttttcttaaattttgggaaaaaattttgtaattcatttgagaaattcacattattaatgtataaaaaaataatataatatataaaataaataagttactctttctattattaattagtttttgttataaatattaataattatgtggatgtctaaatcttttatttattgctattaattgtaatcaatattcctctttttctt

SEQ ID NO: 159000 - DNA, 814 bp, Cannabis sativa
  modified_base (350)..(371): a, c, t, g, unknown or other
cggcaacatggaactcggtgtttggctcagtagaatcacaacttagtatattaatattgtgggacagttatttagacattgggaatgtcgggagtggtcaggaatttatattttcccaaaaatacccctttagtaccattttatgttattttagtatggaggggtaaattggtcattttgccccattattgtttgtcctttagtggacttagtgtaatgtgatatgtgattatgtgacatctttttggctaaaataaagagttatattatgcattttattctcattttatccaaattagaaacttagaaaaaatttagaaaaactgaagctcttttcctctctctctctnnnnnnnnnnnnnnnnnnnnnnctctctctctcggcttggtgtggatttctagggctgggagttcttcttgattttttcaagcatttttcatccaatctaagtgttgttcaagtgcttggtaagatccttgtagcttctcttttagttttcttggtttttaagaaagttgtgtattgcatgcttgagaatttgtggctgtggttattgattgtgattgcttttgatttctgaagtttaattatgatgtattatgttgttcaagcaagattatgtttgtgattaggttgttttatcaatatatggaattttaactcaaaactatagttttcaaagaaaaatgaagaatctgttgctgcacttgttgttgatgcttattgttgttttcttagattattatatgcatatttaggaagatttgagctggtttgaatgcatgttaatgatgtttaaccaagtttgagttt

SEQ ID NO: 159001 - DNA, 511 bp, Cannabis sativa
  modified_base (482)..(486): a, c, t, g, unknown or other
tatattgtaattcaaatttagattattttttgttatgtgagatatttgtattataattaggcacactattagagtagaattttgacaaagttagctatatttggtatttgcatcacttatttgcatttatgctatacctttaaagaatattatttattgctctaaatatattttattaattgttttgggagttaataattagggattttttttatttttacatttcaaaatagttttttttttacggaatttcacacagaatctcctatagcaactaacaaggcaacttaaatcgcaactaaaatttgtatagcaatccacataaaaactaccagagaaaccaccggaggaatccaaacagtaaatttgaaaaagaaagttaaaaaatagtatatattgagtaatttccctaataattattattttttggaataaaaatcataagatctattaattaataaattcattcaaaacaatagaannnnnttcagaggaacagtcctccaactga

SEQ ID NO: 159002 - DNA, 563 bp, Cannabis sativa
  modified_base (55)..(66): a, c, t, g, unknown or other
gtatttgtgtaataaaaccaactttgtaagtaaaaatgtagacatagacgtgtannnnnnnnnnnntaataaattgtgcaaaatggatttttcatgtaaaaatttctaaaaagaataagatacattttttttaaaagaaaaaaaaagatacatattaatactgaccaacgaaaaagtggggtaagaataaaagtaatttgcggcataattatattcaagtttaatttttttttcttttttgcaaacaatgattaatatcattgaaaaaccaaataatgttgtacaggctaaaaaattatatacaaaaaatacaaaagaaggaaagtcctctagccaaacaatttgttcatccatccgaagaacatacacagctaatccaagttaactcttagttataaataaatacttaagttaattttgacggtaataatacttaagttatatttctgaaacttaatttgtaggtacataaccgttaaatgtttaaccattatatccacgtgtcattttcttattggtatatttgaactaatttttttaaaataataaaaacttaatgactt

SEQ ID NO: 159003 - DNA, 576 bp, Cannabis sativa
gagggggtgctgggtgcagtatgtcgtacccactactgtggctcccaactctcacacaaggcccaaaagagaggattttaaccttaataagaacaaggaaaatttacatgtgcagtcgttttttatatcttattatcggtaatattgtacagcatttaattaataattttaccgtgtgttttataccgtttttattttaattgtattaccaaaacatgaatgcatgatatactaagctgatgcctttctttctttctttctttatttttttttcttttttccttttgtttatttatttatttgtataacatgtggaattaagcatagatagatccagtttatatttaccatcttcccctctctttatctttttctctttccttctttctctctcttatctttaaattttaaaaaggattgatggtcacgttgttactcaattgaaccttaaaaatatattattgtgatctacgcttcaatgtgaacattgtaagatgagggaaacattttttcgttatttcgaaaatcaaaaaaaccattaaattactcataatactaatcatatactaattagtt

SEQ ID NO: 159004 - DNA, 774 bp, Cannabis sativa
tgtttaagccttacttcgtgaggaagtaagcacacatcaatagttgaagggagttcactacttggtgtgtttcagagatcagattagctaggtggattacaaagggctgcgacaaatcactagagggagtctaaatttgtttaagtcaattgcttttgtaatctttgatactttactaatggatttcattctctgtgcgcggccccatggactagtagtgtttgaaagaatattgataccacatacaaatctctttggtcaagtgagttaattttctgtaattatttttatattctgcttgttttggtttgtttctgcaaaactgctttctgcagtaatagaattacattatgctgttgcagacgtatacagttttatatttgtatatttttgtaataattattggcatttgcaaaaatttggttttttaattggtatcagagtgggacacaaaactcttagtgtgatccttttaacgttttcttatgtttttgcaatatgttttcctctgtagaaggaagttctatagttagcccacaactgttcaatgattctaacaatccttattgaaatgttagaatgagagcctttatcaagtctcaagatgagaaagcacggaggatggttctttcaggatggtcttctcatgttatggcagataccgaaggtaattctaaattaaaatgtgaacttgaatggtctactgaagatgataaattgtctgcttaaaatagcaaaactttacatgccatatttaatggagtaggtgaaggt

SEQ ID NO: 159005 - DNA, 694 bp, Cannabis sativa
  modified_base (540)..(541): a, c, t, g, unknown or other
gttttataaaaagacagtatttttgtaaaaaaatttatgtgacagtaaaattttaaacttttgttcaaaatttagtatttttgtaaaaaaaaccctttttaaaatcgttaaaaatccccattgaattattgacatcgttgaatttaaggacttttatttaattttagtaaagaaagtttaacatggatgaaatttcatgaggcataatttgatacatgtcaaagttcgaatgacatgatttagtagatatcgaagtttgggaagcatgatttattacataaataatcactgaattagtaaaattgaataaaattggacaaaagtccttaaatccaacaataatcactgaactttaggttttgtaacaattaactacaaaaaccaacattttggtggcaaaacatactgaacacccattctgttttgctctatacccctccgtccaaaaatcacagttaagtaccacagtggactatcgacgtgtacacacttatacacgtgccaaatttttagtaatccacgtaatattaattttaaaanntaattataaatatttaaaaaatttaaaaatcagaaaaaaaaaatatttgaagaaaattattataaatatttaaaatttaaaaaataattaaaaaaaaaatatttttttcctttcctctttttttcttcccttttctttttttctctgatcgat

SEQ ID NO: 159006 - DNA, 604 bp, Cannabis sativa
  modified_base (97)..(112): a, c, t, g, unknown or other
ggagcattgctattaggtaccagtagtgcctagcaccttctcgacatgtggtgttgcgattggttagcaatgctccctaaaagctattatattaaannnnnnnnnnnnnnnnacttagttgaaccaatagcgatattaacacataggaaggtgctaaacactactggtgctctttagcatttctctaataagaataatattaattaatatgaatagtaacggaatcatgatataaaagtaataataatattatgatgtagtgttataaatacgggctagacattttaatacgacatgagtctcaaaggcacgacacgattaggtatgaaaaaatatgggcttgggcatgacaaaatacgggcttgggcatgttacgatatgatactacaaattgacacgacacggtacaaaaaatatatctttaagcacgacacgggacgaaaagtacaaaagataggatacgtaagcacgaataaactagcccgaaaagtacgaataaactagcccgaaaagcacgaatagactagcccaaaaagtacgataaatgacaaactcaaaaaacatgacacgacatattaaaattcttataatttaataataataa

SEQ ID NO: 159007 - DNA, 551 bp, Cannabis sativa
  modified_base (339)..(340): a, c, t, g, unknown or other
gtgaattcaataggcaagagtggttgtcttgtgttgctttgacatgattcgatgtatgtgagagttctatattacactcgttatcacgttgattcaattattagtacggtgggggacattgattggtattttacaggttttatgtgagagttcattaattgtcttaactaatagaatcaaatagatgtgactaatggagggttctagattaatcagtttcaaaactcaatttcgaataaacatgtatttaatattgagaatattaaatgatgaatcaaacaaagtgaacttgaaggaaataaaaggataaataaactaaatatactagaatctaattcnntatatttatccaatgataatgtggtggtttttgggacctggtgctacattatgcgaagggtctcgtttatgtgactttagcttgaacagtcaaatgagatacaatatctataagatttatagaatgagcttcacttacttttagtgtaagtgggagattattaggatttatatcctaaaagcaagttattaatggataatatattagagaa

SEQ ID NO: 159008 - DNA, 838 bp, Cannabis sativa
ctagcacagacaaatgcaaaaactgcaacaagtttgatcgtaacaccttcaggtcaggttattattaagtttcattctgataaaaattgagttcaagttactattttagtattttggaccatttgaaaaatacaggatctaaattatcatttattaaattggttgctaaaaatctcggacaacattttgaaaatctcggacaacattttggtgctctcggacaacattttggtgctttcattgagagctgaaggaagcatctgtaagtaggcaacggtcttgtaagctaaagaaacaatggtggaaactcgcaacacacgtcagccccttcctcctcaggacgcccaagaccctgaagatgagaaagtggcctcaagaatcaacgtgggctctgaggagcaagaagagaccaacgacgatgaatacgaaaaaaactttgacgagtacaatgcctacgatgaatgtagtcacacagaactactgctcttgagacaaaaggctgctgatcatgaagctaaaatcacggcccaaaaagagtaaaacaaaaagatgcaagaggtgatggccgccatgcaaaaaaccatggaggtagcagggatccacatacaccctaaagccatccctgcaggacttgaagaaacaccagaagagtcctcaccaagcactcaaaagcataagtccagggagcctagccccatacggtatccctccgaaggaaaccaacggaaaaatcttacttccatcccggggaaaagaaaaagggccaggatccgcgaaaggttcgctcaaatttcccgaaagggaaaggtccgcaaaggggcaaacctcagaaagggat

SEQ ID NO: 159009 - DNA, 531 bp, Cannabis sativa
tccaaaagaaaacagtaagacagatatcgcataaaagtcgcacaaatatcgcaggaaattgcacaaagaaattaccaaaattgtttcaaaaattgcacaaaaattgctcgtttatcgcacataagtcgcaaaaaaaaacataaatcagtgaataaaatcgcacataaatcgcataaaagtcgcatacacagattaaacagaaagtgcaaacatcgcatataaatcgcatataagtcgcacaaatatttaaaaacacaataaattaattctgttaagaaataacttacagcatcgtcgagccattcgttcagcaccatcaatttcacgaaccaggatctagtggcttcgccagtgtgaacatccctaggacggtcgttgtccctagcataagtgatccacttctggaaaaattttaacagccggtagtctgccggtttcagtgtgtctactaccacgggcccatgtcgttgtttcttcttcccagctgtgtagtcattcaagaaaaccggcttctgctttcgcctaaccctg

SEQ ID NO: 159010 - DNA, 521 bp, Cannabis sativa
ccctttttttgtataatctgcccctatttgtaggaatataggttgacagttatttacatttgaatttgaaatacataaccgttttcacaaatagtgggctttgaccacgtcccattttaacacgtgtatagttaaaaattcgtataaccgtttgttattcctatctttaaggtagtggacactgacgtgggataggagcatctcgctagaggtatttcgctttgtacatagatgaatgacttggtttattcatatgccttccagcaatggcatgagcactagtgtactgagcaaacttaagaactgctctttgaccataaggccttgctgactggacaatcatgtcctccatgtttccaagttgttacacttaattattataacgtgaattatacaataagtgttccaatagccaattcgcatcgtcaatactttcttatatgtagcaaggtagatgtctcgctatgcattatccgtagctccctcgggattatgcttttcgaggcaagatggtttctcgt

SEQ ID NO: 159011 - DNA, 597 bp, Cannabis sativa
ttgtaaatcttgtgaaatgttagtccacaataaatataatccaaatttaaatatattaatactaataataatctcgtgcatttataaaataataaatatagttaatcgattttcttacgctggagcaaggaacgccatgaaagatacgatgttacctaagacaatgatgagtgtagccatatccatgggttcattttgttgccgagagagagagcagacgaggggggattaaagtgaatggctgtatatcttcgagttcttagatcactagagagagagagagagagagagaatacgctcgagttcttagatgactagaaagagagagagagtgcagacgaaggcgatgaagtgaatggctcttgtaggatttcttgatgttcctcaagttcttatatatatttataatatatatggcttcggctacacatttttttcgtcttgccagatggggcccgatgtttctttagttttttaaggttggggaagatggcccgattaggcctgatggtgggcctgatgggggcatgataattaggttaggaacgatagggactgattgctggcccgatgggtgaccctgaatggaatatggcc

SEQ ID NO: 159012 - DNA, 511 bp, Cannabis sativa
acagcataaataattatttaaatgactgcactcccgtaagagtagggagaatgtagtctctcaagctgcggccattagcttgatcttcaatggcacctccattattaacgttattatctccattgtttgcatcattagcattcacattagaagccatgatttttgatgtttcagcagttgctgaaactctttcttgcctcttgttctttcggtttctcctacaagtcttctcgattttaggataaactggtagtatgactgcttgtccttgacggcgcatacacttagaattcccgaaatagataaagaaaatattgcaagaaacagattagtaattagcaagaaatgtaaaccaaactagaagttagtataattttatgtaatattaatctttatacaattccccagcaacggcgccaaaaacttgttacgaaaattaatcatagtactcaagtatacgctgtcaagtagtagctcacgcaagtgaggtcgaaccacagggaattggact

SEQ ID NO: 159013 - DNA, 507 bp, Cannabis sativa
  modified_base (145)..(146): a, c, t, g, unknown or other
cacccaaatagagtcataataccctactgttcttggcaatcctaccacaaaatccatggtgatgtcttcccatttctactcgggaatctttataggttgaagcaaacctgccggcctttgatgttctgccttgatttgttgacannttaagcatcttgacacatattcaataatatcacccttcatacccgatcaccagtataaagctttcacatcatgatacattttggtcatccccgggtgtaaggagtacggtgtggtatgagactcatcaagaattcctgtttgatattttggtcagtcggtacacaaattctgttcctgtatcataataacccatcagatgaaagtgaaaagtcttttgccgatccggcctctaactactcttatgcccctgcaactcaggatcactatgttgggccactctaattctttccaacagatcagactgcagggtaatattgacaagttttccgattacaaactcaattcccgctctagtcatat

SEQ ID NO: 159014 - DNA, 500 bp, Cannabis sativa
tatttgatccttgaccatactccaattgagcatcgtcattttgaatccagtatgagcaatttgaacttgtacaatcaccaataacagtgagcttttaaactcacaacactcaatcatggaagaacagtatcagttattccctaaaaccccaagtacacccaaagttcttacactactataaaataactttttagaggttattttttccacaagttttataaaaaaagaagttaaagggtgtcaaaatatccgcctgttatgattaaacaacacaaactcaaacaagaataatgatcaaacaatcagcaaacatgttaacaatcaaaccagaaatcaaaactgataaaaaaaaaccagaaaagtaagagagaaaacacaaaaaaattatcttgatttggatctcaattagagtcatattccagctctcccccaaggagtttctccactaagaatcaacaagttacaaacaccaattacaatacacaaacaccaagaacaat

SEQ ID NO: 159015 - DNA, 509 bp, Cannabis sativa
  modified_base (27)..(29): a, c, t, g, unknown or other
actaatcagattgtaaagagttttatnnngggcataaaacccaacaatatcttagggttttagttgtatattaaagttcagactttcctatataaatactttaactctaacctagaaaacttaagtctcattctagcctccaagtgataaagctctaagcctaaatctttaagtttgataactctcttcctcactctgtctcacacgcccatacaagcattcacaacagttcagatttaccaaccttgatttttactttgtatccttaagggagctatttcagattctacctatagtgatctgaatagtattatcccttggtatcaatacaactaaaaagggagtaggtcattacccgatatctaagggggccaaacctctataaaattttgtgttccttacattctaattctaattatgtaacactgacaaacatcaaattcatacaaccccgctgtcggttgaccacttttcaaggtcaacaatttggtgcttttattaagagcgag

SEQ ID NO: 159016 - DNA, 530 bp, Cannabis sativa
  modified_base (309)..(310): a, c, t, g, unknown or other
taaaataattaaaagatttttttagtttaaaagtaaaaagaaatattttttttttcagtatgtgcttaagtccacagtggtccttcattgggtccgccagtaattgttgggaccaaactaaagaaaagtcaaaattaatatcccttcctctgtttagtgcctataaatacggatgaaacaatagcacacactcatcacatacaacttaatattatctgctaagctcagtctaaaataaaaatgatgggtctgtttccattcctctactctctaatcttcattctcttctttcttacttcttcttcttcnncttcttcttcttcttctccattgtgccatccccatgaatcctctgctttgctccactttaaaaactctttcaccaacattagtgacactacctactgtagtcgttattttggtcttgaaattgctaatcctaatagtacaatttcatgggatataaagagcaaggattgttgcagatggagtggagtcacgtgcgatgacgtcacaggccacgtcatacg

SEQ ID NO: 159017 - DNA, 556 bp, Cannabis sativa
aattataacttaaatattattactcccaaaaattaaatttaaatatttatttataactaggaattaaactaaagtatttataccgcaaattactttatattatttgacacaatactaaaaaagatatatatggaattgcaccaagcacactcgtcatgatattgcagactaaaattgatcgagtattgctattataggcatgtatgtgcccaagattataaatatgcactctctgatcaaataaaattaaaaataataaaataaaatattaacaattaaatactaacaatgggcattctaatattctgtaacgtcctaatgctaaggcacgctatagtaatttttcaattgcggtgctatctttactagctaatcaaagaactttcttgaaaattgtgtcaaattaaaacttttaatgctaaccatggaactttatagactttcataaaatatttacaagtgtcgggatcccgtttctaaactttttacaaaatataaaaaaaaaattacataattcaggtcgcacaacgactacaaaatgacaaccccagatgtc

SEQ ID NO: 159018 - DNA, 698 bp, Cannabis sativa
  modified_base (309)..(313): a, c, t, g, unknown or other
ttaatttcaaaacaacttaaatttgaataattttcaaaatatatttcattaatcatttttccacaatttcgaaactgcattaatttaatgcagggaatttcgaattttacttgaaaaattgattaaagttgaaaattatttattttaattttagaccaacttaaatcattatatttttcatttaaatgattaattgaaataaatgaactaaaatatattataattagaaaataaattatttagtcaatgaaagtatagatagttattgtctgtttgcttgaagtattttctagttatatttaattaaannnnnaattaatatttaagttgattttaatcataatacttaaatatttgaaaattttcttaatatttaattaaataggaaaaatatatttgtgttgaaaattaatttttgatcaacataaaattaaaataatttttcaagatttattttattttatttttatatagcattttcgaaaattctatttattttaaatacattatttttcgaattttgcattatatatttatagaaaattaaatttgagttgaaatttttttattaattttggatcaactcaaattgaataattttcgtaatattgatttgaagattaatactaaggatggaaaataatttatttttatttttccaatctcccttaagtataattttataaatattaaattaa

SEQ ID NO: 159019 - DNA, 649 bp, Cannabis sativa
caagccatccttgtaaattttatcttagttaccctttttgagccttaacctattctttgtttctacacattttgagcctaaataagataaactcatgaatatccaaaaacttaaccctaattataccataagtggatctttagtttgggagaatttgaatgggaagtttattgtatgtgtgtgggaaaaagtgtaaaaattgagagaatatgaaataaaaattagattgatagcaacttgaaaagaaaaaaaatctgacaataagtgtcaaatttgaaaataaataaatataaagttgttgcaatagtgttgaattttttttctctcatatgtatttataaaaaaaagggtattgagattgtgtgtgaaaatttttgggtgacatgattggaaaagcttatggtataggtaagcctaaatgaccatttcaactaccctcacctaagcctaacactgcaagcctaaaaagaccttttgattcttagttgtgcattgatttatattagtggagaataataagtatagcaatcatatggaatattttttttgggttagcggattgatgttgaaataggcatgcataaagtggttcaattattagttaattgcgttctatgatttcatgggctaaatgaaaataaattgaagt

SEQ ID NO: 159020 - DNA, 794 bp, Cannabis sativa
attatggaccttctcatttcgcaccctccaaatagtatccacaacaatcgaggcatataagaaaacatcatcagcttcgatccctcttttgtttagatccaagacaaacttgacccaatcccagacacggatgccagtgtcgcacactggaaaaatgccccagggagaagagcgccaaagatgaaaagccacatcacaggacaggaaaatatgttcaaaggattcctcccccaagccgcataaggggcagctagtgtcctctatatggaatctttttccaatcaccgctctaacagggagagcactcgaaaggataccccaccacagaaccttgtgacgctctaaaattttactattccataacttattccagagtttcggagcaacctcacagtgaggagctctttccaaagcttgagccagatacgccgatttagtcgagaaacaccccttactttcaagcgtccaaacccatctatcggtaccaatcccagaggggtggccccctttcagaatgtcagagaccgtttctcggtcaaaggtgtctccatgtcattaagctcctaataagtagattaaaaatttaccaagtagattttctaacttattaattactcctgactccactatgcactcttgattacttagaacactctatataccaaaaatagatgtgctttgaatgaccaattgtttcaatccaatgatcctccatagattatctacatcgagtagggataaatttaccgttcaacccttcaatatatttcatcctttaaatactttagctactt

SEQ ID NO: 159021 - DNA, 550 bp, Cannabis sativa
tctctcaagtcatcttttcttttgattttcgaaccacttggattatctacttttgtcgagacaatacgtgctgtggtagtacttgtcctggatttgtttcccgagtcagtcttcaacaacttcatctcatttcttgctttgtctttgtgcacaaacacttgccctcttttgttgaattcataaatgtatcttactggacgaccttgtaagtcaccccactggtcgccccagctattgaaaggtcggttgtgatccttgcttgaggagcagtaagttgaataatgtcattcaagtttctaacttttgcattgacaatattgaattgactcaggtaagccttaagtgactcgcctagttgctgctttatgttagttagggatgatgcttttggtcgtctatctctggcagcttgaaattgtttcttcaagtccctgggtagttgttcccaagaagttatcaaatggtgagtgaatttatcaaaccagctactcgctgccccagtcaatgaagttgggaataaaatgcatcgcagattattcgagacgttgct

SEQ ID NO: 159022 - DNA, 718 bp, Cannabis sativa
  modified_base (26)..(44): a, c, t, g, unknown or other
tatattaataagtaaatctaattatnnnnnnnnnnnnnnnnnnnagggcataaaacccaacaggttgtgtttttgggttagagttgtaactggtggttgggggttcatcaaactcaattgttatagctatatacacacgaccagaaggatgcatacacatgtagcctttgtgtgatgtgctataccctaaaaaggggcattgtgatgttctgaaacaaagtttatgactttgatatggtcttaaaaggggatagcgagcacaaccaaacacttttaaaaaataataatctagtttttgattgaaaagtacctcataaggtgtgttatgttgcaagatgggtgttagtagcttgttgatgacataggtggccgagacaaaggcttcccactagaaactcaaaggcatctcaagttgagtaagtatggtaaggccaacatcgacaacataactgtctttcctttttacacgaccctattgttggtatgtgtgtggacaagggtgcctgaattcaattccaagatcctgtaacatggttttaagggtctatattcaccccctggtcagtttgaagagcctttattattgtttgaaaacatctctcagcataggcattaaattgtatgaaaatagtagtgactttatttttttcttgtcataggaaaaatccaagtttatttagagaaatcatcaatgaaactaacataatacttgaaacct

SEQ ID NO: 159023 - DNA, 584 bp, Cannabis sativa
caaatataaatatgtaaaatcgcataaaataatagcaaataaaaatatttaaaatctcacaaagatcgcataaaagttgtataacatcgcagaaagtaacagattagtaaaaacaagtcgagtcgcacaaaatcgcataaaaatcgcataaaataacagattggcaaataaaaatatgtaaaatcgcacaaatatcccattaaaatcgcataaaatcgtagaaaataacagtttagcaaataaaaatatgttaaatcgcacaaaaatcgcatgaaaattgcataatatcgcataaaataacagtttagcaaaataaataccaaaaaaacaaagaaagtaaaattgacatcccctttctcaaatagtgcagccacattaggttgcttcacatcatgtttcgtaaccgaattgggggtactccaattcaacattcgagggaatctagtccctctgcactgcccatacttcttccccaaatcttgcatcaccttaaaggcccaatattgcagcgtcggtgcatatccctagacattgtacttcgcctctgattgagtaatttttttctccttcttccctttcttctt

SEQ ID NO: 159024 - DNA, 502 bp, Cannabis sativa
  modified_base (467)..(472): a, c, t, g, unknown or other
taatagtggaattaatttgtataaattagtggagggtatatattttgaaatggggtattttattagggtcaaaaattgaaatttccctatggtaatatgaaatagtattttttttataattatataaagctgaatttttgctctacttttcattttgcttgtaattcttaagtaattttaaataattatataatttgtacaaaaatatttgtattaatgatagaaattataaaataaacttataatttttaatatatttttatgttattcaatatattctaggggtgagcataaaattcaaaaaactgaaaaaaccatttaaatcgacctaccgaacaccattagaatcgaaaccgacaaaaccaaaaatcgaaaaaccactgatggttaaaaccgccattgaacattcgttttttttttagtaataaaccgaccgaaaaaaccgaaaccgaccgttatacatatannnnnnaatttattaagtttttttttatgtattata

SEQ ID NO: 159025 - DNA, 546 bp, Cannabis sativa
  modified_base (404)..(405): a, c, t, g, unknown or other
  modified_base (483)..(493): a, c, t, g, unknown or other
cgtacatggctggaatgttgggagagatgacagacacgacttgccctcgcttgactccaagccatgttgctatggaggaagccacacgaagacaacgggcgttggtctgtgaccaggtataagtggtgcggttgtatactacagaagggcagtcgccgtagacgatcgccgccctttcgaggtagccgagtggagttagaggagatgagtttgctgggtttggctttaaattttccatgggttagtttgggctgactcgtcaaggtagctagtttcatttatagagacattaaacgaaacacatatgaccttggaatataataatgtgaaatggggaatgcagtacaatttctttcttttagaatcattatttatatatatatagtagaacctctatttaagannactctattcaagaataacctctaacttattataaaaaaatcaagtcgctttgggccaattataaataagaataacctnnnnnnnnnnnttagttatacattttctaagttccttatgaacaaagtatacctctatataaga

SEQ ID NO: 159026 - DNA, 776 bp, Cannabis sativa
gcctcacaaagtagacagaaaagttacaatgatccgaagcgtagagatattgaattctaggtaggggattttgtcttccttcgggtgtccccaatgaagggaattcagaggtttggaaagaacggaaagttgagtcccaaatttattggtccatttgagatttttgaaatagtaggtcaggtagcgtatcagctagcctaaccccttactttatccaaagttcacaatgtgttccacatctcgatgcttcagaagtatgtgtctgatacgacccatatcctaagctatgaggatattgaacttcagacagatctgtcatcaaggaacaatcggtttatatcctggataggaaggaaaaagtgttaacaagactattccgctagtcaaagttctatggaggaacataaagattgaagaggcgacttgagaattagagtcgcaaatgcgggagaagtatcctgagatattcaggtaaattttgagtacacaatttctatgaagaggggatagttgtaatatcctggaaattatgattatgttaatttgagcatattttattaaatatgtgattaaattaataattaagtgtaatttattaatgacgaagattatatcaaattatgtgagtattgtaaatatcatttttaaaataaaaatattttcgggttcggcgtccgtgaaaactcaacggagtggtcagaaatatcacgacaataaagtatgggttgaattggaattattctcgactagtttagaattttaagtggtcggtttgg

SEQ ID NO: 159027 - DNA, 682 bp, Cannabis sativa
ttaccggggtacgaatgtttgggcagaaaaccttggagaggttgaagtcgtcaactgattgactccctgagatgagcttggaattcctgcagttctctgttgtgaccaagtccctcacgttaagaccatttctgtcataagtggagaaaaccttggcatgttggagaaacagttgggtaggagcagtgcgaagcaaaggagggatcctgacccactccgtgagaagctccgggcgatccgcggcttggaagccagaagagaagaagaagcggtggcgatactccttaacattcttttgaaaattaaaagggatcgggccctcgttagtaggatggatgggcccggaaagtgtgaaaaaactgtccttaaacttgtccccctttttggggacaaacacaagttcataaatatacaaaatttcaaccggactaggtgaagcccagcctctggctacataaaaaataaataagcctgagaggaggtagtaagcttgaggaataagttggtaaggcgcaaggccaacaaaaacaaggaaattgatgaagtaatcctaaagcagaagcatggctccggacattagatgggtatggctctaggctccaaaacccccgtagttgtgattgggcgtctcttcgtcccgaggtaagcgatgaaagagccagacgcggacggcttaatgcca

SEQ ID NO: 159028 - DNA, 557 bp, Cannabis sativa
gcaattcaagcggagaaaaataattaacaagttgaataaacaagtcaaaccaaaaaaatcatccaggcactttcaaagtatttagtaaagagtcaaaaattgctatcaaagttatttcagttgtaactcaagagtcgtgtgtgtgcaccaaactttatccgttttttttaaagtcataacacaaatagtatcgaaaaatctcaaaagtgtaaaggtctcaactccaattttctcacgggtattgaaagtatttatattggaggggtgacactctttggagttagaaatgcaacaattaactcacaaatgagagaggataaactttttaggacaagcaatttgaacaaataatattgatcataagatagacacatcaaaccattagaattcaaatgacaaataatatttgggatttatgtgaaacacttacaaaataaaaaaagtacaacgataattatatgtgcataaatatatgtatatatattttcttttccttaaaaaaaaaaaagaaatatgatgtttctccattcttcttcttttttcttttttttttaaaa

SEQ ID NO: 159029 - DNA, 663 bp, Cannabis sativa
gagctgaaacggtatgcaggggccgtgaaacacgatgaggtgtgggaagttactaaactcccagctcaaaggccccggctgatggatcaacctattacattgacggaagaagaggcaaaaatagtgcgttttccccaccatgacccgttggtcatagagacccccattgccaaaacgttggtggccagagtcctaattgacaaccggagttccgtgaatttgctgtttaaagaggccttcactgcaataggcctgacggactgagacctctcaccaagtggttcccaactcatggggttcaatggaataacacttatcccaatgggaaaagtgaggcttccagtcaccttatgcccggacacaccgcagagcactttcaagtactgcacgttcgtggtggtggactgcccgaaagcctacaacgcaatcctcggctgactggccttggtggactttggcgcagtcacatcaatacggcacttgtgcctgaaattcccaacccaggaagctgggatagggacggtgaggggaaatcagggggaggcgaggcaatgctataacgttgctgcccaccgaccgtgctgatggtccgagaaactattgagccagaaatggttgaagaagacgagttggatccctgtgtgggatccgaaaaaatcgtag

SEQ ID NO: 159030 - DNA, 500 bp, Cannabis sativa
atctccgtaattaacaaattacgagtatttactcacttatagaaaaatttaaattttatggtaaaataaattagtaggatcataatcccactcattaactgattaattcataatataaatgtaaaccctaattatttaccatttgacttattaggatattacattagtaatcacaatacatgattgaaataacagaaaaattataatggatacaacaaatttatcagtttcaagtttggttgaacaacacatagtgtttttcttttgaataaagtaaaaagaagagcaacaataatctgtaattgatattttcaacaggttgattaatctaaaactaatcaaaactgtagtaatgatatctcacaaggctttgttttctctctagtcacaaaaatcataacaaataataattatgtaacagactagacaagattacaatatgacaagattacaatatagtaatttacacacttcttgacttgtgaattctctccggtttc

SEQ ID NO: 159031 - DNA, 572 bp, Cannabis sativa
atcccacacggggatccaactcatcttcttctgccattcctggcctaataacttcacggaccatcagtattggtaggtgggcagcaacgttataacattgtctggcctctccttggttacccctcacggtccctactccagcttcccgagtagggaactataaatacaagtgtcggatcaatgtaactgcgtcgaagtccacgagggctggtcggccgaggatagcgttgtaagcagtcgggcagtctaccaccacgaaagtgcagtatttaaaagtgctttggggtgtgtccggacacaaggttactggcaacctcacttttcccattgggataagtgttgtcccattgaaccccgtgagttgggaaccacttggtgaaagatcccggtccgtgaggcctatcgccgtgaaggcttctttaaataacaaattcacagaatttccattgttgattaggatcctggccacagtcttgttggcgatgggagtctctatgaccagatggtcatggtgaggaaaacacaccgtctttgcatcttcttctgtgaacgtaatcggttgatccatgagt

SEQ ID NO: 159032 - DNA, 646 bp, Cannabis sativa
aaacacggcttggtagactcttagccatgaacatttgctcaagcttattgtacattgtagaggttgtggtttctttaaccacatttacgagaatctcatcttccagacacaaaatgattgtattcagagccttcttgagtggattttcctaatctttctcatcgactccattaggtttcttaacatcctttgacagactgtaatatcccaataagtctaatggtaaataattagggtttatatttatattatgagttaatcaagtaataagtgggattatgatcctactaatttatttcagcataaaatttaaattttactataagtgagtaaataatcgtagtttgttaattatggagattatatagcacgtgtgaatgtaatatgacctatatgtggaataaaaatattttcaggttcggcgaccctatgactcaataagtggatatataagcgtaatttgttaattacggagatttattttaaatacatggatataatatgagttattggtgaaataaaaatattttcaagtttggtgaccctggagacccaattagaggctaaaaatgtcacaacagttttagttagaaatattgatgagattattgggataagttgattttagaaatatcagggtatttta

SEQ ID NO: 159033 - DNA, 540 bp, Cannabis sativa
  modified_base (331)..(331): a, c, t, g, unknown or other
ttgtagcttcctctttgttttcttgagttttaagaaaaagatgatagttgcatgcttggtaaattatgatgttgttgctgctgtgtttatgtgatgttttatgcagcattaatatgtttaattaagtggattgtaataggttttgatgcgttctagttgattttgttcaagtttggaattttgaactcaaaacttagaatttttatggtgaaatgataaatcagttgttgtgcttgttgtagttgattgctgttgttttcagaggcttcattatgcttgattgggtagattaaaacaaattttgatgcatgttagtgggatttaaccaagntggagttttgaactcaaagcttggagctttaattttagtttttgtaattatgtatgaagcttggttttgtgtctttggtaatgttctttggggtttaaatagcaggtctagagaatttggtatgatttggggttgaattgcatgagttatgaattttttaaggtttcctgcactgaaccggaattccggttcagaatggcctgtaggaa

SEQ ID NO: 159034 - DNA, 651 bp, Cannabis sativa
ggctcctggtgcacagaaacgcttcttcggtcctcttgatcctgagggccaagactcccgttttggagtttgcccctctacggacctttccctttcgggaaatcttagcgaacctttcacgggtcctgcacctttttctttttcccgggagtggaagtaggatttttctgctagttcccttcagaggggtaccttatagggctaggttccctagacttatgcttttgggtgcttggtgaggactctgctggtgtttctccaagtccagcggggatggccttaggatgcacatggatccctgctccctccatggctttcatcatggcgagcatcacctcttgcatctttttgttttgctctttttgggctgtgatttcagcctcatgatcagcaaccttttgccttaagatgactagttctgtgtacctaccttcgtcataggtgtcgtattcgtcgaagttcccgtcgtatttgtcgtcgtgggtttcttctcctacctcagagcccatgttagccgttgaggctacctcctcatcttcgcgatcttcgacgtcttgaggaggacggggttgacgcgtgttgcgagtctccaccattattgttttagcttataaggttgttgtctatttgcagatgcttccttcagctctc

SEQ ID NO: 159035 - DNA, 664 bp, Cannabis sativa
tgatgtttgtgttgtttcgtttatccctcgtgatgacaactctgtagtggatactcttgcttgctattctagagtgtcttgcgtgaattcgaggtgtttgttaagggaggtagccccctttgtggctgctgcactttaagtttctttgttttcaataaagcttttacttatcaaaaaaaaaaaataacataacctcaaaatcgaaataacttttataaaaataaaaaaaaaatctaaaaaaacttaaaaatgaaaagtacagtatacataacagttctccttatttttgttttattttagaataattaacaatttaccctaaactttcgacaatactaattctatccctaaaatatatgacttgttaaaaatttcccgtatatttatttacagaaatctaatccttctgttaagtactatcctatcattttgtttaaatattgatgtgtctttgtaaattaataaagttaccctcttgttgactcagaaatcttgactgaatttctaagcagcacacactcgctaaattggcaagaatgaaacagtgttaagtaattataaaaggaacacaattaatttatagtagttgactccctgtatcacaacagtaatggagttacgtctacttcgagtctttatttctcacgagatagtattacagaaa

SEQ ID NO: 159036 - DNA, 525 bp, Cannabis sativa
gatcaccataaccatcgatgcaacctttttgttatatggaacaatggaatggacacggaagtatggagtatggattagaatacgcaaaagtagaaactgtaggggctttcaatgtccgaatggacatagaaggttgtctaagaattcgctggccctattcgaataaacctatccttaacacccattggttttagatataacaatcgtttaggtgtcgatagttgttgagcgtaacataaggtgttcatgcacagcttaacaaagcatggatgattgatcacaatatgcgaaagtattagattgatcggctacgagatcaccttaaccattgatccaacaacttggttatatggatcaatggaatggacacggaagtatgaaggattgattacaatacgtaaaagtatgcagtgtaggtgttttcattgtccgaatggacatggaaggttctctaagaattcgctggccctcatagctagtggaagaaacctatccttaacacccacttgttttggatataaaaat

SEQ ID NO: 159037 - DNA, 501 bp, Cannabis sativa
  modified_base (146)..(146): a, c, t, g, unknown or other
agacccagactgggatcgaaatgcttggcctagatcaggaccgagatcttgacccagacctatacttggacccgcactcggcgcccgaactggacatggacctgaacctagaccaaaattggggcgcagacctggacacaaacccngacacaaactcggacccaaactcaaacccacacctagaatcagacccaaagcttgacatttactcagacccaaacacgaaccaagacaaggatcagagccaaggacttagaccaagaactgaatccagactcagatcgggtttggaacttgggactcggacccaacctagacgaagacccaggacgcgaacccaaacacgaacttgaacacagacccaaacatggaaccagactaggtacacagaacaagggtcggaacctagaaccacaccccagtctcgatcctgaacccaaagtcaaaaacgggacctgggagctgaactagaacaacagcgagacccgtgacagtgatcca

SEQ ID NO: 159038 - DNA, 523 bp, Cannabis sativa
attggctagaccaagaaacgagcgtagttgtttcacattggctggggtcgtccactcttggatcgcccgcaccttttccatatccatacagatcttcccgtgctccacaacatgacccaggaacttgatacttttctgagcaaaagagcacttctcccgctttacataaaactgttctttcctcaacttccgaagcaccgtttccaagtgttcctaatgctcttctggagtggcgctgtagaccacgatatcatccaggtacaccaccacgaacttgtctaagacatcatggaagagtttgttcatgagtgtacagaatgtggctggcgcatttgcaacccaaacggcatgacgcgaaacttgaacgccccatactaagtaacacaagtagtccttggttcatccccttctacgatacgaacctgatagtaccctgatctcaagtccaacttcatgaagtattttgctccacttagctggtcaaacagatcaacgatcaagggaatggggtatctgttgcgca

SEQ ID NO: 159039 - DNA, 632 bp, Cannabis sativa
atggaaaaaaaaagataaaaaagttaagtaagtaatttaaaatgtaaaagcccaaaaaattattgacactttttatatagtacttatagattgtaaattattcatagggagtaattaaaagaatattttaataattttttattattaatagtaatatttttatagataaattataatatatatatatattatttcatcaacacaaatatgattatttatattaagttattatgtaattatgaactaatctataattatttatggtaatgtctataaatataaactatgatatatacatacatatattgtttcatcaatataaatatgattatttatattgatttgttgtgtgattattaactaacatatagttatccacaaaaaatatcatttataaaatatcgcatttgtaaaagtatagtggttattaaagtaatgtaatttatattaaattataaaagattttaataaaaaaaaatgacaaacattaaataaataatttaatatgtgaaagcttaaaaatatggttatcgaaataatataatttatattaaattataaaagattaatggcatatttactaataagtaatgagaatcaatagtaaagtaatcattctcttacatttgttt

SEQ ID NO: 159040 - DNA, 661 bp, Cannabis sativa
  modified_base (32)..(36): a, c, t, g, unknown or other
aaatatgaaaaaaaaattaagtttcaataatnnnnnaattagtgggctttgggttggacattcacatattggacctaaatataaaagttagtattttttataatgtgcggtgcggtgcgatttgaactgcatattaacaattcaaaactgcaaacaacaccgcgcagtttaaaaaaaattcacttactaatcaaaagaaatttaaattattgtttagaaaaaaaaagaaattcaaattattaaattaatttaaaagcttaaattaaaaataaataaaataaaaaaattatgcattttcaaatgattgaactcatgttattgtacttgatgtaagataactttaccacttaggcaagtttgatgggagtgttattggttgcttgtgaggtttgggcttagggttatgataaggtggatgagagagatttaaaattttagtgagtttatattggatcgtagctactgtttatttacggtgcccaacaatttttgttttttctaataaaagaaatgtattgattaattacttttttacgtgggtctccccaggggtggagtgaggacttgattattagggggccaattattattttttttttaaaaaaatctataatgcacccctaactaaaaaaatcgctttaatacattttctatcattttt

SEQ ID NO: 159041 - DNA, 710 bp, Cannabis sativa
taaaataattccaacaaaaagacacaatccttgtcctaaacaagacatggtaggcacatgtccctatgaagttaatttgtctttttgggttaattaattcaatcagataaatatttaaatttaaaaagtagttaaagatatttcaaagtagttgtgatattctctcgagtagttaaaagattttctcataaatatcaataactgaatttggttatcgatatttatttatttaaataattaaatttgatttaataagtagagatttagctactataaatagaagcttaatttgagaaatcaaaagagctttttacattgctattttcgaaatatagagaagaaaaagaaataattttctctctcaaattatttttcctcatgtgttaagaattaacaagaacacattatatactttatcctaatagcacatactactccttgtgtgtagtgaatcaatttagaagacactggcgtgagttcaattgcatcatcctcatcatttggaataaagaatacaacatacgagaagtttcgaggataccttgatagtcatcaagaggtatatgttttaaacttacattttatgttttgatttaatgtacacgcatctgaagatccactgagctatggtacaatgataatcacgcatcctgatttagtaccataaaaaccaacacacttctctcagagttcctcttagtaggacccct

SEQ ID NO: 159042 - DNA, 573 bp, Cannabis sativa
cacaaacaacaattttttggggggaattttcaaaaatactattatttttatattttattaacaattttaacctaaatttttaattataaaaatattcttgtaaaattttaaaattagaaaagtacactttgcctaacaaaagttaaaaaataaggagaaatcaacctcacaataattataattcagctataaataaattacaaattagctagaaaaatactctcatcacaaccataaataaatataaaacaaaaaaaaaaaaaacagtttattatttttatagaaaatgtatttttataaataaaaaacttcaaagagtaaaaatgaaaattttgttgacctatttttgtatttttttttttagcatatcatgtaaatttttaattttttttgtctacaacatattttgggttggataagctataggcacgggcttagcctgtcctagtccaaagtcagacctacatgcaattattatatagaattatatagaagaaattacactctatatcttttttatattgtcctattttatttttaccatattttttaaagtctatcatttttacctct

SEQ ID NO: 159043 - DNA, 636 bp, Cannabis sativa
  modified_base (42)..(62): a, c, t, g, unknown or other
gttttagaaagttcttatttaggttgttaataaacatacttnnnnnnnnnnnnnnnnnnnnngtaaaataatttccaacatggcctgctgactaccctgtatgggtaattttatattaaattttctacttctatattgagccatgggaacaaattaggggctagattagactagacctttgacatacccatgggtgaatttaatacatatttaatttgtaattaacccaataatatttcccgtgtgcagtatgagtttcgtgataaaattatggactttggtgactctcagtacactgaagtaaagattcttagtgaatttatgaacaatgatgcttatagaatggaagttaatcaaagacctctaatagcgatcacaaatgttgtgtcttggtgcagtgacggaataaaatacaagaaaaatgaagtatgtcttcttctcttcccccttccttaaaagagtgatttgttttttatactctggacccactggataaaagtacttatttaacaggttttcttagatgtggtggagagcgagaatatctttgtgttgacttcgcttttagccaacgacaataagtctttttgataagcgataaacgatgtgtcgtgaatacgtaataaagcaaataat

SEQ ID NO: 159044 - DNA, 531 bp, Cannabis sativa
tttttggtattttaatccacatgacagttttagaatgtataatatttgacttcctgatggaaaaaattcaattttggccttcgttgttgttgacctcaaaaaatgatcaaccgatagtagggtcgtatagatctgatacttgccacatgtttggaaaaataagaatgaaaaataatagacaaaagatttgttatagaggtgtggcccccttgtgatagcaggtaagacctactctccttttagttgtattaatactgagggttaatactatccagatcactataggtggaatctgctataacacccttaggaatacaaggtatgaatcaataatggcaaaactcaagtgttgagatgatgctagtgtaggcgtgtgagagagggagtgaggaagagagagaaagtttgttagacacttagaacttggaggcaggttacatgcttagatgcaacttaggtttttaggctaaggttaaggcctttatataggaggcctaaaaccctaggttgtagtttaaatccctagatgtt

SEQ ID NO: 159045 - DNA, 606 bp, Cannabis sativa
atcccggattgtgctcttcgttcctcgatctggggttctgaccattctcacgttgagctctcctcgagcgtgttgttcgtgtactagaaccaatgtcgggtcgagttctctgggaatgcgtggtccacgcactggggccaccctcaggttgagccctcctagaatgggtggtccttctggactgggggttggtagatctttatggagcccatgggctctttcccataacgatgattggtttcctcatgtgggatgttaacattttctggattttcagccatgaaggagatgatttttcttcgaaagaatggagggttttttctgagctttttcacagaggccctctatgagagcaccaaactgctaacgcagattttcgttaactaaatttgagcctcacagtgatgatttcacacacaacaaataaaagctatagaaaagtaaagaatatgaacacagggttttttacttggttttgcagttaaaattttgcatagtccacgagtccatcttaatcaaatttttgagtatgtttcagggcctctttcatttgagtttttttgtctcttttttgatctttttgttactatttataattacatattg

SEQ ID NO: 159046 - DNA, 631 bp, Cannabis sativa
  modified_base (355)..(358): a, c, t, g, unknown or other
tttacaaagagttcttcgaagttcgtttgaatgttagcttctgactcgtcaggattgtaagcctcactgaagttaactggatgaagttactggaagccttcccatagcgagacgggtacctcgcttacttgagccgatctgaccgttacacttagtttgtacactaagggctttcgcaattgatatatgttgcttttgtcttcctaggtgtactgtccttgatgcctcgctattcacttttagcgacatatagtttctcgctaatataataagtaccagtttgtatattgatttctcgcctaagaccttatagccagcaggttacaaatatactttgatacttacgtaattaatnnnntattccataaaaggcgattacatccattcatatttctttaatcttgacacgtgtcctccactgagatggcagctgaatttcgggtataacatatttaaataatgaaaattacttaatttaagttgatcaaaaattaattttagactttaatttaatttccaaacaattatttcaaaaatctatttataattgaatataaaatttcgaaattatatcaaaatataataaattaaattcctgaaaaatatctaatttaaggtgttctaaaataac

SEQ ID NO: 159047 - DNA, 603 bp, Cannabis sativa
aacatcctcctcatccttccacaacaacgcaacacccccactctttccttgacagtccaccgccaatgctccttcaaaaccaatcgccacacgcattctttcaacaacatccttcttagcaagagtttcacacaaaaacaagtaactgggcttcttttggaccacaaggtccttcaagaattgttgagcccacgggttcccaagcccatggcaattccaagatataatactcatgatgacgggttcccaagcccatggtttttcagttatagtttaaactagatgactattgtaactggtttcagtgtgtcgaattccaacgtccaacaccagcgacaacttcaatgtctaactccggtgacttttcgataatgaagacaattctgatgaattttttaatgatttttttacgacgataacaacttcggcaaatattctcattctattttttacttttttttgcaactaatattttattttattggatatataatgactattttcggtagtgtagtgggttgatggttaagtcttagagcttttaagaagtttgtaactagttttattttggtattgtattcgatttgttcaatatttcataca

SEQ ID NO: 159048 - DNA, 728 bp, Cannabis sativa
  modified_base (305)..(305): a, c, t, g, unknown or other
  modified_base (418)..(424): a, c, t, g, unknown or other
aaatagagctgcaatgcagttctctcgagtcgactcagagtccaaatcgttcctcctaagcagactcacaaggcactccacctcaaaatatgagctggatttagagttctcggctttggaaaaacttaaaatatgagatttctacttttttttacaaaaaaaaaggcataaaaaaccatataaatgtataaaaaaaaacctgtaatcccatgctattatttatttatgccataaaaagtaaactatgagaactgattgtatttcaattataaccggtttgaattattttgtgttatttatttttnttcattatgttatagaatcagttcacatatgcttctcatgacttattatttattgggaaatttacatgatatactaacttttgctattttttaacaaaaatactgtcaggcgnnnnnnnttacttttttactgtgtttttttacaagtttcatactgcaatatactgtgttaaattttcactggtattttactggtagtttttagttgttctactgttgttttgagttgttctgctttgtgttttactggtgttttataaaaacatagtattttttaaaagatttccgtgtgacagtatttttgtagaagttaacccaaattccagtttgtaaatttccctatttatttatgtcataaaaaagtaaactattagaaccgattatatttcaattataaccagtttgagttattttgttttattt

SEQ ID NO: 159049 - DNA, 581 bp, Cannabis sativa
aactagtgactccggtacactacccctaacttgattacatactcagcccaaatcaccgacagttatagtgtcactactgccattgtatattggcaccatttattagaaccttagttcaattgtggttagtcatttcgttacgaagctagtgacttcggtacactacccctatctttattacatactatgtgtcacgggacccctaaacaccgacagtgatagtgtcactactgccattttacattggcaccactgagtggaaccttattttggtatcggttagtgatttcgttacgaaactagtgactccggtacacttcccctaacttgacaactttaaacttgacaacattaaacctttttttttcatctatatttgtataatatcaaaaaaattgttagaatcttatttcctgacgaaaaatatattactgtaatcctaaaaaattatgatgtgccacatgattttgaattatttttcattattaaaagaaataataattaactaaaatacataaaaataatgacacataattattaatatgaataataattattttaataataactgttgtcatatg

SEQ ID NO: 159050 - DNA, 566 bp, Cannabis sativa
  modified_base (511)..(524): a, c, t, g, unknown or other
tcaaaccataaattttttcaaacttattttattttattatttttaataaaattggaagtattctaaccatataaaaatatctttattttcaaaaagtttattttgcaatatttaaatttattaaattataagacttaggatataatattaggaatatctaaatttaaaattcaagatattatattgtattatcttattagaaatttaaataaatttaaattttgaataaacttgaaatttgaaaaattggttagatatttttggttttagttagaatttagggaatttaggagttggttaggtttttgaattttttttaaatattctctaacaacctcaatttaaattctagttaagatattttatttttaatttaaattttattttttttttgagatattttagcctactttctagatttttcagattagttacttgtttgtttgtattgtttgattatttaattataattattcaaaattctttttgcaaacctattatttatttgatnnnnnnnnnnnnnnttaacttgttgacatatccaataatttgattttaatcatagt

SEQ ID NO: 159051 - DNA, 586 bp, Cannabis sativa
ggaaaaagtttttcggacccgaaaatttttggtgattttaaagtctttgttttacgtgttttcgatgcatgaaatctatatgaatggcttaatttttgcatttacattcatttagaatttatttggagtcttttggtcgtcggaaacgcaatttttgatcgggtttgggttgggtccgtcggacccgcgtggttgaaaaacaggtcaaaatgactcagtctggttgaaggagacgactcaaacgacatgtcgttttccacagtgtgaaaaaacgacgtgtcatttttcatgtttgttgctgctgtagttgttgcaaacgacatgtcattttccacactgtggaaaacgacatgtcctttttcatcttgtggggcagccatttgattagtaaaacgatgtgtcgttttttcccttggggaaaacgtcatgttgtttttacatgtttcagcacccctcggaattgataaaatgacgtgtagttttgcgctttgcaaaaaacgacatgtcgtttaggcagtgccatttttcaaaaaaaaaaaaaaggaaaaattccgaatttatttataaatttttatttatttggaat

SEQ ID NO: 159052 - DNA, 521 bp, Cannabis sativa
ggtcaaagaggttttgttggcatcatcaaatggtatggagagttctagaatcatgaaatttgtaaaatctagtgttccaacgaatcttcatgatgttgcaaatctgaagtctgctgcaacagcttcacaacctgttattgtagaagctgtttctgctaacgcaaaatcccaaggatttacaaaaagagtaagatctgaggtaaaaacgatttgttcctacttgtcatttttgtggtagagaaggacatatccgacctaaatgtttcacgttgcaaaatatgtttaaaacaaattatttttgtaatttggaaaaatctcaaaagaaacacaaaggtttgaaactaaaatgggttaagaaaaagtgtctagctagtttttctaataaaagtgctgcatctcaaatgtggtattttgatagtagttgctctaaacatatgatagatgacaaggactttttgattaacattcgacctatgtagtgtggggaagtcacttttggcaatggcttagctagaaaagtc

SEQ ID NO: 159053 - DNA, 705 bp, Cannabis sativa
ctaattacaggtatgttattagatgatgcacctccattatttctcaatttaaatagatatttatgtttataaaaatcagcatcattagattttaaaataacatgtgcatttaaattataaaatctatatgctttactattatcatccatccaataaacacacattcatatgctctattagcaaatttaattctcttaggatgaagaattttaacatatgccaaacaaccctaagttttgaaatatgagatgttgagttgtttatttcttaaactttcatatgaataaattttgctttagatttaagaactctatttcatatgagtctatctatttctttactatagtggcaaaatatgttaaagtaggtgaacacagatatggtacaattttttacaggtcgggttaaagtttagaaaattaaacgtaaattgaaagtgaatcaacatgcctaatacgaaatataaaaacaagtcaaacaaaatatgacataaacactatacaatgacatattttgtcaatcctatattaaaaatcttaaaatgttcaacactatacaaaaaaatttagtacacattttcaatattcttatttatctctaataaaagataggtgcatctttttcctttctcaaattttaggttcagttctgttcgatttagattttataaacttttttttagtttttaaaattaaaaaaataaaa

SEQ ID NO: 159054 - DNA, 627 bp, Cannabis sativa
tgtacgggactttcgaagttgcgtgtagacttcatccgagctgcttctgcatttggatgggtcgcatctattcgcgacaaaatgtgaggctgactgggcctcccttcagttttcggctaataaatgctctgaaaattaacatttggaaatctaattttctctcaccacggttgacagctacacttgattattttttatttcccatattctcttttaaggggggaaccgaggcgtctaaggttcttttgaattgattacccctttctcgttgtttgcctataaacaccagtgagaatttgtacacagactcattttcaccatccttctttgctaagtaagttcagagcgaaaagagaggtttttggcttcgagtttactgaagtgccttcatcaaaactgctcgtttggctttgcgtaacctaaatccaaaaatctgatccttgagtaagttctcgatttcctttacgtttttcttccacatttactttttgaatgcaccttcgactttgctgtagaagagacgtaggaaaccctaaatttagaaactttgcgattttcctttgtcatggttcatgcgatttcaccatccgtaattcttgctttttgaactgcataatgcctgtcttt

SEQ ID NO: 159055 - DNA, 594 bp, Cannabis sativa
  modified_base (457)..(463): a, c, t, g, unknown or other
gtcctataaaatggacgcccagcgaaatacaagaagtcagggtaatatggttgagaccggaggcggtcagggaagccaaaatccccagaatccccgtggtcgcggtcgtggccgtgtcagagctcagggtggtcgccctgtaaatccaccacaagctcttctgtattgggagcagaggtttgcagatattaaagatcgaatccgccagcaggatgaagaaattcagaggttgaggcagcaaggtcctcctgttgtgcctcctcatcaagtggctgaggccgttgcagttccagcggtaccagcagaacaacctgttgctggcaaccgtatggaactgttgtatgaaaggttccgtaagcaagcacctccagtgtttctgggaggtcccgatgtgatgaaggctgagtagtggctcacagtgattgaacgaattctaaattttatgggagtggttggnnnnnnncgggtgacctgcgccacttttcagttacgggaggacgtcctcgtgtggtgggagttgataaccctcactcgggacgtcacaattatgacctgggaagaatttaaggagttgtttaactctaaatattacaa

SEQ ID NO: 159056 - DNA, 695 bp, Cannabis sativa
cagtagatggacatctgcaagtcattattggaggccctcacatagctagagattctaacaaagctcgaaagaggtatgcctgaacagtatagcatgagcaagaagaagtaatcctggccgtagaagagagaaagccgaaaatcccatggacaggagagcccaccataacattcaatgatgaagatgctgtcaaaaccagatttccgcacaacgacccattggtcgtggaggcccagatagccaacaagatggtggctagaactataatagataatggagcctcttccaacatcttattcaagaccacatatgaaaatatggggctccaactcaaagatctaaccccctgtcttcttcccatatatggtttctctggccaaggagtcgcacctctagggcaaattcacctacccctcactgatgggaaagctccgatgagcataactataatggcacaatttctggtattggaagttccatcagcctttaacgtcatgttaggccgaccagccttgtatgacttaaaggttgttacatcgatattccattcatgcctgaagtttccaacaaagaatgggttagggtgtctaagaggaaatcagtatattgctcgggaatgttataaccttgatgtggccaaggctaaaaagaaagtatcctctagccagagcacagacaagggaaaaaaacatttc

SEQ ID NO: 159057 - DNA, 601 bp, Cannabis sativa
tcaatgcccgaggaattgaagccaatccagagaagattcaagccctcctagatatgaactcgccaacaaaaaaaacgaagtgcaaagtttgactggtcggatcgccgcactcagtagatttgtttcaaaatctaaagataagtgtgtcccattctttaacatccttcgaggaaacaagcagttcgagtggacggaggaatgtgaaaatgttttccaagagctaaaagcacaactcacaaaacctcccgtactctcaaaacctctagatggagaagaacttgtaatatacttagctgtcacggaacatgccgtaagcgccgtgctaatcagagaggagaacagcgtacaacgcctagtctattacatcagtaaaagacttatcgaggccgagggccggtatccattaatagaaaagctcgcatactgccttattctagcaacaataaagttaatgccttatctccaagctcatcctattcgggtatacaccaaccagccattacgcgatatattgcaaaagccagatgcttctggacggctactcaagtgggcggtagagttgggccagtatgaaatcactttccaaccccgaacagcaatc

SEQ ID NO: 159058 - DNA, 606 bp, Cannabis sativa
taaccccgatcacaacctggactcgaacttagactaagatcatgacctctaccgagacccagccctaaacttggaacatgccctagacccgaactcaaacccgaatcccagacccccaaacctgaactgggacctggacctgaatccaaacccgaactgcgacttagaccctgggttcagggtttgggttcaagtttggtgttcggggccagggccgaggtccgggtccagaattcgggtccggagtttaggtccggggtccaggtctaggtccattcattatcttggaagaaaatagagtgacatcataagcagatgtattataaaccttcttgtccaataatatattatcttaaggaatttcttaatgaaaaagctaagaggaaagataaagataaattccgattaaaataaaaatccaacgatgtcctgattaggagagagtcaaagttattcttattttataagttctccattatttgaacatcataaatactagtctaagttgtcatctattggggatgagtcgactaaattttgcatttacaaatacttatctgtcgagatctaacacttttagaatgtctaatggatgaccatctattg

SEQ ID NO: 159059 - DNA, 676 bp, Cannabis sativa
aatgagaaaccctatcagttgtacggttgtgagttgaacccggtggctaaagcttagttgtattttgtgagtgctaggttgatacccaacaagcacttttctgatgctcaattggatagactaaaatatgtatatgccattatgaaggggtttaatttgaatgtgggggttattattaggcatagctttaacttgatgattcaaggagcctacggaggtggccttggtctagctgatattgtcactaatatgtgtgaggcatttggggtgctgcaatatgcctatgatacgaaggttcctccacagcgcatgattgatgttgtagcggtgcttagatttaaagctccacatccacatggccagccacctcctccaccacaacaaggagccacaaggcctcctcctgaacgcgaagacaagcatgttgaagagttaccaaaacgtattgctggccctcttgatccagccatgcagtacatacattaccagctgaattatcttattcagcaaaacattcacatgcaaacttacatggcgcaacggagtgtctttgatgaaaatcaattgcagtagctgaattcacttatcactaggatgaatatcgagattgaggagcctaattacttggcaaatccacctcgtttttatccttatgatcagccacctccactaaacc

SEQ ID NO: 159060 - DNA, 540 bp, Cannabis sativa
gagaggacatcctggttattcatcctggttattttgggagggtcggttattttgggagggtcgcatattgtaggggaaagcaataacggtcagaagatatatatgaaggagataaagaacgagcaatcagtctttgccccagaaccttccaagaaggtgaaaattgaggaacccccgtttacgttcacaaaagaagacgagaagaatgtgagataccctcacgtcgatctgctggtcataaccattcaactcgccaataagatgatcaagagagcattaatagacaatgggagctcggtaaatatcatttacaaggagactctaaagaaaatagggctcgaaaaggccaagttaaggccttgtatggtgaatctttgcggtttcataggggatagcatcgctagccttggcgtaatcgagctcgcatcaactttaggtcaggcacctttaattgctactgttatgcaagacttcttggttgtcggcctgccctcagcttacaacatattgttgggtcgtccagcactgatcggactaggg

SEQ ID NO: 159061 - DNA, 586 bp, Cannabis sativa
catattgtctatctgcaatttgcagcaatcatgcaagtctccgcactgaacaacccatctgttgtagtgtttccctctggattcacacaccaaaactgaacaagtaccttgattcttcaaacatatgaagtagtgggctcccctacttcaacttgggagaaacttctctcttagaggaatacccctcaagatatagctcgcaagctaatctcatactcgcatacggttcctccattccacatgtcactttgatgaagatgttgaactaatgcctcggtcattctgactcttttcccgttgacatttcaatgttgccttaataccctagataactggcattgcctgtgtcctgagtcttcttgactttacatcttgaacaacaatcaatctccatgatactcatctcgatgcttgtaatgaatctctagtctgttgagtgaaccgtgaaggtctatccccctcttcatctattggcgtcctcgacaacatgcccacacgcaaatgcctgatcaccctaactcttcatgcacaccatgccatctaaaagtgcatcccgcaggatgtgactctcgagtcaactatctca

SEQ ID NO: 159062 - DNA, 609 bp, Cannabis sativa
  modified_base (27)..(41): a, c, t, g, unknown or other
tatgtatttatttcatcgttttagaannnnnnnnnnnnnnntgttaataaacatacttgtgaatagatctaagattctggtaaaatctaatccaacactatctaccacctttgcctgaagttcccaacaaggcatggggtaggatatttgaagggagaccaacagtctactcgtcattgttacaacttggccttgctcaataaagagtgttgattgtataatttttacttttattttattaccattagtaatttacaatctaatcttaattttagaaaaaataggaatagtggaatcgcttaaatgatgcatgaatattgtcttgaaaaagtttgatttgtaaatgacataggaatatgttatttaccttgtataacttaaaggaattatacttaaattggtattcttgaactttattgggcataagaatatgctaattaattaaagaattaaaacatcaatactttagaaaaattctagttgacaattatcaatttacaataatattcatttgtaccattatatcaattttgtatttttaggccaatttaataattctagcttattttcttctcatagtttgtgttcgttaatttttacatattctca

SEQ ID NO: 159063 - DNA, 951 bp, Cannabis sativa
attgtgtattatggaattaaacctatgattgtattagtccattataataattctaatagaatatagatttaagattgtatatttgagtaatattatgtagaaggattctttaaaaaaaaaattgtagaattatatatgtaatttaaaatgaactttttttggctaaattgtctgaattatcttccatttgtatttaactctttaagctcaaattttaatggtaaattttctaaaatactgaattgttagtaaatttaatatgtcatcaatttttcacagtaaactactaacatagattgcttatgtatatacttatacacgtgatacatttatattggtacaggtactactattattatttaaaaaaatataaaaattatttccaaatttataatatatatatatattttaaatatttattcttatttttgtaattttattttattttaaataataatattaagtgtatcaatataaacttatcacgtgtacaacattatacacataagcagtccatggtagaagttaactgaataacactttaaatttgctaccaatttactagtttagaaaattttactgccaaatttaaatttaaaaggttaaacataagtaaaccaacagccaaaaactcatttaaattttttataattatggtttaaggcctgttcgctagagtaccaaaattcatagacaatataaaaatcatgaaagacagacataaagtagttggtttaagtgtaaacaaaacagttcttacttaaaatacttctatcatcatcattctatcaattcataattcatgtgaaattatcgaaaaattaaacattgttttgctattttagaatataacaaaaataagtcctaattattttcaaaataatttaaaaaaaaaaaaaaaagaaaaaagaagtcctaattttttttccttttattgaccatgtataaaaa

SEQ ID NO: 159064 - DNA, 501 bp, Cannabis sativa
  modified_base (261)..(265): a, c, t, g, unknown or other
tgtttcctttattttgtctttgttttatttggaaagttgtctttcttttagtttcctttttcttggttgtaagttggctatataaagccttgtaaacatttttaaaaatcagaatattttgaattaaaattttgagaggttttcttcttgagttcttgagagaactattcgaacttatcaaggagtattccttgtgacgttcaacctgacttatcaaacggatttccatcaccgtttgtggcgtcttccttcataccaagnnnnngcttaactaagcattgggtcgcggttccacatccaaatttcgagaattcttagagtttgccatatttggtgtcgggtttcatcacaactgttggtgtgattcgtatcatgcttactttaggcaaataataattagagttaggttagtagtggtaatccaagctagaagaatactcatatacatttggaataaatttaagtctttgactttaaattttagactccaaatagaaattt

SEQ ID NO: 159065 - DNA, 538 bp, Cannabis sativa
gttcttcttgtgttaaccatggcgcttgatcagatacgatagccacgctctcaatgaaagcaccaaacttttgacctcaaaagtgatcaaccaacatcggggtcatatagatctgatgcttaccaggtgttgcacaaataagaatgaaaaagtaataaacacatagatttgttatagaggttcgcccccttgtgattgcaggtaatgacctactatccttttagttgtataaatatcgagggttaatactagccagattactatagatgggatctgttgtagcacccttaggaatacaatgtataaattaagaatttcaaaactcaagtgttgagataatgcttgtatgggcgtgtgagagaggaagtgaagaagagagaagttgtcagacttaagcttagagcttggaggtaggtttcaggcttagattcatcttagattttctgggttagagttaaggcttttatataggaggcctaaaccctaaattacaacttgaaaccctagatatttgtacactatattagttaattacaaa

SEQ ID NO: 159066 - DNA, 521 bp, Cannabis sativa
gtaagattcttgagtgatattgtgctccggttttccaccaacgcccaccgagaaacaaccattcaacagggaagagagagagagagagagaaggacgattgtttgaaaatggaaggggtattttggggtttaatgtaaagtgtacctattttaacaatttagatatatttaaatttagggttaaaatttacccctaatgcatgtataattagtcaaatttccctaaattaaactatttttaagcgaaatttacgctatatactaattttttattaaattttttacatttatacttgtacacggtattttttataaaaatattatacaaattttattctatatactgtatattgtacaaaaagtttttattttttattttgttttgccatttgtcatgtcaaatttttgtcttattttttaataataataaagcttgatttgatttttttttgaataaaaattataagatttattaattaataaattcgttcaaaataatagagcacacttcagaggaacag

SEQ ID NO: 159067 - DNA, 616 bp, Cannabis sativa
accatccgaaggtattgctcatgccccgcttctgattaagagtacataaggatttcatcgataaatactatagcatatatatcaaagaaatccctaaataccctattcatcagatccataaaagctgtcggagcattggttagtccaaaagacataacccagcccatacctagtgcagaaagcagtctttggaatttccttctcttggattctcaactaatgatagcccgatcaaagatcaatcttagaaaagactgtcttcccttaaagttgatcgaacaagtcgtcgatcctaggtaaaggatacttaaagcacatgcatagggatccatctttcttcttaacaaacaacacgggagcctcccagggtgacacactaggccgtgaaaacccttggtcaagcatcccctaaagatgaatctttaattctttaagctttgtcggagccattctataaggtgctttagaaactggctgcgctctaggtgctaatcaataacaaaatcaatttcttgctgcggtggtaaactcaaaagttcatcaagaaataatctaaaaattcctgaaccactttgatgtcttctagctaaactgattcaggccgtgtggtatccaa

SEQ ID NO: 159068 - DNA, 573 bp, Cannabis sativa
agtttgtatacttgtttatttgcaatttatatttatttttgccatttttgttaacttgcaggtctgggattacaaatttagtccctctgatttttatagatccaaatgtttttgtacaagcaatttttctgttattgataatataaagaatactttatctgtgaatttattgtctatgttccgtgacacccaatttggtcattttgttgatatacctgattttgtttttcacccccaagttgtacatagcctactgttgagggaagggtaccagcccaatcctaaagaattttgagctaaggttgctagccattgcatacggtttagtgccgaggagttttattcaatcactgacattgattgttttggtgattgcaacaaattgttgttttcccaggaatcaaaccagttgattggtgtttgtttctgtggtgtaaaaaccattgatcataaagctattgaggatgcttttttggggagtaggtggggttcggacgagtctcttggtttgaaactgtctatgttgtattttatccaatgttttcttcttagcaatactcctgataaagaagt

SEQ ID NO: 159069 - DNA, 828 bp, Cannabis sativa
tatatattttttttttctcttctcttttttttttattttatttattttaagtttaagtaactattaatttttgatgtatgcatgacacctcaacaaataaataacatcaagacttcaattttcaatatttcttcatattttggaggcatacaaactttttttctttatatcgacaacttcatcatcatcgatatcttcacattattcatgaattactaattagtataaattttctttttattttttcttttgttttttttatgaagattctccatctatctctaattctatttatttttttttctctttttttttttatttgctttaagtttaagtaattattaattttttatgtatgcatgacacctcgacagtaacatcaataaagatcatgaagacctcgattttcaatatttctctataatttggagacatacaaacttttttttttatatcgatgtcttcacattattcatgaattactcattagtataaattatttgatgtaaaaaagtgatattttgataagaaattcattctaaagctatttttctctactctccttaattctctcatttttaatattttattatagcatagatctataaattatattttactattattttaataaaccaatcaaatccttaaatatctaactttaaatcttctctaatttttaaaatacatataactctaaacttataaatatatattattctatactagttgaatgtacgtgccgagccacgtattgctaatttcatttaagattttagtctttttaagattttaaatatattttatttttaaaaattacaaattttt

SEQ ID NO: 159070 - DNA, 546 bp, Cannabis sativa
gaaaaataaaatgacaaagtaattttttactctctctaaaatctgatgcctttttcattgtatttagttcctttttatagtgcaaatttgctcctcaaatatgacatttttgtgtaccatttagtgagataaatggcacaaaaagcttagaaaagtggaagacaaaatgtcccatttgcgtcaggcagagtggggggacaaagtgggtttaacgtggtacttgtgtctgtagaagaagtccactcgtccatatgttgagctaataatactaactatatataaaaaaaaaattatggtatatttaatactagtgtaaagcacattcaaggtatgccctgctagtatttttattttattattttttaataacattaaatgtatatatataaaaaattatgatatatttaaataaaacacaaaaataaattaatatattataaaataagggatgtgttgtaatgaccgctttagtaatttggattagcaaggacaattaacaataatttttattattttattattatttatgaatttatttaattgtgg

SEQ ID NO: 159071 - DNA, 555 bp, Cannabis sativa
ctgcaactttgccttccacctttgttgatcttctccttggggggttatgcctgttctggattcaggagcccgaatgtgggactgggttacttttctatggaatcttaaatccagaggagttgatacggatgaactattcctctatgcctcgattgtggtagatacaatttggagggcccgcaacgaaaaggtacataataaatcaatgggtaacattaaacaatatattgactctatttcttcatgttacacagattatggctcctgccttctttcccctccacagtctgttgggactaaggcttggtctccgccgctggaagattgggttaaaatcaactgcgatgttaaagtcgaaggtgaaactatgtgtgctgacgattgcgagagaccataacgaattagttttgtgggtggtggcaaaaaggctacaattctccgacccactcgctggagaagctacggcttgtcatttagccatggagacagcggtctcattgtatcatccttttgttttggtggagagtgattcagagattgttatcaagaacctaa

SEQ ID NO: 159072 - DNA, 526 bp, Cannabis sativa
gaaatacttgggtccagaatcagtgcaacggactaatgaagcaattgagaagattaaagccagaatgcttgcctctcagagcaggcaaaagagttatgtggacccaaaccgcaggaatgaggagtttcaagtaggagatccacgtgttccttcgagtgtctccaatgaaggggatcaaacgtttcgagaaaagaggcaagttatgtcctagatttacaggaccttttgagattcttaagaaggttggacaagtggcatatcgattagctatgcctccagctccttcagcagttcacaacatattccatgtctttatgctaaggaaatacgtttcagaccctggtcatgtagttagctatgaaaatcttgagatgcaactagaaatgtcatatgaagaacagccagttcagatacttgacaaaaaggataaggtacttcggaataagaccatagctttggtcaaagtactatggagaaacaacaaggtggaggaagccacctgggagttagaattagacatgagagc

SEQ ID NO: 159073 - DNA, 874 bp, Cannabis sativa
aagaaggaagatggctcaccaaaaactgatgaatcaaatttcgaagtctaattggcagcctactctatttaattgttacaagaccagacataatgtacgcagttagtctcctatgaagattcatgcatgatccaaatcaagttcactacaaagcagccaagcaaatcctcaattacttgcaaggaacaaaattctacggaatatggtacgaaattacaagtgactcaaaactcgttggctacacggatagtgattggacaggatccatggacgacatgaagagcacgccaggatatgccttcacacttagattagaaatgttttcttgggcatcaaagaaacaagtaacagttgcacaatcatcggtagaagcagagtatattgcagcaacaatgactacaaaccaagctatatggcttaaaagaatactagaagacatgggagaatcaaagaaggaggctacaaagatatattgcgatagcaaatcagctatatcaatggcaaaaaaatccagtatttcacggttgaactaagcatataagcatcaagtaccattttatcagggaagcagaagcaaacaaataaatcaagctcaaacactgcaagactgaagaacaggtagcagacttattcacaaaggcactaccaagaggcaagttcgagctactacgagacatgatcggagttactgaaatgtgtatcaagaaggagtattagaatttgctacacatttctacacaatttagtctagaaatttctatacatttgtagaaaaagttatctaagaacctaataagagatttctagattagattaagtctagaatatactagttatgttgaactctagaaacatttagatttgtttggatata

SEQ ID NO: 159074 - DNA, 514 bp, Cannabis sativa
aagccctaacttcaaacgataagttgctttcttctttctcatgttttttgcatagtgtggataagttacttgatttgtttgtatcgttatcatctcatctggttttggtagttttttagggttaaaactgttcattaggatttaggcaatatgtaggttgttttaagatctccaactcattaccttctggtttgataaaattctctccaaggattgggactgctttttagctggcagctgaatgtcccactctagttcaggaatttatcgtccaaatgttttagagttcgagtttcctacagaatcggtcatcccatataaacaaaaaccctcaaaacccacctccaaattagagctaaatgatgctagggttagggaacacatagtgagaacccaacaggaacatatttctagtcgctacaagtgcttcttgtaggaaatatccgaaggcagacgtcgattcttgcgagaagcagcctggccagaaccacccagcgtgtcctttattcttgtg

SEQ ID NO: 159075 - DNA, 564 bp, Cannabis sativa
  modified_base (45)..(50): a, c, t, g, unknown or other
  modified_base (265)..(269): a, c, t, g, unknown or other
ctacctatttataggaatctacctagggttaggttagaattattnnnnnntaaaatattgaaaaattaaatggtaaattttcctttaagtggtcggctatagatatgggccgcactttgcaattttccatttttttcaactatttatcttatttactcaaatatatcatttttctaattcaaccacttaaatgccaaaactaattattttaatcattaaataaaatttccatttaatatggttattaattagacttaataaagtnnnnnaattaacaaataaaccctagaaagctctatatgttccacgatatagatacactattaactatctattgttataatcccaataattaatgatcctctatagatgatctaaatttgcatagggacaaaattaccgctacaccctttcaatgtattttatccttaaaacacttggcgacctataaatgatattttagtgaactagtataatcactaaaatgagcatgctatcatttatctctatgtagcatagctcgaaggaaatcatcgtttgacttctatgtccagatagaagcta

SEQ ID NO: 159076 - DNA, 526 bp, Cannabis sativa
  modified_base (75)..(76): a, c, t, g, unknown or other
taataacatccaaaaactaaactaattgagtcataagaaacatagaacatgacaattattaaatcaaaacttatnnccacctaattttaaccaaaaaaaaaaaaaaaacaaaagtctaaagataattcaaccaacgacaaccatgaggtatatcaaatctactaaccaaaaaggttgaaccaacaacattcggaccattgggagtggcatggacaacaacactcttgtagtacagaaatatggagtcatttcaagcaatataaacctaaaccagatcaaacttgtagtttaaaaacacgatcataagaaaatacaaacacaatattgggtttcatcacatgtaatggaatgagttataatataataatatattgcatctagttagaaagaaacaagagaattttaattgagcaatttatgttaattccatttttggaatgtttaattgacaaaaatattttattattctttgtataatttcggctggtatactttaatatggtttcctatttgtgtatatctaaac

SEQ ID NO: 159077 - DNA, 762 bp, Cannabis sativa
acaacactaagctacatgcaaagctgaatgcctaacagctcgcattttataggaatgtattaaaatgacgcactaagatgccttgaaaaaaatacttaatgtaatgtgtgaataggagccttaactgttcatacgaggaatcaaaaatatacaaaacaattcacaaggtgaattattaaaagtatgtttaagtttgcttaaatcacattataattccttacgcgaagaagaactgataaactgctagcaaagcatagcaagtaacaacttctcgcgtacatcatagattattaaccacttaagcaaggtaaaaggaaagcacgatcagtggaaatctttaaagtattttaaatttgatcaaagtataattgtttaaattctgagtaaaaatgcaagtaagaaaatatattaaattcaaatgcaaaaatacgaggcaataaataaaagataaaataaaaagaaaagttggtcgtccaacaatgcaaatttgtctttacattaaaaatgcaacaaggggaaaaccgttgtctcggccatttggccattttcctaaatatatatataaaaaaaaacagcttaaaaactgagcctacattgtaggagacttagttggatcttcttgttccacttcaacctcttcttcctcgcccaattcttctatcctagtcttctctcaaaaggcaagtatggcatcagcattgtcgcctagaaagctgaaatccaaatcagggttggccaaccagatttgatagatggtcttcc

SEQ ID NO: 159078 - DNA, 788 bp, Cannabis sativa
gcatcgacccccactccgacacgactccctacctcgaaccatttctaaatagggaaactaccatgtatattgcatttttgattttttttttcatttttacgtttatttagatttttgttcatttttataaaagttgttattttaaggttatgctgattctattttaaggtcatgctgtttctattctataaaagttattttcattttaagtttatgcttattaaatttcgaggttatgttgtttccgtttttataaatgaataaaaaatcaattataaaaatataaataaaaaaactacttataaatattataatacaagctaatgcgaaactatatttttatgtattaaataatatgattcgtattgtattaaaatttataattataataattaatacaacacaaaattctatttaagtgtaatattcttcttatttaataaaatacaatttcttatattgtcgaacagtttgggagtatattatttaatacgttattaacttaaggtgtcaaggtgtcaaatgagatgatatttattaaattagtatgttgtttattaaattaaaatatgttagattcaatcaaaaactaaattatattaataaaaatataatatatatactttgtacacattacaaaaaatgtcacttttactagcacagttcgctactatggtggtaaaagttacttctaccaccgcatttcgcaaactgcgctggcaaaaaggtcaaagttttaccagtgcatatttgcagtggctaaaatctaacttttaccagcggattta

SEQ ID NO: 159079 - DNA, 817 bp, Cannabis sativa
atatatttttgagtaattaatgtacaattcttttgtagtcgtgttttatttttaagattatttgtgtgttgtttttatttaatttttagttgacacaatgtgttcatggcgaattaattttatattaaaataaaattattatcgtgttgtttattcgttgttattaagttggttgactaagagaaaaataagtatatctttagctttttatgggtacatatattattgagttagtataaatgtgttttgtagttgattttaaatgtattttatacattagtggtattttttaatttcttagaattatttttatgcctatgtaatttgcatattgaaattgattttttatgcagttctttttattattatatagttgtttaaccaagagaaatatatatatatatatacatattttttttataatttgtttgttgtttttattttatttttttaactttacgcaaatattgatgtccaattaatttttatatcaaaatagaattgttattatgttatttttttgttgttattaggctgtttaacaaagagaaaaatgagtatatgtttatttttttttaatgtgtagatatattttagagttggtgtacaagtattatgtaattgtttttaaatttattttatagattatttgtgtattttttttttcttggatcttatgcaattcatggagttgttttcatgcctatttaacttctgtattataatatagagttgttaatttgttgttatttagttattcaatcaaataaaaatgaatatatctatatatacatgtttattttattttatacattag

SEQ ID NO: 159080 - DNA, 529 bp, Cannabis sativa
aaactgtctccagaagttggtttgtaacttattccagcaacccacggatcctggatccaatttcttgaaccattcttccgcggatcaacatagagtaagcgggaagcacaaacacttagcgtcattgctgaccctcatgactttcatactcggttgaaccgtgacaggtgatcacttggatcagagttcctagtataaacggccatttcgggcatcttaaagtttttggggagctctgcttccaggatgtacttagcacctggcccccggtcctcacaatcagagtcggagttgtcgcctttctgtctctgggagactcgggcgatgtcttttcgaagtatggcaagttttgccatgattctttcgtttaacgttcccgtggagaccgcgggtccgtatttcttttggtctaggtgatcccagagatcaccttggttaacgttaatctgatttcgcagatcaatgggaggacatttctggccccttcttcctctccctccgggctcttggtgcacggaaacgctctttc

SEQ ID NO: 159081 - DNA, 880 bp, Cannabis sativa
tgagcaactttaatttgttctaacagaccagattgcagcgtcaagttatgaagttttcctacaacaaactcgatgctttatctaaccacatcctctgctaattgaggtgaaatctgaaccatactagttacctgcccgggacccttcctgctcagggcatcagccactacattggcttccctaggatggtaaaggatctcacaatcgtaatccttaaccagctctaaccaacgcctttgtcttatattcaaatttttgtgagtaaagaaatatttgagactttaatggtcagtataaatttcacatctctccccgtagagataatgccgccaaatctttaaagcaaacactattgcgacaagttctagatcatgagtcgggtatctttgttcataatctttcaactgacgagaggcataggcaatgacccgatcagcctgcatcaatacgcaccccagacctgtgtagatgcatcacaataaactatgaatttctctttatcagaaggtagggctaacactggagctgtgattagtctttgtttcagctcctgaaaacttgcttcacacttatctgtccatacaaaacgctgattctttttagtgagctcggttaagggtgttggaattttagagaacccttctacaaaccgacgataataaccagccagacccaagaagcttctaacttttgtcacaattttcggtcgtggccaatccctgacggattctatctttcctggatccaccttgatctcgtctttactagcaatttgcccaaggaaagacacctaagatagctaaaactcacatttcttgaacttggcatataacttatgttctcgcagtcgttgcagaaccatccggagatgttgctcatg

SEQ ID NO: 159082 - DNA, 536 bp, Cannabis sativa
gtttgagaaattgaaaaaacgcatgtgcaggttgatttgaaaaactagtcaaaaactgcaccacctgcaccgcgaacaccactagtctcattgtccatatcagagttagaaaagcagaagtagatttgataaaaaataattttatctaatataaaccataagcccaatgatgtcaacataatatatatagattaaatctagactaatgaatagagagacaatacctcttgtagcctatcaaggaatctttgttatcttttctcgtatcattatcgaacattcaatccaagaacttgatgaagagttcagaacataatttttcaagccaatttcaatactcaaaaatagagtgggctattagattatatagaatgggtataattatgcaaccatagtatattctcaactcatgagatattgtgatgagataaggttgatcagaaaactcacaccacactgatgtgtgtagtgcgtgtaagttgaagagagagagagagagagagagagagagagagtgaaaaatcaattttattttc

SEQ ID NO: 159083 - DNA, 766 bp, Cannabis sativa
ttacgtctcaatttacgtctcaatgtgccttgaggcttacacctcgtctcacaaaaaaaaaacgtcttgaggcttaaatccacaattttaaatattagttctggaacaccactgtaatctttctttattgattaagcaaaaataggtacaatacagccgagacgagactttttgttgactccacaaagtttttcaactttcacactttacacccaagaatattcatttacatctcttttctttgcacctctctctacctctcaatgttttctctctcaaactcttaatctcatctctaaagtgtcacctaaaataactagacaaggtggtatttatagacttaatatcaagatcctaaagtcgatcgttgcaagaaatgaggttgttaagttagttaaaaataactagcttaactaactcctctttaagcgaagtctccacgtcagcttaagtaccagggtactcgctgaagacactttcagataagataaagtctactagagtcgactatctggatcttccattttaggaatgacaactagccagctggaacttctttccagggaacactacaagaaatgtcacttttgccagcacatttttgtgctggcaaaagttagtattacgctggtaaaatagaatttatttgtgatgcgttggcaaaaagagattgacaaatcaatgttggtattagaacttttgccagcataaaatgaaaagcgctgataaaagttagattttagccactgcaaatgtatgttggtaa

SEQ ID NO: 159084 - DNA, 699 bp, Cannabis sativa
tggacggaggaatgtgaaaaagcttttcaagagctaaaaacgcaactcgcaaaacctcctgtactctcaaaacctctagtcggagaagaacttcggatatacttggctatcacggagcatgttgtaagtgccgtattgatcagagaggaaaacaacattcaacatctggtctattacattagtaaaagactcattgaggccgaaggccgatacccattgatagagaaactcacgtactgcctgattctagcaacaagaaagctaaggccctattttcaagctcacccttttcaagtatacactgaccaaccgttacgccaaatattgcaaaaacgggatgcctctggacggttactcaaatgggcagtggagttgggccagtatgagattaccttataaccccgaacaacagttaaaggccaggccttagcagactttgtcgtagaatgcacaggcaaggaagaaagcgtatcagagaacaaccccgagctagagcaaatacctcagcctagtaacaatgaagacaagccgacttggaaactacatgtggacgggtcgcctacagatcaactatctggtgcaggaatcgcccttgttacacctgagggggtagcacctgcacgctgcagtcaagtttggatttaaagcatccaataatgaggccaagtatgaagttttgatcgctggtctaaaactagc

SEQ ID NO: 159085 - DNA, 573 bp, Cannabis sativa
  modified_base (518)..(518): a, c, t, g, unknown or other
gcaacaactacagccacaaatttcgaaaattctctttggaacttaagcttttgaatagaaaatccataactttaaacaaattaactatcatgaatcacaagcagcttaattatcttcaaataatcatgctttaaaccttagaaatcacatcaaaaacacagcagcaacatcaactccactaagcatgcaaaacactaatttttttttccttaaaacacaagaaaacaccaagaaaagctacaaggaaaaatacctaaagtttaagcaccttaaaaccaagatgattcttgctggaaatgtagaagaaacacaccaattctagctgctcaagaagtggctgaaagagagaggaagagagaaagcaaatttccaatttttctaattttcttactttgaaccaaatgagaatacaatgcataacccaacatatattcaactaaaaataaatcaattaacaattaaatttccgatttcttagtccacaaaaggacaaaacaataatggggcaaaatgaccantttgccccttcacactaaaataacataaagagcactaaagggggtatttttggga

SEQ ID NO: 159086 - DNA, 635 bp, Cannabis sativa
  modified_base (144)..(152): a, c, t, g, unknown or other
catgacctaaggaatgatctgagcagaaagagaggagtagacaatcagattgtcacgacgatcgtacagcccggagcccatgctcaaattcccgctcaggaagatactgaagtgattcaaattgaccagaatgccgagcaggtnnnnnnnnncgtacaggcacaactagacgaactaaaaaatatgttacaaggcatggcttgacagagaaacaatgatctcaagctggaccgagcatgtggaactcttttctctcccaagatcaatcttctggcgttgccccacaagtttaaaaagccaacatggaaaatgtacacaggaagagaagatcctctctcccacctcaagtatttcgagatgaaaatggatttgcaagggatacgaggggtgtgtgttgcagaatttttcctactaccctgtcggaagccgcccagtaatggtatttcaagtttgcccctggaaagttcaattcacggaaagccttctcttcaaaattccatgaacaattctactcctctcgcaaacttccattgcatctgggagacgtggttgaagtcaagcaaagaccaggcaaacctctccgagcatacatcaacagattcatgacggaggcaaccaaggtttcacgggtaact

SEQ ID NO: 159087 - DNA, 692 bp, Cannabis sativa
  modified_base (536)..(554): a, c, t, g, unknown or other
  modified_base (636)..(647): a, c, t, g, unknown or other
tagatatattacaagaacattctagattgtgattacacctcatcattggccgtacaaaggacctttgcaataacgaaaatattctcagaatcctaacagaaaagagagagggagagagggaatcatttcccaatgattacatgtgaaagaagacgaaatagcagcaagcagagaatgaaaaataaaatggtaaccagtgaccaattgtaactagtaataatatgtcattttctaacaagaagaataagtcccaaactctttagttgtttgacaagaagaaaactaggtcaagagtcattagttggattatgtgaccattctttaatttatttttatactaatttactaagagttaggattgaattatttggaataaaaaatgataaaataatggcaaaaaatagacttagtgggcagcccctatgtgggtccatcactagttagatttctttcatttttctcaaccatttttctatttttcacaaatactactttttttacaatttcagacctaaaaatgccaaaactatttattnnnnnnnnnnnnnnnnnnntcaaataaaattgtcatttatgtctttactaattagattccacatagtctcttcattaataattggctaattagtaattttnnnnnnnnnnnnttgacatgtaccaaatcgtgccccctgaacttttttggcagttaa

SEQ ID NO: 159088 - DNA, 517 bp, Cannabis sativa
  modified_base (48)..(66): a, c, t, g, unknown or other
aaataaaataattatttattaaagaaatatatttattaattagtaaannnnnnnnnnnnnnnnnnnttttattaattaaaatgaacatttctatatatattatcactatgttatttattttagttcgctatgtcatttatgtacatccacataaaatttatgtataataaatatatatttatgttattgctaataatataaaataactcagttaaaaaaaaattgatctcacggactaaatatatatatcgtaatattttatttataatattggtatttaaatttatttattaattcaaaaatattattcaaattaatataatggaaggtaataattcaatcctactattttttaagatatgaacatttggaataacattcaagacattaccattctcttactagtattaacctattccaaacagccctaagtattttatttaattaattaagtatttttattcttaaaaagaaaatataaagtgtagttagtggggtttgaacctttaccctctaa

SEQ ID NO: 159089 - DNA, 508 bp, Cannabis sativa
tttttgtttttaaaaattttgtttttgaaaaacaaaaataaattttataaccacttttgttctttaattttaaaaacagaaaataaaaatgtgttctgtaaaatttatttttattttattttttgattttatttaagtctggtctatatataaggtcgaattcgggttcggggtcagaggtcgggttcagcgccagggccgtggggagggatttgggtcgagtctggtcggaatctaaaatattaattaaaaaaaatatttaaaaaaatattgaaagtgattttgttttgtttttaaaattttgaatttgtattaaaaaattaaaaagtgaaaatatttttatagaacatgtttttgaaaaatattttcacatttttaatttcaaaaactattaaactgattagaaaagtgttaccaaaagccactatgtgagtgctctaatttgcatctccattaattttttcttttagggctcgtttggaaccccgtattaggtcgtattgtattg

SEQ ID NO: 159090 - DNA, 643 bp, Cannabis sativa
aagtgaacatatcgactcataggcgagagttttataatcaagaaggaacccaagaactcctaggggttgtttggtatgcgataatgagagaagtgagaataagaatctaaaagtttactatgttaggttaggtttttaatatttttatgttggctaaggtgggcttcagtttggcaggcaaggaaaacccaatgaaaatgtgattttcactttccaatgctattggcagacacaaacttttgcattttaacattcttttttttataaatgaatactaatgtatataaaaatatttaaaatatgaagtattttccttatttttttatatattttattttataaaatatattatcaatttgtatataaatttactctttataattatctattattgttaatttttttaataaaaatatatgaaaaataataaataaaaattattttaaacacttagaaaggaaaaaaaatatattgaattattagtattttttttaaaaaaaaattattattattgtaaaaaaaattatcacattccattgcaatgtcaaccaaacatgctaatgttgcttttctaggtttatcattcccttcatcactctccaagcaatgttaaacatattcccatgaaatgaaacctgcatac

SEQ ID NO: 159091 - DNA, 531 bp, Cannabis sativa
cccggcccgcgaaaatggcccaaattgacattcctaattataaatagtatttttcacatctctcaaaaaaagaatttttttatttttattaattaaataaatattatttaattatttttttaactttaaaattatttaataacttttttttattgaataatactcaacaaaaaaatacattttttttatgttttatttacagtttaatagattttaaaattatttaataattttttactgagaatatattagtgtaccactaatatgttgacaagtgtcaacttagtctattttaatagaatttaacaaattaataatgacaaaagtagcataaatgtaactttaggtatttaattcgctaaaagaaaaaacatgtgatatataagtgtatagaatttaaaacatcaagtatttatgccgcaaatactctatgcttgagtaggatttaacataaaagtagtgacggaagtaacagaaatgtaacttaaggtatttaatccgtcgaaaaaaaacatgtggtatttaagtgta

SEQ ID NO: 159092 - DNA, 741 bp, Cannabis sativa
gggtgttgtatgttgttttcttctttgattagtacggcactcacagcgtgctccgtgacagccaagtatatcccaaggtcttctccgtccataggtttcgagagtacagaaggtttggcgagttgcgtttttagctcctgaaaaccttttttacattcctccgtccgctcgaattacttatttcctcacatgatcttgaagaatgggacacactggtaagtttattttgaaacaaatctgctgagtgcggcgatccaaccagtcaaactttgcacttccttggttcttgttggcgacttcatatccaggagggcttgaatcttatctggattggctttgattcctcgaacattgacaatgaagcccagaaactttcccgagctgactccaaaggagaactttaagggatttagtttcatgttatatttcctgaggactttgaagcattcatccaggtcatctatgtgcccccagcctttctagatttgacgagcatgtcatccacatacacttccatttttcgctcgatctggtctttaacattttgtttaccaatctttggtatgtggctcaagtgttttttagaccaaacggtattactttgtagcaatatagacccatatctgttcggaaacttttatgttctcggtctgttggatgcatccatgaagcttaatatttcatgctctgctgttgcatccacgagctgatcgattctgggaagtggaaaacagtctttgg

SEQ ID NO: 159093 - DNA, 517 bp, Cannabis sativa
  modified_base (344)..(363): a, c, t, g, unknown or other
aattgtaactaaactattcattatagttaactacctatatatattatactagtctgggtagaggtgcccgtggcacctccatgttagcatttttttattttacaaataaaaataattaataaaaaaaagttaaatgattataattaataaatatcattttaagtgtaaaatgatgtagttaattcaattttttttgctaatcaaataagtaaaatttcactatttatattttatattctaatgtattataatgcatttttataataatactttttttgaaaaacgattgttaatgtattctttcgtatttacagtaataattgtcactacaaaaaatcttactnnnnnnnnnnnnnnnnnnnntgactaaaagtaaaaaagttgtaggtaattatcactacaagaataatggttaatactaacgccactattaccaacgcctaaaagtcctcattaaaaatgagggtatcaataacgacatttgcccgtcgttgggaaagctattcagttttttttt

SEQ ID NO: 159094 - DNA, 581 bp, Cannabis sativa
  modified_base (261)..(277): a, c, t, g, unknown or other
  modified_base (533)..(535): a, c, t, g, unknown or other
atattcttgacccagtaaaagcggaaaatcacagctatatgattttcaaaatcatacaccgcatttatattttgtgatatgtaatcagattccataattttaaggataatgactgtaatcatattttggtcagctttgtaattaactgccactatgaaattataaatagtggcaaataatctcaaaaaagggacgaaaacactcttacgaaagaggccctaaaaaaatacctataattctgaataagattgactcgtggannnnnnnnnnnnnnnnntgcaaaaccacgtaaaaaatccctgtgttcatatattatttttctatagcttttattttttctgttttgaattatcatcgtgaggctcaaatttaattaacgaaaatatacgttaacattagcattagtgtgacaatgccacatatatgaataacctataagaacatttcgttagtgtgatatataataattttgtgaatatttaagaaaatttaacacaataatatgcaactcatatctttatatattaaaagtnnntatctaacggcatttcttggtttaacagaatatactttaaaaataa

SEQ ID NO: 159095 - DNA, 542 bp, Cannabis sativa
  modified_base (35)..(38): a, c, t, g, unknown or other
  modified_base (66)..(70): a, c, t, g, unknown or other
aaaattgaaaagcaaaaacagttttatagaacatnnnnttgaaaaatattttcacttttctaattnnnnnaacaaaaaactgattaaaaaagtattaccaaacgccaccttaggtaacccaaataaaaaaaatatgaaagaattatttcacaaatacataaaaacaacaaaaacgttataaaaatatagttgtacagagttttaattatttttacaatttttaccctaattttatttacaggaaatacgatcttttgatgtatttttaattttctgtaaataaaattataaaaaattatttaaaaattttaaaattctgtacaactatatttttgtaattttttttttgttctttgtgtgtatttgtgaagtaataccaaagaaaattataaatattatggagaggtttttcatattatgataagattttgctgttttgtttgaagaggaaattacacttactatgagattttaaaagttcttatgataaatatggtacatttaagtttgaccaatttatatggtttttttttattattatt

SEQ ID NO: 159096 - DNA, 946 bp, Cannabis sativa
tagaagagactttaggaagaagaggaaaaaaaacgctagtagagagagagaactagtaggcattgtatattaagatataacaaatttaaagtcagtttctagcacaaagaggtacaaaatgtatagtaaatttggtcataacacctctaagtcatagtattattacattccatttttactaaagatgggcacacagtattattatattttattttaaaaaatataaattatttgacaaaagtgatagcccagttggtaattttaaaatagaagatttaaaataatatttacttaatattacattttggacatctcgaaaattcattagattaatatattttgttgctaatttcattatattaatactaaattttgaaaaaatatttatgcttaaagaactctgctaaatacaataaattaatctcttaagaaaagaaaaattgatttgttatctcttttataatttaggttttcttgatataaaattcaaaatttataaattagtcatcagaatacttattatatgataagtaattaaattgataataataaaaagcctatcttaacaaattttatatatttcttttatatttttattagtaatttgttttggtttaaatatatacattaatcgttaaaaataaatacatagattaagaattataaaataaggagaacaaataccaaaaaaattattgatgataaataaataatttagaaattttaaactgagaaaaaaaaaatgaaggattgataaatttattaactataataataataaatttgaaatttcattttatttttaataaaaaaactataataaaaagtagactcaattgtacacgtaaatgaaaattatatatgttaagaaaaaaagtaaaatagactttattttcataaaaaaaaaaaaaaaaaaccgcattaagtttatttcaaacctcttcta

SEQ ID NO: 159097 - DNA, 527 bp, Cannabis sativa
acacactatgatttgtcatcttccatctatgtatatatttcctttttataaaaaaaaaataataataataataataaaataataatcatatacagtatacatactctaaacaaagtttgatttggctttttttcaactttttatttatgcattcatttaaaataaataaataaaacaatatattaaatatgatgtgatggtgatagtgatcatgattatggtcatatctatatatataaataaaaatggtataaacgttacatatatataatataaaagagaaaagatgattgtgatgttgtcggcagagaaaaaaataaaaaaatgagaaagataaaaaaaaaactgacctagatagtgatattgcggcagagatggcagaggaaaaagagagtgtaatacctaatatgtaaagtgaaaaataaaaagaaggagagagatatatattaaaaattttaagagcccattacacatctatttcggtaagaggtattaagtggcaaaaagtgattaaaaaaataaaaaaa

SEQ ID NO: 159098 - DNA, 721 bp, Cannabis sativa
aataaaatttaatgtaagcccaaataaaagtctaacagtttacacaaaataaataattattacaaattacatctactataaattatattaagatgtaatgtaatacataatatttagtcgaaaattatcaataaaatatttttccgtttattatattattattattataaatttatttatttattactataaaaattactattttgaccgttactaaaaaaaaattaagtgagtatttaaaattatcaggaaaaaaaaaatagatattcctaacgattttaaacactcctgaggcatttttgataatttttaagcgtgccttaaaaattgtaaatttttttaaaagagaattgctgacggttaaaaatcgtgaccaatactataggcgacgattttaaactgtcgtttatagtataggctatggtttaaaatcgtcgcctatagtgttataggtcacggtttctaatcgtcagcaattagtttaaatctaaaattttttaaataacatgtttttcctcgctctaatataacgcattttcaaatctgaaaattttcaaatttatacattttcaaaccatctctctctgaccttcgctccccaccatcctctctctttctcatcatcatagatggtggcaatccacgagctccagcatagacaatgttttaccaagatctagatttactaacaagtatagtttttaatatcctaaacatgaac

SEQ ID NO: 159099 - DNA, 516 bp, Cannabis sativa
ctctaaagcctgtttagctcttatgagttcagctgaaagcttgtagatctcattgtccttctcatcaagaagtttgctgcactgctacaaatattagaatttgcaatggtcctaaaaagatttttttcgggaaccgtcgctaaaaaaattaagcgactatttaaaaccgtcgggaaaaatttagtatttccgatggtttaaaatcgtagtaaaaaaaataggtgaagttttttaataaaatgcaattttttaatggacccttatacgcgacgatttaaaatagtcgggtatagtataggcgatggtttaaagccatcgcctatagtatataggcgagggttttaaaacatcgcctataagggtccattaaaaaatcgtcacctacttctcgcaacatttctcacgtgcccacctacatttttttctattttccacatgcccacctatttcttctccatttccacaccctaaaacaaaaatcttaactctccaaaaccccacccacgcctctgcacc

SEQ ID NO: 159100 - DNA, 596 bp, Cannabis sativa
  modified_base (521)..(521): a, c, t, g, unknown or other
aatcatccaccaaaatagcttgaaaagtagtagggacaagccccccaccatagccatgacttagggaggaacaagcggcagtcgccaaacaattgattgctttgttcgcatatcgtttaaacattgttaacatcaaacattaaaatatgataatcagaaataactaaaccaaaaagagacaataaaggagtcgaactatacagagcatcaatgatgcttttacaatccgactcaacaacatctttgtaaagtccttttttggcaagttagatgccaaaatattttttactttatggtaagatttatttgcatttataaccgattttcttaccttgtttattcggtttttattgctctttttaattaggtttttaattatatactcaactatccaggaggagttgaggtttgtgtttgtgttcgtctttggtcaaagttagcttgttattttgttattttggtttttgattgtgtttctcaggagagttgttattttctcttgctaactttgatttgcaggnacttctttgttaaaaaatattttgttcatctaaagtgccaaagggagagattgtaaagtcgttttttggcaagtt

SEQ ID NO: 159101 - DNA, 617 bp, Cannabis sativa
caactgcgatgtcaaagtcggaggtgaaactatgtgtgctgtggcgattgcgagagaccataacgaatcagttttgtgggtggcagcaaaaaggctacacttcactggcccactcactagagaagttgcggcctgccatttagccatggagacggcagtctctttgcatcatcctttatgttggtggagagtgattcagagattgttatcaagaacctaaaaagggatgactctacttgggggattgaaactatgtgcgacattgcaagctcctctctacttttatgactaattgtaattttttttgtatttctagaaactgtaactatgcggcccataatgtggctaaatgggcgtttgccaacaatgttacgggcatggtagagatatctactatacctgttaatatcttttgtaatgatcatgaggtctaactccaattttatttataaacgtatttttcaaaaaagaaaaatattaaccacataattatttatattgtaatttaggtgacttgtggtaggtattattaatattgttcaatgaatttatatatatataaatcatcaatatatataaataaaggaaagcacaaaagatatttggtggcatcttat

SEQ ID NO: 159102 - DNA, 527 bp, Cannabis sativa
caccaccgaagccgaagcaccaggccagaggcgatctctttctctctcctgatcttctcctttttcttttcttcttcttcttcttcttttctcgtctcttctctctctttgtctctgtctctctctttctgtctctctcttcgtacgtggtggtcgccggaggttggtcgcgagattggggagaggagaaggtcggggttttaggttttagggcttgggggttttgggtttcggggttttgggtctcgggttttgggttaagagattggggagaggaggaggttcgttggtggctccgacgccgcacaaggggatcggggtgtcgttggcgttagggttggctagggtttgctagggttttttagtgaagaagaagaagaagaaaagaaaaaagaaagggaaaaagaaagaaaaaaaagaaaaaatgaaaataaaagatatttttttttataatttttttatttttataatttataattttttttctgattttttaatttttttaaatatttatatttattttttaa

SEQ ID NO: 159103 - DNA, 528 bp, Cannabis sativa
  modified_base (93)..(104): a, c, t, g, unknown or other
  modified_base (483)..(485): a, c, t, g, unknown or other
aagaagttcatcacagagcaagctctccatctctctcacacacacacaaccatactcttatctttctcgattcttcttcttcttcttcttctnnnnnnnnnnnntttttttttttaccaactacaaaatgagaggattaacttttatttgattaatgttatagacgggaaaaaacaaaagaaaaaaaatgaagaagaaggtgaatagtggagagagggctcaaatataataaaaaaataaataataaaagctattataccttagagaaaaaagataacgtgtagaaactaggaagatatatattaagcttttcatgattaattttttaaaaaaaattcacaaaatgacaataccatcacatcaaaacttttttattattaaatacaataaaaattttcataattagttttttttaaaaaacaaatatatatgtcaatcaattttccgatcaatttttattaattaaaaaaaacataaaaaaannnatatcttgaagtgacaaaaagcataaaagagaaaaaactttat

SEQ ID NO: 159104 - DNA, 573 bp, Cannabis sativa
aaaagagatataaatataataggtcgtattttcaggtcatttatgcaaatctgttagactaattttagtctaagtttcaggtcgtatttttggataattttttatttttgtttttagttttagggctattttacgcttgattcttttgtttcaagtccccgaatgtttaaaaaaattattcacaaaaatagaggacaagaaatgaaaaagttgagaaaaatgtacaaagaaattttctgccgaagcttgttgtaacaggcagaatccttcgttgtgacaggagttggtagaaagtttcccattttgttgatgctttcgccatcgcgacgggcaaaatgcttcctcgcaacgaagccttcctgacgagtttatgggtaattttgcaattttacgaattttaaagagaaaacttgcctcaattagaaaggagttcatgattttggatgattattcagaaggggagccctataaacaaagaataggacttcaagagcggcttgtggcgacccagatcgatttcttcaactagttcttttcttctctcttaatttttttatgttaatttctatttca

SEQ ID NO: 159105 - DNA, 526 bp, Cannabis sativa
tgcctatccaaatactattaatttgactcaaatgcccttcgttccttattctttatttagtattattttgcctatcaaacttggtaattatttggattaattctttttcgtttataatttaccaattatatatatgaatttttttttatagtattacgagttactaaataaatttaataataaacattaattttaaaaatattaaattattaaattttgatctaacgatgaataataaaaaagatatttaaatttttatgtttaatttaatcacgctgttcatttgttggctagattcgctctttcggtggaagctaaatgtttatagttggaggaaatgcctcatccacttatgcttattgtattttaactttctgttttaatataatggcattttatggtatccaataccatattaatatagcactttacaagtggttagcagtttcttatattatttattaaatcaaaatatttaggacccgatattattttacaccaataacgataggtcacttttcactac

SEQ ID NO: 159106 - DNA, 522 bp, Cannabis sativa
  modified_base (50)..(74): a, c, t, g, unknown or other
taagttgattttcatcatgattttggattattttttaattaattttggannnnnnnnnnnnnnnnnnnnnnnnncaggatttatttttattttattgtagaacattttcgaaaatgttatttattttaaatacattaatttttgaaatgcagtatatatatttgtagaaaattaaatttgagttgtaatttaatttaaattaatacaacttaaattgaataactttctaaatatttattgaaaattattactaagttggaaataattcattttattttcaaatccatctaagtataactttataaatattaaattaaaatctatatttagaattttattctaaatttgaaattttaattaaataaatatatatatttcaaataaatagattaaaataaatattagaagaaaatatattttatataatgaactttatttattagcatattcgatctccattgttggttctacatagttcttgttctagtgagtaatcctccctaatgaaagaacgttcattag

SEQ ID NO: 159107 - DNA, 745 bp, Cannabis sativa
atgtggtcattagatgtggtcattagagggtgggtgtgtgttgaaaatgagatctaaattatatattgtaatatataaatttttatatataaaatatatatatatatatataaatgggtttatatattagcccaataagctaactggtcagaaaataacaaattcattttttttagaaatttatacaacacacctaaaagctaaaaattaattttttttatacacattttgatagattttttttaaacatatttttagttttttttttttttttcaagagaaaaatattgctttcttatagtagcaatgtcaaaataatattagtctgaaacaactaaaaatgacatttcctattgttataagagaaattatgttgctttctccagtaatgtcaaatctaatatttgtccaaaataataaaatataacactatgtatttttgttaaaaaaaaacaacagacccataaaaaaaatgtacaacttttgccatttttgtatatttatgaaataataccattttctttcatgtacacaatattacactgagtttgatttttaatatttttttaaatataactaacttagagacaattagtagcataaacagatgtaaaacaagcaactaattttatcataacatccctacattgtgttattattaaattttatattgataaaaaatctatttaattttatttatttaattaatcatttaaatttaaatctattaattaaatcatattta

SEQ ID NO: 159108 - DNA, 549 bp, Cannabis sativa
acatatctatacaataatacaaattttcccatttatcattataacgccataaattaatcccaaaaatatattttaggtcccgaacccgattcagcctaaaatactcgattgtgactatactgcgctgacttattagaaaacacctgtagatagacaaaataaacatactatgtaataatataatccataagcacgatatatcataaaattatgattttacccttctcggatttaaattacaaaatactcctaacacaccaacgaggtcttaaaatacaacatatccatatagtttcacatattaaattatataataatataattcatcaataaaacataattaacatatttagggttcctaatccgatctactaacccgagggtattacaatttcgaaactatttcaatgctctatcaagctattgacaccaaatttcacctgtgagggagttatgaaaataagcatcgggttaccctgagcaagtcccgccatgctccaaaaaatgaatatcaccatcagaagctaattttcaccattagatcattat

SEQ ID NO: 159109 - DNA, 523 bp, Cannabis sativa
  modified_base (137)..(145): a, c, t, g, unknown or other
  modified_base (457)..(458): a, c, t, g, unknown or other
cacaaataaaagataattatcctcacacaatcaatatccaaacaaaaaaattaaatactattttaaactgggtattacaattttgttcttttttaatacatataattcaaatcgaagccctagttgaaacactatannnnnnnnntgatgctctcatctcatccaacttaacattttcaacttgccaaaatctaattttgattctctaacaactagtagatgagagataccttttatagtgattttcaagcctccttcatggttcttcatactcgagcctatagtgatagactgccatgcccacacatagcaagtcaagcactcaatcatagtgggtaagacgtggtaaccaactcgaaggagagaaagagatctaggctcaaatcttgataatactctgcaacaggaaggaacaagggttataaatctaagcggaatgagtcatattattccgctnnaatcaatgtaaggttttctaaactattatgtgtttaatttcattattttaaagatattcatattt

SEQ ID NO: 159110 - DNA, 583 bp, Cannabis sativa
ttaactgttacaaactgtaaaatttaggtggtttagccgacaatatccaaaaataaaaatatatgataaaactttgtagtctcaatacacacgattttaaaaaatttccttattttagaatttatgaagttttgattgataatttttttttaataaaaggcttaattttattttttcgcgcaaggcccccaaaccgcttggcctggccttatccagggtctgtggtccatgtccaggtctaggtttgggccggggtctggggttcggggtccgaggtcaagctctggggtccactccggggtaaaatgggttcatgtcatggtatggtgtagtaatatgtattttttttttattatttttttagtataaaaaattcaaaaaaatagttttaaataatctggtcaaacacaattgattttttaaaataacaaaaaactgtaatctattctcagttttaaaaactgaaaacacaaccaaacagatattttcatgttattcttgtgttgtaatatttttattttagtgtttatttttttcccttgttatttgtttgttgttttgatattgtttttcttttattttt

SEQ ID NO: 159111 - DNA, 852 bp, Cannabis sativa
  modified_base (275)..(275): a, c, t, g, unknown or other
tgacgagtgaacttgttaaaccagctacttgctgctctaacaagcgaggtggggaacaaagtacaacataaattgttcgtcacattactcgctcgcattattgtgtcaaagttatttaaatgtgagaccagatttgtggttccgtcataggatgagacatgcgggtttttgaatcccaaaggaaaaggggtattcataatatctgggtgatacggctcaagctcctcgtcaaagtcatatccagatgatttccctatttcccccacttgatatcncttgaacttgtcctccagctcgtttatccgcaataggattggatcctattgctttggaccaagctattggcaaaggtcagatttcttctgattcaagtgctctcggagatccggttgtgagtaatttctggcagatctcgtcttactcattgaccgtgtcctacttacagactttgtttttaggtagctcgcggatttacttgttcccatactctcccgatcattagctcgttgagtattttctcctattcgagttgatcggctatgagttctggatcgcctcgaagtaacacttacctcttcacgctctgttctttcctcccgagagcgatttgtcgcatttcccccatcagggtaagtacgagtcctcgctctatgggtttgggaagaacgctggtgattcctagcaggtgatctccgttctcctggctgagttccaagatgctcctcattttcataagggattcttcgttcatcagttcccggttatctcctttctggcagttcatcctgattctcagggggtgtctcatattccctgggttgttcttcctgggccttttcctgtctcctggtt

SEQ ID NO: 159112 - DNA, 599 bp, Cannabis sativa
aacaaaaaaatatatatttattttattttgaataataataataataataataataataatctttgtctcctaaactttaacatgtactaaattatggtgctgaacttttctcaccgttaaaaattctattcgactattaaaattgttagatttaagaattttttgtctaatttcatttaattttactatttcatttaagtctgaatccaataaaacaaaaaaatatatatttattttattttgaataataataataataattagaatttttgtcccccaaactatgtaccaaattatggttcctgaacttttcttgctgttaaaaatttttattgagattgttagatttaaggacttttgtctaatttaatttaattttattatttcagtgattatttatgtactaacatgtgctcctaagattttgatatcaaccaaatcatgtccctcgaacttttacatatattaaattatgtcccctgaactttcattcatattagaacttttttactgaaattcgacaaaaatctttaaattcaacaatctcaataattcatgaagcatttttaactattttaaaagttcaaagagcataattt

SEQ ID NO: 159113 - DNA, 669 bp, Cannabis sativa
ctttcaccgccgttagctcgggatcgcaagtcaaagtttgggggttcaaactttgaacagatttttcgatcacctccggtgtgcatttgacaagacgaattcaccactaatctcagctcgtcgagagaacaacctacactaaaccattttccccggcgcgctacttttttcggtgacatttttatagctctgcccctttccgacgactttctgggaatatcgtgtaccgttttgataaatagttggcatgggtgtgatctactcgtcgaggtggttgttttggtatacactgcccctattttcggtgatatttctggtacaccgatttttactgccacccattgttaatgtgcatcgcttaggtgaggctttggaacccaaaattttaaatatagtaatattatgtcgttagacttggttttgaatgtagaatgcgatgatgataattatttaaccatttaattgtataggtgagagtaatatctaagattggactaaacaattggagctcgggacttgagagcttaagatcgtcttttggaaaaagtttaatgagttgggagagctagggactcaactttattattggacttgatttttatatgtgttgtataacattggacgtattccaatttttatgatttacaaattgtttgcaaaattgaaaac

SEQ ID NO: 159114 - DNA, 652 bp, Cannabis sativa
tatatatagactctaagtgagtcacgtgtggaggtgtcaagtggggaaaaatacaattaatctctataattattccactaaaattaaccattagccttattttagaatctcacattaaaaaaaaccaacttagttaggtgaaagattattttaccctttacttagcttataagtaacttctaaagctaggggtaatttggttgactccgagtattccaaaatatctcggtaattctaaaatcaactcatcataatatttcaattaattctatcaattaagtctgttatgacatttctggccccaatcgagtctccaaggtcgccaaacctaaaaatatttttattccacatatagttcatattacattcacccatgctatataaatctccgtaatttaaaaattacgcttatttatccacttatagcaaatttaaaattttatgttaaactaaattagtaggatcataatcccacttattacctagttaactcataatataaatataaaccctaattattaactattagcttattgagatattacaactataacctccttataaaaatttcgtcctcgaaatttacctgaataactcgggatacagctctcgcatttgtgactctaattcccaagtcgcttcctcaacttta

SEQ ID NO: 159115 - DNA, 635 bp, Cannabis sativa
tcgtcagtctacgaagtagcttaagtgatgcactctagtataagagtcattattctgtgggtgaaaggggcctaatgtaggcttgaagcggggacattacatgggtaacatataaaagaatgtcaggggagtagtggtatcactaaggcaaggaaaattacctagattatatatggtgatacagtaatgttggaaaatacttttatatttgaccagatggtcactctggtatataaggagactattgagattctaggaaaggattaccttattaagcaatgatggaaagatatactcacccagattgggggaaaggcttataaattgaaatgcaatttaatggacacgtattcgagtgattggtgaatgttggataacaaagtaggttgtttattaaataatggactatataattgagttttagagtgattaaccaagtatgaagatagtgatgattgcaaggaagcaatagtagcgtacgaatcatggagtaaaaccttagtggtaataacaggaaaagaatataagagtcttagatgttgatgaatcaacaccgtcaatggggaactcgctacaagttggagtggtagttcgcaccacgtgattgtcaataaaataaagaatatacatgtata

SEQ ID NO: 159116 - DNA, 524 bp, Cannabis sativa
tatatatatagtatttatattaagtaatataatttataatataatattttattgtgtatattataaataaattaatagtgttaaaattaaaaatataatttgttatttcaaaatatatgaaaaagtaaagatttcgtaacaaatattatcgttataattattaaaaaaaatttattttataattattttttcgtattttttattttatagatttatattctaataaatagttgtaaatatttttactaaataaataaattataattatttgttattttttaattatttttaaattcaaatgaaataattttttaattcttattctatcaccttaattttttttattgcttcatttaattatcataagatattattattaattactataaaaattgattatatattcatgaatttaattataattagatttattatatcattatttatactttattgttgtatataattttttttttgaaaatgaaatataaacttcattgaaatttagcattccgagtacaaaa

SEQ ID NO: 159117 - DNA, 588 bp, Cannabis sativa
gggaaaggaggtgggggagggtcatggctggggattggctggagtgagggttggggtgggtttggatttttctaaccgttaatattgtttgctttatgaaagaaaacgaagaagaataaaaagaaaagaaaaaataataattttatgattttaaaatagtttttttagttttttatttttaattaaaactatgattatttaggaccaattaaaaattgacatatggcattttattagtatctaacggatctattaataaaaggactagcagacaaacaaaaagtgtaatcttggggactgcgctattattgtcaattttgaagattgaagacttatatgtatcaaacttatgtttttagagccttattgtcgcaattttttcataaaaaaatactttatatattaatttatttaacatgcttattatataattaggagtcttgcgagtacatgttatatatataaagtatgagagattaatttattatggaattggatcaatgagcaagacagcaacactatctttagtgacttttccaacttgtgtatagttatcaccatttttgtagagaagatccataaccctag

SEQ ID NO: 159118 - DNA, 626 bp, Cannabis sativa
tatatataattttgttaacatgatatatatttttgtaagtattaatttagtactgttatattttttttgtggcgtataattttattactacggtatattaatttttagtgatacgatatatcaaataatgttgtatatatatttaatgatttaatatatttatttgtttttgttacaatatattattaaaaattatataacttaatttaattatatatattttttaaaaataatatgtagtaaatgtatttttataatatttattagttaatttattatatttgaccattttattatttctttttaaaaagaatcttactaacatagtttccaaatttatggtcgttttgcatctcaacacaagctggcatgtgccaaatttggcacaagtattggcacactattggagaatgatttatatatatatatgatgagtgtacatttgtacactcattcttagtcaattattagatggattagtatttatttttgtatagatttgatgtgttttctccaagtgtgtaggttagtgctgaaaaagtattttgtgatggactaagatctttgagcctatttttgacaatgatttcattattttctcaaagagcttatgaaattcaaaatga

SEQ ID NO: 159119 - DNA, 961 bp, Cannabis sativa
ctaggtattttcaataatggtggttgccaaaaattgtgttcccccctttcttttaagctagggttttattttttaaaaaataccctccacatggttccttaattcccacttagagattttttcaactagatcagctttaaaccacttgtctttcgccacctctgcctcatatttgctacctctattaatgaagtgccatatcctctttttctacattaatttcaacaatcaggtcctgccacttttgctgcagcaaaattcctgcaaaacttcaccaaaaccttgcactttttctattaagtctttttctttacctaaacccaaataaaacttaataattcctactaacaactccaaattattcaaaagaacataaaaatacaaaataacatatagtctcacaaaatggaaggaaaagaactaaatataagttaaatacacacaaattaagctaaaagaacatgacaaataactctttattcaagagttatcgttgtctcattaggcaacaattcaaggaagatttattactctattggctgtctcattaggcaacagtgttagtttttatagttcataacagagttgcagcggaagtagaataaaattttggatttaataaaaataattgttgaatctgatatgaaccataaataatggacctcaacacaattatacataatgcaaacttaactattagtttagagattttacctcttattgcctattagggtttccttactatctttttgtgttattcaatcgaacatccaatccagaaaaacttgttaaagagttcacaccatggtattaacactccacaaacaaattgggctattagatccgatttagatgaatataatttagtaaatcgctatgtgtactcaattcatgagacactatgattgagataggaaagaacacaacacacacaccacactataagagagaggcatgtgag

SEQ ID NO: 159120 - DNA, 687 bp, Cannabis sativa
aagttgattttgagcgttcgtcccctacgccgccctggctgaggctgcatctcgttctaactcagcgtttcgaccctgcgcctctttcagacggcgtctctcaagcggtggcttttcgtttcataagttctttctcccacagattgggcacctccacggttgagctcttcatccctcatcctgggattctgaccattcccacgctgagtcctcctcgagcgcattgtctacgtgctaggaccaacgtcacgttgagttctctggggacgtgtggtcctcctagactgcggattagtagatcttctagagcccatgggctctttttcagaacgatgattactttcctcatgtggggtgttaatattttctggattttcagctataaaggagaaggtttttcttttaaaagaaaggaaggctttctctgagctttttcacagaggctctcaatgaaagcaacaaactgttaatgcagattttcgttaaccaaatttgagcctcacgatggtaattcaacacagaaaaaacaaaagctatagaaaagtaaaaatatgaacaccgtgttttttacgtggttttgcagttaaaattctgtatagtacacgagtcaatcttattcagaattctgagtttttagggcctctttcataagagtttttttcatctcttttttgagattgtttgcca

SEQ ID NO: 159121 - DNA, 841 bp, Cannabis sativa
  modified_base (421)..(427): a, c, t, g, unknown or other
ggttggacaaagaaacaatgatctcgagctggaccgagcacgcggaactcctttttctctcgagatcaatcttctgtcgttgcctcacaagtttaaaatgccaacatggaaaatgtacacaggaagagaagatcctctttcccttctcaagtatttcgaaatgcaaattgatttacaaggggtacgaggagatgtgtgatgcagaatctttcctgctaccctgtcagaagccgcccagcaatggtatttcaagttggcccctggaaagttcagttcatggaaaaccttctcttcggaattccatgcatagttctcctcctctcgccaacttccgttgcatctaggagacctagttgaagtcaagcaaagaccagggaaacctcttcgcgcatacatcaacagattcatgacggaggcgacnnnnnnntcacgggtaactgaagatggaaagttatccgcgatactgggggcattgaagtcctcggtgaacattggaaggatataaggaagaataggccggtagaattaatgagtgattttcttgaccgtgtcgaaggcttcatcaatctcgaagaagccattcaacgagtggaaggtgagaaaaagcctgacaagtcaaaggctccttctactggaacatccgcccaacttccccattacccaaataattcaagctcaagtggtacgcgttccaacaacaaccacaggcaagggaatgggaagaaaggaaaattcagcggcaaatctaaacaagctccccgggagaatcaagcaaagtacactgcgttcactatcttgactgaagacgtagaaagtatttacatggaaactcagtcgctgg

SEQ ID NO: 159122 - DNA, 535 bp, Cannabis sativa
atcttgatcaaacccatcatgatcttgatcatcattattattctgaacttgggtttctgaaactattaattaattttttcccttacccatctcaattagtgatgaaaccccattatcgtgagtagtagtacttaccttctcttcaagttttcttaacttcttccccaacacattggagaggcccacctcactattctttctcttctttgactttaatttttcataataatttgagatgacagaatgagctctgatcgagttctctggccacacaaataacttgccagtggaatcataacacacaacacaaatttgagattgacacaattcactaagttgttttgcttttttcatcattgtagtttttctttcgattttttttttatcattcttcataaaattttgagagagagattgagatagacataaaaatagatagaatggaaagaattatgaatagtaatagggaattttgattttatatacttaaaaaattaaaaaattttattattaaaccaaaaacctaaaccctaaa

SEQ ID NO: 159123 - DNA, 500 bp, Cannabis sativa
  modified_base (468)..(475): a, c, t, g, unknown or other
tcagagcccttgtgacacgtgtcattttccacaagcaagcccctccagattatttaatataaaaatattttgtagttgtagcaaaggaagatcggatagaataggaacaaaattaatccgaattgtttgtgaagtttgccctttattttcatctttcaatgaagttctttatttatttaattaagaaaaaaatatttgttccaacaatttgaattattttgttctttatttttaaataatgggaatcattttatatactattttttttttatttttttaggttgtttcggtaatttattatgtagatttagattacgatttaacttactccgttagttataagtaaacatttatgattttcataaatatataaaaaaaaaaataattacataaagtactttttttttgtaaaaaaattgtatttttacatatttacggtttttcacgaaaacaacaagaaaactacannnnnnnnacatgaaaataacatcaaaataata

SEQ ID NO: 159124 - DNA, 742 bp, Cannabis sativa
atatatataaaaaatatatatatcaatatatcaatcaatcaatttatatatataaaagaaaagtatgaagcagtgacatggcactctaaaatcattctaattacttttatttattttttccttaactttttcttattttttaattttttattagtttcataaatattaattgatataaaatatatacctctatttattttatccttaattctctcattctttttattttttatttttctaaaaataataacattaaacctcacataccacattaccttttcggccttttttttttttcgaaattaagatatttaaaatctatatgtgtatatattaccgcaacaacccatccttattcatatttaaaaccgcataaccatcaatatataatttcattctcatcattcttaattacttttattaatactgaataataggacccgccctgagggtaggcagactaggcgtgcatctcgggcccccgaacgctcagggccccgaaattgtgaaaaaaaaatattaatatatagataaaattttaaataagaacaaattataataaaaattgttcggtgtagtggcaaagggtttaacttctttttaagaggtcatgggatcgattcccaacctttacattaggactgtacatcggtcggtttatactacatattttctaacccaacgtaaagatcagtttgtaaaattctacatacaacctaccctatttaaaaaaaaaaaaaaa

SEQ ID NO: 159125 - DNA, 536 bp, Cannabis sativa
cataatctggatataatgtataattttatacaattttctttactatatcatatacacacatatattgtacatattataaatgattagaaaataatatatatatgaaaataataataaacatataaaaatatatatataatatatagatatatagataaaaagaaaaagaaaaacaaatgattcttgaaattattttattcagatgagtatatatataaatatatacagggacggaggcagaagttaagaataaggggggccaaaagataaaaaaaataattaaggggggccaaatgcataattttttaaaaaaataaaatttttaatattaaattgctttataatttttttttgtccaaaattttgggaggggccatggccccctttggagctaaagtagctccgtccctggatatatatttagtatattgtgaccttaaaacaatttaagaactttaacaaaatacttacattggggcttgggcagagactcatgcttgaagcttgggcaacgactcgtgttgataacgtgttat

SEQ ID NO: 159126 - DNA, 567 bp, Cannabis sativa
aagaaaacaacaacgaacacctacagcagcagcaacaagaaaaaccccaaagcatgcaaaattcttttcttacaacttaagaaactcagatagacaaagttaaagacttaccaatagttgaagatcccataaaatctgcttgaatcaacaagaaaatggagaaaacacctagcaatcccaagtggttttttgagggtttcgaaagagagagaattttgagagaaaatgagattttgccttctttgattttttttcttcaataaaaatgatcaattacaaacttaattcatttatttcagccaatatacttaaaataaaacaagtaattacataacacacaagggataaaaagcacttaaggggggtattttgggaaaactctaaattcctgaccaatcctgacattcccaaagtctaaataaaccttcccactatactaacatattggattgtgattctactgagcaatacaccgcgttccaagttgtcgggcactgaaaatgcaaaattatgaaatttcactatatgacataaaaatgcattcagaattcaaatataacaacataa

SEQ ID NO: 159127 - DNA, 532 bp, Cannabis sativa
tccttcaaactaagtttgaaggatctgccaagcttccttagcagattcacatgatgatataagtttaatataaccttcacctacaccattaaatatagcatccaacgctttgttattttaggcaaaaagtaaatcatcttcattagaccattccagttcaaattttattttagaattaccttcggaatatatctcaactggagaagaccaacccgatagaaccatcctccaagcttaagggtggtctagaaatcaaacttccttatgcaaaaaatgacatttacacaaaaacacacgaaaccattaaaaggaccacactaagagtttagtgtcctgctctgataccaattgaaaaactgaggttttgtaaatgtcaataataaatacaaaaatataaaactgtatacgtctgcataagcagaaaccaattttgcagcgataaaacaaaacaaacagaatataaaaataattacagaaaattaaatcacttgacacaagagatttgtatgtggtatcagtgttctttcgaaca

SEQ ID NO: 159128 - DNA, 548 bp, Cannabis sativa
  modified_base (355)..(358): a, c, t, g, unknown or other
gctcctgaccaagtgccggtaatccttgtcacaattctgggattcacaagtatagggttaatccctaaatccactttcacataatataaaattggcgttcaaaatacagatatacatatagagctcgcaacgagctttctaatgatataaagaacgtcctaaatggagtcctaagttaaaagttatgaacaaaacaagttcaacatgcaatctgtccacgcaagcgggccgcagcgcccatcagagcgggccgcgacgactgggttaaaaacccagaaactccattttagcagctcaaaaaatgcacaaaaactcacccaaactcacccgaaacatgcatatatctcaaaatcannnnccacacaatataactaacataacagagagttaaaacacaaatttcatgcatcaaaatccaacaatatagaccctttaaattaagatttaataacacaaaaactaggctccaaacattgagcaagattcaccaaaatcccaaattcaagagcttaaacacaagaacaaaaaactcaactataaattcagag

SEQ ID NO: 159129 - DNA, 585 bp, Cannabis sativa
ttttttcaattttagtaactaagtggtataattatttaaaccattattagttttataaaagtacattgtatttaaaagacaaacatgattgacccatcatcatcaaataaaattacttattagaaccaaataattacatggttaccttacgcacttgctgctccacggaacacccataaattgcagctcttccacccatataagcaagatatcgcataaacatctttgtactctctgttttacccatcaaggacaccaaaaaataagccactctaataagtaaaatgaaacagacaacaacatataaatacacatatgcattaatctgtaatggcaaaaggatgtgggcttagctcaccaaaagcagcccttttatattgttatacatcatgtgattatcatataaatgaggtagtcttctgaaagggttagccgctatcaatatattccctgtgtaggtctgcaaataccattacatagtttcagatagtaaacgacatgcaattttagataagaaagtaaatcatatcacctacataaaataataatataatgaacataaattcacacacaattaaggcggta

SEQ ID NO: 159130 - DNA, 528 bp, Cannabis sativa
taaacatattaaaatatggaatttcaataattaaagaagtaaaagtattttcaaaaaatatgtcttatcaaactgttttcactttttaattctttaattgagaatcaaaaattttaaaatttaaaattttgaaacaaaaaaaaaataaataaaaaactttcaaaactttttgaaatagatttattttttcttaatcaatattttagactccaatcccaatctggatcttgggacccggactccggccttggccccagtcctggacacagaccaccactacaaaaattgttacttttagtgacaactttttagttacaacataattttttgtgactaaatgtgacttttaatcacaataaaatgttacttatgactaaaacatagtatttaattacaagttgtcactaattttattttagtcacaacaagtattatgattataaatatattttgtcataacaaattgtaatttttgtgactaatacctttagccacggacattttagtcacaatataggaatgataatt

SEQ ID NO: 159131 - DNA, 520 bp, Cannabis sativa
accaatgccctggcgacattcatgaatcttatgaatcgggtgttcaaagattacctaataggtgtgtaattgtgtttattgatgacatcttggtttattctgagttagaatacgaatatgagttgcatctcagatcagtagtgcaacggttacgagatcacaagttgtacggtaagttcaaaaagtgtgaattctggttgtcttgtgtctctttcttggggcacatagtagataaggatgggatcatggttgatccgtccaagattgaagctgttcaggattggccaacactaaaatcggctactaaagttagaagttttttgggtttagctgaggattatcgtcgtttcattgagggtttcccgaaattgttgtacccttaacggagctgactcgaaagaacctgaaatttgtttggacagatcggtgtgaggaaacttttctcgagttgaagcaacgcttgattagtgctccagtgttaactaattatgtttacttcgcttttagccaacgacaatga

SEQ ID NO: 159132 - DNA, 503 bp, Cannabis sativa
aatgtggatgattttaataatagatgtggtataattttttcaaatgaaaaaatctccataagattgattcaagtaatgaaaagttagttgtctcccagaagaatagcttgtccattcaaaagaagtctcgtggagtgatagttgtcatccaggagagagttctcgaatgactatcgtgtccactccaaaaagaaatgccggatggctaatcttccttctgaaagggagttccggatagtcgactcctgctagctcttttcctattcgggaagtcctttcaacatacgcttcagtcctttgtcctgggaatctatgtctcatccagaagcactctgtcttgtgctgacgtggagattctgttacgagaaagttgttaagttagttatggcataactaacttaacaacttatcaattgcagctatcgagcttaggatttttatcttgagcctataaataccaccaacacttatcattttatgaatgcagggttcaaacgagtttc

SEQ ID NO: 159133 - DNA, 567 bp, Cannabis sativa
atattttgctaccatgcataactaaagatttgatgctatattggactatttgtgatctgatctggtgtaggaatgcattgtttagattatgaaaggtacattacaagttttggaaaaagcttgctggtttttcttaaaatatgttaactctgccaggattactgaaccatcgctgggtcattgctgtatcaactggaacacacaagtggaaattaaccacccaagtctactttctaaatctcaaattattaccactttaatcacttttggcttcttatttttagtttatttagcttaaaatattatttctcatactctagaatataggttaagaatttttctcttgaattaattagttactttgctttactcttatttgaaatttttgaattgcttttagttgatttttgtataatttagtgaaaagtccttgttgatacgaaatttgaatatgggacccatttttgatgaattttaatttaatttttagaaaatgatttaaacaattgaagtaaatttaaaaataaatatttctaatttcagaaaaaaaaaaagatatataattat

SEQ ID NO: 159134 - DNA, 674 bp, Cannabis sativa
gtctcaaatgtgcttcggttactgtaattgtttgagaatgcttcgggacagaagattaattttgataagtcctcagtattctttagctctaacactgacgagtatatgagggattacatttgtggcttgatgggtatctatgaagctgatgataacactacatatttgggcttgtcgaataccatgggacaaaagaagactgctattttgggttttttaaaagacaagttgagaaaaaggattcagagttgggaggggcgtcttctctctcaagcagggaaagaagttcttcttaaaacagttgctcaatcacttcctaattatgatatgagtgtgtttttgctgcccattgaaacttgtaaagaattggaaactcttatggctaagttttggtggaattcgaacaagtcacaaaataagggagtgagttggatgagctggagaagattgtgcaagcataagaatgtaggaggtcttggattccgaagcctccgcgatttcaatatggcactccttggtaaacaaggttggcggttattaactcatctgtcatctttggctacaggactcctgaaggctcgttattttccaactggctcttttcttacagcggagattattggttctaatccgagtttcgtctggcgtagtatttttgaagctcgagatttggt

SEQ ID NO: 159135 - DNA, 742 bp, Cannabis sativa
aacaattaattcagatgctcaattcataacactatgtataaccacaaaatttattcacacgtgaaacattgttataaaagttttactctatccaactgttccacagcccgataactcataaacttgcatacttacctctctccactaatgttgacaatatcttttggaatcattaggtcttttcgaggtttaggaattatggctcagatattcagaaatcgacaaaagacggttttggctcaagatatcataagcacacaaacaaaacccacaagcttcttacttttttttttttcaaaaccccatagtgttcccacatttaccaagattgagagaagatatatattttttttaaacatcactgaaataattttaccaaacacatcttactttttattgtgtttctctttccttatttttcttatttttttttttcagtgacattgaattacacattttttttcttttctcaattctgcaagttcttctccctccaactgtattctcacactaaatatttctcctcccccaaactaattatgtagcttatgatatcatgcataaaatggtgaaaaaaaattaatagtgtggttacaattttcagttcaatgggtgaaaaacataacgggtttaggatcaagagggttaactagagataaacattcttatgttaggcttgaaaggctcaaactatccaacaaatgactaaatcatattccaattgaacactatcaaggatttc

SEQ ID NO: 159136 - DNA, 586 bp, Cannabis sativa
aatccacaggcagtggatcctgcattgcagaacccaggaaatgcaagggttctgctagctgttaatcctgcacagccggcaaacataggtcacggtgtaacgactgttatagatgaaatcgcgcctggtgtgcaagtgactgggaataatagttcagcacccaaccagggcattcataacacagttgttccgcctattaccaacactcaaatgactattggagatgatactgagttacaaaatctttgtgctgctcttgggctcgtacagggtcacaccaataccctacatcatgatcaggaagatctccgtgctgcggtaaatctcgcgttcgaggaacaaaggtgcatgtttaccaagtggagagatagagagatggaagcgttaagggctcatcatacagagattgaaaatcgtagtcagcaagctaccatcctaatacgaaaagcctaccaaactgtaggtcagcaacctccgagtgtcattcctctaggtgagacaaacgaagatccagcgatgaatacttcacagactgcaaatggtcagccgcccaatccccagtcacgagttccacttgtgggccaag

SEQ ID NO: 159137 - DNA, 526 bp, Cannabis sativa
tattttcgtattaaaccttattatattaattgtgatttatattttgtatatagttttactttgtaattgttcatggtttgcacatatatttctcttaattataatgacatgggaagagattgatgaaccaatcaaactttttaatttaattgcctaattaattaatgcatatatattattttggaatatttcttttattagttttgtaccaaattataaaattaattgttttccgtttaactagaaatgtggaatcatattgtattaattaataccaataattaagaatttttcacgatttaatacaatgtacattttagaaagtaaaaaaaaaagtcattcgatcgatatatattaattatacatgtctgactttcctatataattcaaaatagattgatatatttgtatttaataattatatctctacaaggatataacaataattaaaaatacatatatttatgtgaaaagtgaatcaaaattatttttagggaaatataaaaaaaaaaaaaaggagaaattt

SEQ ID NO: 159138 - DNA, 536 bp, Cannabis sativa
  modified_base (491)..(506): a, c, t, g, unknown or other
aaatacgtgtcaggcccgactcatctcttgagttatgaagcccttgaactgcaattagacttatcctatgaagagcaacatgtgtagattctagatagaaaaaaaaggttcttcggaataagactattgctctagttaaggtgctatggagaaacggtaatgtggaagaagccacctgggagttggagtctgatatgaggactcaacatccaaagctattcaggttagatttcgaggaggaaatccttttaacggggggataactgtaatgaccgctttagtaatttggattagaaaggcaattaacactaatttctgttagtttggattgattttagttcatagcagctggttttgaggttttttgtaggtttggtgcaagtttgagctttgagttcaaagctttgatctctaatggaaagttgagagtctttaagtttttctttaaaatacttgctggaatatattgtgtatgcccttattaggtactnnnnnnnnnnnnnnnncatttggtggagaattgagcaaagaatgaa

SEQ ID NO: 159139 - DNA, 577 bp, Cannabis sativa
gtacacacttgtacacgtggcaaaattttagtggtccacgtaatattagttttaaaaaataattataaattttaaaaaaaaaaatcataagttttttttctttttgaatttttttaatataatttacttttttttctttttctttttcttcttcttttttttccagaaaccctctattcctgggacctcacagcctcaaccataaaactccagtgaccaccggccttgaaccccaaccctagcgaccccctttctctctttctctctctcgtctcaccaccggagccttcaaaactaaccggtggcgtggctctcgacgatgagatctcttactggcatccgctatctctccttggaggtacctctcttagtctttctctctctatgttgtctgaaggtctgaggtcacggctgtgatgtggggggtcgtggggcttgggtctgaggtcgggattctgggctgtgaggaagggggtcactggggttcgagttcaaggtcggtggtcacggggggtttatggttgaggctgtgaggtcccagggatgaagggtttctgcagaagaagaagaagaagaa

SEQ ID NO: 159140 - DNA, 531 bp, Cannabis sativa
ggatcgccgcacttagcaggtttgtttcaaaatcagcagataagtgtgtcccattcttcaatatcctgcaaggaaacaagcagttcaaatggacgaaggaatgtgaaaaagctttccaagagctaaaagcacaactcgcaaaacctctcgtactctcaaaacctctggacaaagaagaacttggaatatacttagctatcaagtagcaagctgtgagtgtcgtgctaatcagagaagagagtaacatacaacacccagtctattacatcagtaaaagactgattgaggccgaaggccgatacccattgatagaaaaactcgcttactgccttattctagcaacaagaatgttaaggccctattttcaagctcactctgttcgggtgtacactgaccatccattacgccaaatattataaaagccaaacgcctctagacgactactcaagtgggtggtggagttgggtcaatacgaaattactttccaaccccgaacaacaatcaaaggccaagccttggcagactttgtgg

SEQ ID NO: 159141 - DNA, 705 bp, Cannabis sativa
  modified_base (118)..(118): a, c, t, g, unknown or other
  modified_base (374)..(375): a, c, t, g, unknown or other
accctagttctgtgtctctagtatagtatggttccatgtttgggtttaggttgtttgggttcgggtcctgagtccaggtttgggcttggaattaggtccgactcccaattcgggtctnggtcttatttggagtccaggtccttgtccgattacggttcttgatctaggtccaatttcagttatgattcctagtccaagtcctagtttcagtccaggtcaacttcaggttttggttccaatttttggtcacagggtacgagttcaggtacacttttgggtttgggacttggttccaatccgggtgtgggttcgggtcctcgtcagggttcgggtcgagggctgggtcccaaatccaaacaccaactacgggtttnntccaaaccctgggtccagatccggataccaatctcgggtcccattctggttccattttaggtgtcaactcaagtgctgggccctatgttcaagttcgagtctgtgtcgggtactaggacctggtcctagttctgtttcccaggtccctatccttattctgggtccaagtcccagttattgtgtgggttttggtcccggtctaggttcggcttcgagtcctagtcttggtttgcgtttaggtctttggctggttttaatctgggttcgggtttgggtttaggtcctggtccgtgccctagttaagttctagttccatttgcgattctgagt

SEQ ID NO: 159142 - DNA, 532 bp, Cannabis sativa
  modified_base (34)..(34): a, c, t, g, unknown or other
taaagcctctgaggatagtgctattaacatgatngaaatgttaaatatctttcaaaaggccttaggacaacaagtcaatctacaaaagtcctctgtatttttcagcgctaatcttgtcagtgaggtgaggcaacatatgtgttctatgttgggagtgaatgaggcaggtgatgatagcacatatttgggtttgccaaatttgtgggtcataataaaacggccttacttgggttcttgaaggataaaatgcgtaaaaggattcaaggttgggaaggaagattgctttctagagcagggaaggagttgctaataaaaactgtggctcaatctcttcctagttatgcaatgaatgtgttcttgctacctgtggaaacttgcaatgagatggagcaattgatgtgtaagtttggtggcgttcgtcgacgaacaaaaaaggaatccattggaaaaagtgggataaattgacagtacataagtctaaaggtggtatgggatttcgcaacttgcatgactttaacttgagtttgctttg

SEQ ID NO: 159143 - DNA, 701 bp, Cannabis sativa
ttccaaaaactctaacaattaattaggatgctaactttgaaaaataatgtattaatgtaaattaacttcagtatcgaaaaatgtcataactattttactcattctaacaaatccacagtccaatggctaatatgcttgcatgcttacctctctccactaattttgacaatatttttcggaatcaaaaggacttttcaggttagaaatttatggttttgatactcggtagataaagaacattttggctaaaaataccataagtacactagaacccgcaaacttttcaccaattaaattctcccgaagtgttcccaaaactaacaataattgagactttttaacaattccggacatcacttatttttcacttttagcttttgatctctcgcttattattttttttctttttcttttcttttttttcaagagaaattactattctaaaatttgcaagtgatgtcaagttaaacttttctcttcaaacctttctcaatcacgcaatttcttcttcttattttcttcaacactttcactaacaccattcttcattctcctaaacttttggtatcattcaaaatgcaatgaggatagaaaacaatgtggaaacatttttgcttcagcaggtgaagcaataaaacaggtttaggctcaaaagggttcactacgagtattcattgtatggtaggcttgaaaggctcaaa

SEQ ID NO: 159144 - DNA, 573 bp, Cannabis sativa
gcgcggcttagtttcctagtaataataaaataaaagatttaactgatatttgttaattagttattggatagttacttttgaatttgaattctaaattaatttaattaaattaaatatttattttattttattttaaaggattaagaatgatttatatataacactatatataagatatatagtatcataaattaacaaagaactaaaagcgtaagaaatacactaacaagttgagagaaaataggaactgatatacaattgaagctggctaatagacatgtttttcaatacccaaaaaaataaaaatacaaacttatattaatgatgaagaatcaatataaagggagtatgataaaacaaactaagtaattgcagatgtatgtgaactctttcaaccaaaatatctaatattcttccataagactaccagtgattttacaatatctagccatatatatgtacaaaatgtattgtttttcacacatgagtttattataagaatattttttatttaaggaaatatatttctatttaaggaaataaaataaataattgattttctgataaatgaat

SEQ ID NO: 159145 - DNA, 748 bp, Cannabis sativa
gtggaggtggatgttgtatccatgtttcgaaaaatacatatgttttattaattcctcttaattaataaaaaagagttttttcaaaaaaaaaaaaaaaaattaaacacctcataccacacctcacatgagtatactatctatataaacataattagtattgcaatataatatgtattgaaaattatattattgttgattgtttttagaacaattgaatatataatatatacaaaattaatgtgcacatatttacatataatttattttttatttttattttttttagaaaatatatctatgttattatcaatagcagtacataagaaaagaaatactcgtgtctataatattctcaaattcgtgacatgaataagtattaatttataatttaatatgtatataaagaaatgaaaataagtaaaatataaacaattaaaattgaaaaaaatgaagaggaaggaaaacaaaaaagatatattattatatattatatgcattaattttttgtgattggttttttaagacagataatttatttttaatattttgtgaaagacgtacatttagtggagttatattcattaaagttttgattagaatattataactaaaatttgtaaggagttccatttacactcaacaaaattataattacaccctaatatttaagaaaatgaagtttaaaataatttttaaaaataatttttaatatatatttttttagttttttcttacattattttgtgtt

SEQ ID NO: 159146 - DNA, 669 bp, Cannabis sativa
  modified_base (625)..(634): a, c, t, g, unknown or other
cctgaattggttggtacgtttagggttctggacctttgggatgaggacaataatggtggcattgattcctctatgcatattaccgttctcaaagaagtcaagtaccgcttcacaaaaatcagatccaacagactcccagtagtgcttgtaaaataaaactgacatcccatcaggacccggggctttatgattgttcattgcaaaaagagttctcttaatctcgtcagtgctgggagagctgacaaggtgatccaactcctcaagggagaggctctcctgaatcagacgagcgcagttgtactcctgactagtagcagcctccgtaaaaataccctggaaatactcagtaaactccctcccaatggcctcacgtccagaaatccagacgttatctctattcaaaatactctcaatagcatttcgccggcctttaatggcggccgaaaggaaaaagaactttgagcacttatccccatctttgagccacgagatcctggccctttgcttccagtagatcgctttcctaattcaagaactattatcactagattgtgctctccgaatttgtatagtgaaattatgtattttataattcacttctaaatttaggtgccgtttggtaacnnnnnnnnnntttaattttttaatcataaaatgaaagtaaaattt

SEQ ID NO: 159147 - DNA, 691 bp, Cannabis sativa
cgatgaaagaatttggtgttcttatctccctgggccaaccattgggtcctcgctcgctgtttccaataagtttcttctttgtacagaagagcgtcaagcctagattgaagctcttttatatttcgaatggtgttgtcattccaaacaggagcagagcgggcaatttccaggtctttctcaagcttgctaatgtgttttttaaaattaaaatcctttttgtggttccaattgttgagtttcttagcacaagagtcttgagtagcgactaaattgaggatgggctcatgctggctcggttggctagtccaggactggtcgaaaacatggttccaatttgggtccttaaggcaaacattctcgaagtgaaaatgtttgctattattgataggcccggggggatggaagtgttaagctcaagggcgcggtgatctgaaccgtagaaccccagatgagcaagagtggcatcaggaaagatattggaccaatggttattaacaataccccagtctaatcgttcttgaatgttttttggggatgcgacattattgttccacgtgagcaaaggaccagttgggtcgagaggggagagattaaaggaatcaaggaaatgtctaaaatcagaggaagggcccctgtcgggatttcccccttgtttgtcatgggaaaagagaaaagcattaaagtccccaat

SEQ ID NO: 159148 - DNA, 818 bp, Cannabis sativa
  modified_base (98)..(109): a, c, t, g, unknown or other
  modified_base (742)..(745): a, c, t, g, unknown or other
ttgttttatttcatgttaagctaaacgatcagattagatcaaatagccctgatataatttactacggtaacaaacacattttcgatcaataaatgaannnnnnnnnnnntttcaaaattcaaattgagttgaaattattaacatgttgataatttaccatccagtgcgtaccaaaaggtctggtcgaactcaagactccgaacagataaaaaagtatacttgtaaaaaaacaagtgaccaacagtcataagtctgctcggtcacttagggggcacctatacctgtacaaagcatttggtaaagataaaataaacacaattgcacgatgattataaatagagaatgaaattcattaaaaataacaaaagcacgtaataccgagattaaaagctgtccggttagcctgttgtctgtaaaatgaaaaataattccaagtttaaagacctcttggccggtcatgatgtcttaaaaaaaggccttatggccgaataagatatataaaaagaaggataaaagagaaatatttaaacagctggagtcccaggctctcggtttggatcttctaggccagtaggagttggaggacctgttgtttgaacgggaggtacatcaacattcttgccagaggaagaagcagtcgcatcgggctcaccataagccacttgagaaacacagtactcaagatacatgtccttggcctcgcccaggtggaacctatgaccgtgttgggttttgtgccctnnnnaaaacctatttcaatataatcagttttacttattaataaagatcagaaataacattttttgttgcatggttca

SEQ ID NO: 159149 - DNA, 639 bp, Cannabis sativa
tatgctaagctaaaaagctaaagatcagatcaagatcagatcagatcagatcagatcaacatcagatcaacataatagctttgatgtaagttgctacagtaacagacatattgctgaccaataaatgattaaagatgtttatttaaattcaaactgagttgagttcattagcatgttacatatttaccatccagttagtacaaaaggtctggtcgtacccaaaaccccaaacaaaacaaaatacttgtgaaaaacaagtgactaagagtcataagtctgctcggtcacttggagggcacctatgcctgtataaagcatttggcaaaaaacaaaaacaaaaacaaaacaaacacaattgcacaatgattatcaataagggatgaaattcattatgaataacaaaagcattcaaaccttggattaaaggctgcccggtcagccggttgttcaaaaaaatgaaaaataaattccaagtttaaagacagcttggccggtcatcttgtcttaaaagaaggccttttggctgaacagacataaataaaaggatagtaaaaggaaagaaattaaacagcaagagtcctaggctctttgtatgggtcaactggatttgaaggggccggaggatcatcattctgggcg

SEQ ID NO: 159150 - DNA, 723 bp, Cannabis sativa
tacgtcagtgaggagcttgctgaggcagttcctcataggaggcagggtgccttgggctccacgtgggtaagtcctccgtccaagattttggatgcacgccttcgaactctcgaccaagacgggtacctggcccgcccacgacaatcgtgccacaaatcctgataagggaatgtgcgcctgatcggggggctcacagccagcaaggggcgctgatgcccttgcacaagtacttcagggatgtggcagacttctttggcctttgcccgacccaaattactccaaagggcattaagtatttgtctgctctcttcgtcctctacgcttccgaaggatgggatgctccttccccccacgagatcgcttggttctttgacctaaagtctacccccaagcaaggcaggtcggggtacttctacttctctcagccgaggttcaagtggttgagcggcacggatgacaaggccaccagcaaaatagggcattttgttgatgagtacttcatggtgaaggatccgagtatcacccggactcggtttcagtagattctgacatgtcaccgtcctctcctcacccttgctcttagggatagagctaaaaaactttcccggttgcctgaggaaggcaggaatatcatccagttgacctccgatgataatctggtgaagtatgggctttaccctgaggacttttctcctaagtagaggaagtctggtgctggccggt

SEQ ID NO: 159151 - DNA, 666 bp, Cannabis sativa
  modified_base (241)..(246): a, c, t, g, unknown or other
  modified_base (483)..(483): a, c, t, g, unknown or other
tttttttgttttttttttacatttatatgggtttttttatgccatatttttgtaaaaaaaaagtagaaattccatatttgtaaaacaacaataagttttgcctgaaaagtcgttagcaccggaaaaagtcaccaacaccgtaaaagtggccggaaaagtcaccagataagtcgccgaaaaagtcattgtggccggaaagtcaacgaaaaagtcaacgttgccggaaaagtcaacgtcgctnnnnnngtcaccaaagtaaatgtctcatatataactaaacatatatccggttatatgaataaaaactaataactgaaaccggttataattgaaatataaccggttctggaacgtaataaataaatataaataacataaaataactcaaaccaattataattagaataaaactggttctataacagtgttataatgaataaaaacaaataacgcgaaagaactcaaaccggttataactaaaanagaaccggttatataacataatgactacaaacaacacgcaataactcaaatcgattacaataaaaataaaaaaaaatcagttcctgaaacactgaaatataaattaaagacaaaactagtttcacaataaaatacttcataacacataatacctcataaaaccggttataattttttttttaa

SEQ ID NO: 159152 - DNA, 514 bp, Cannabis sativa
  modified_base (485)..(488): a, c, t, g, unknown or other
gcgaggctcatactctcataagggcttgcccctagtcttgggctttattccaccaggggagttgcctggcttaccaccattgttttctctcttccctccatttgatctgtattgcaccttagtagtaggggttttagagtttagtgacttcttctcgccaccttttaagcctttggctcgggtgacgacttcttttagcttgataaagccatctgctctataaaagaagtcattcatggtgtatactgccttgatacgaaggtcaaaccacagaggactcatctccttgagtccggctataagtgccattacccttgcgtcctcgctaagacttttggccttaatggctgcctctaagaaccgttgaatgtagtctttaaggggcttcgtcttcttgtcgcttgacatccaccaaatcattgggttcaatttcgcgttgttggaaaggagaaaatattgaaaattattttaccaagatctagatnnnntaccatgtatgtttcattaacatcct

SEQ ID NO: 159153 - DNA, 760 bp, Cannabis sativa
ccagtatacatcttccaggttggcatcttaaacttgtggggcaactccaggatattgatctcgggggagaaaggggttccacgtgctcgatctaactcgagatcgttgtgcctctgaccggccaggccttggaacatattttttagttcgtccagctgtacctgcacagctagactaacctgtttggccacttagccgatctgagtcacatcagcatctctctgagcgggaatttgagcgcgggttctgggttgcacgatcgacatgtcaagctgatcgtccactcctctcctcctattcagatcgtttctaagatcatgagtcgtccctaacctatctaatatagaaacgcctggctgtctcagtgactggttggttcggccaatttgctgaccgacaccattaacttggttagagttattgggtatgacttctcccgatgaattactagacaaggtctacctgcctaccacttggcccacaggtggaacctgtgactggggatttgacggctgaccatttatagtctaggaggtattcatcgttggatcttcgtctatttcgcccaaggggatgacattcgcgggctgctgcccgccagtttgataggcttttcgtatcagcacaatggcttgcagactgccatcgtcaatgacttcttgttgagcccttaacgtttccaactctttgtccctccattcagcaaacatgtgcctctgctcttcaaacacgagatttaccgcagcacggagttcctcct

SEQ ID NO: 159154 - DNA, 530 bp, Cannabis sativa
aaaaaaaggtataatttttttagggtttaaattattggtttagaaaaaaaatttaaagattttctaagtatagaaaatcaaatttcccatttgtatttgtgaataagtttattgaattaatttttaatttttgatcctataaattaatttttaattttcaatcattaaagtacttattgactgtgtatctaataattttacatacaagccttaaaaaaaaccaccacataaaaaacccgctcaaaccatccaaaatcaatctaaataattttcttaattatccaatatccatataaccatatgtaatgtatttttattcagttcttcaaattatagagttacaaatatctatcagagaaagtaaataacattgcaatcaattaagtccaaatcagttcgaaatcagcccgttcaaatttttaaaagggcatgcaaaatggccctaaatttaacaattaagttaataaatgtccatttttttaaaaaaaattaacaaaatgtccttttagttaaaaatttaatgataaaat

SEQ ID NO: 159155 - DNA, 740 bp, Cannabis sativa
cccggcccggcccggcccggtacatattatttcgggtcgggcccgacccggcccggttttttttttttttttttttttttttttttttttaatgagaaccgaccaattcaattacaactgaccgtcaaatattgcatattcaattatgatttgatcggattgtatattatttttaaatatccaattgaatcagatctgatcgtagataagatgtccaaaaatacaatacagaactaattagtattttcgtttagtttagagtaattaaattttatattattatacttaaaatttatatgtttatatgaaaattcaaattaaaattttattctttttttagattggatggatctaatccaatccaataagcactgcacctaaaatattgaatgaatccgatccaaaaaaaaaagtataaggtctgaaataatagataaatctaaattaaactaataaacatatatgaaatacatctaattgataaaaacaatccattgaatgttggatcgattggatgactgaaattaattaaatgaaatggtaaaatctaacatccaatatataattagatcagatttagataagcataaaaacataaacattagatgtggccaatcaacacccccaattataaggaaaaaaatcttctgtccccaaaaccatgtctccaccctgtcccaccaataaatttaagccacctattttcttcatttaatagatacttcaataaaaatttaaaa

SEQ ID NO: 159156 - DNA, 532 bp, Cannabis sativa
atcagggcataaataatcgcacaaccctgcctaccgcaccagctgcgactactggggttaatatccgagaaaacatcgccgcagtagtaacgacgcctgcggcaacacaagccaatactcccttaactgggaatatcgatcaaggtatgcttctgcaagctttaaaaatgctcgagcagtagagaaagcccatataaaagctgcatgggacttctcctttcactgcagaagtgcgacaaactcgactgcccaagggattccggttatccgaatccctaaagtataaagctactactaatcccatagattatttagaaaaatttgatactattattgaagtagatcaggtacctcaacttgcgaagtgtcgcattcttgcgacaacgttggaagagaatgcccacaattggttcaacgaattacctgaggcatctatcttaacatgggagacctttgtcgacctgttcctcacacattttcaagccacgatgacctataggccaccctataccactctggctaatatcaagca

SEQ ID NO: 159157 - DNA, 605 bp, Cannabis sativa
gaacaagatgaagagatcagatgtttgaggatgcagagtgcttctaaaatgccttctcctaaaatgcaggtggctcatgcccctactgtgcaggcaaaaccgattgctgctgtgaaccggatggaaccactgtacagaaggttctgcaagcaggcgccttcagtctttttgggaggtctaaatgttctgaaagctgaattgtggctaattgttattgcacggattttaaacttaatgggtgtcatcagcaatgacagagtggcttgtgccacattccaattccaggaagattccttggtctggtgggatatggtggctcttactcgggatgttactaccattacctgggaagagttctaggaattgtttaatgcaaagtattataccgaggcagtcagaagtgcaaagagaaaataatttactcaactgactcagaaagaaaatatgattgttattgaggatacaacccagtttgatagattggctaggttggctttggaaattgtgccaatcgattttagtaagaaagaaaagtatctagatggttgaatccaaaaatcaaacacgacctgatgatcacaactgatgataacactacctatgct

SEQ ID NO: 159158 - DNA, 647 bp, Cannabis sativa
tgaagcggggacgttacacaaagtgtcttaaataactataacatatatgactatgagaaataatttgactaaaaaattatttaaaataccaaaacaaatagaaatatatcaacgcatcccttttaaaggggtgcatcgtataatttttttatattatttgtgtcagctgggtgcttctacaatgcaccccactaagataggtgcactgatacaatccctaactgtttctgtatctataagaattttttagccttaagttctttcatagttgtgtacattataattatttaagacattttataaaattttgagaaatttgaaatgatttacaaaataacaaattaatgttcaaatcgtctatttcacacacgtataaaataaaaaagtcacgctacactctttaaatactattttcgatatgttaatttttctaaatttcgtaaaaaaaatttagacatcttaaatctacaacgtatacgatcataaaaatagactaaatatttttttagacactaaacaataaaagtgcatcaatgcacctattgaaaacactagagttaagtttctttatgtttataggtctataaaaaaaaatagggtgattctacaatgcaccctcttaaaagggatgtactgactcttgactt

SEQ ID NO: 159159 - DNA, 529 bp, Cannabis sativa
aaatacttgaggtgggaaagaggatcttctcttccagtgtacatcttccaggttggcattttaaacttgtggggtaacgccaggagattgatctcaagagagaaaggggttccacgtgctcggtccaacttgagatcattatttctctgtccggccatgccttggaacatattctttagttcgtgcagttgttcctgcacagctggactaacctgatcggcattttggtcaatctgagtcacgtcagcatctttctgagccggaattagagcacgggttctgggctacacgattggcgtgccaagttgatcgtctactcctctccttctgttcagatcgtttatgagatcatgagtcgtccccaacctttcgaatacatatatgcctgactgtcttagtgattgattggtttggttaacgtgccgaccgacacaattaacctggttggaattataaggtatgacttctcccaatgaattactaaacaaggtctacccacctactccttggcccacaagtggaacctgtg

SEQ ID NO: 159160 - DNA, 553 bp, Cannabis sativa
aaagtgactcctcttaacttcaacgtgttcaaatgtaaaacagacttcattcattaatttatttttgcagcaacaccaggataaaactgaatcaaagatgaaataaaataaaaggtctttacttttatttttaacatgggttatttcttatattttcaaatatgagaagtcacatattttgactttcgatccattcttttgttcttatcaattttccaatcaaaatgatcttaacttctgaatttcatcactaattttttaaaggtctcctataaggagataatatacatttccgttaatcgatatagttttattgttttcttaattcaaataccagctttctttaccaaacataaattgagtattgctagtagtgcctacagtgtttttaatcatatctcaaattattcatttttagtactaaatttaacgttctttttcataacagtaattttttttttttttttcaaagccactaaggctagcttagtggtgagggagggatggaaaaaagggagaggtcatgggtgaccttgaagctattaaattatta

SEQ ID NO: 159161 - DNA, 504 bp, Cannabis sativa
tatgaggctaggtctgtgttcagttcttggtctgggtccgagtcctggtcatgatcctagtcttgttctagggtcctggttcagcgattctttttcaggttctaataatgggtctcaggtctatgtctgggctcaagtttggttccttgtcttggttctggtcctagtctgtgtccaagatctagacaccgactattggtctgttccaggcctgttacgcgtatcccgagtcaagatctggatcactgtcacgggtctacgtctggttttatttaagaccccatgtcccatttctgagtttttctttgtgatcaaggctggggtgcagttttatatcccgaccctagttctttgtccctagtctggttccatgtttgagtctgagttcaggtttgggttggggtaccgagtccaggttttggctgggatccaggtccggctcccaattcgggtctaggtctcatttggagtccaagtcctggtccggttacgtttttggatcta

SEQ ID NO: 159162 - DNA, 551 bp, Cannabis sativa
  modified_base (392)..(398): a, c, t, g, unknown or other
ggttgtgtgttaaattttaagtttgtattttagattttattttaaagattgtcattctaatataactgtgttttttggtttggtgttgtgatgtttttttcaatctcgctaactctagcgacaactattaataaagggaaggtgtttttcaaggtgatggggtattgttcaaatacgttatagctttattgtctatatttctgggagaagttttgtcttatgtggcttgtgttttgttttccacagctcatggtttggccaaacatgtccttcggttagacaatgagctatcctggttcgaggggctccaccgccgattgtggtgtgctgcattgttaatcatgtgtgactttgttcaccacgtaaaaaaaatatcatttataggaagctannnnnnntaaggataaaatacattgagggtggaatggtaagtttatctctacttaatgtaaatcatctatagaggatctttgattatttagattagaacgatggataattcatggtgtatctataccgtggaacatatagacataattaagagtacaatt

SEQ ID NO: 159163 - DNA, 532 bp, Cannabis sativa
ttattgtagcgatttcacacatattaatttagaataaaagaagaaaatagagaagaaaagaatgcttaaaaatgtatagagaaagcttccaatattgatcttgctctccaaaatccgtactctttgattgcttctaatttccttctgaattactttctaattaagagtttctcataataataataatgtgtttatataggctatcaagattacctaaaagatactaagaagatttaaaatttaaaattaaactgttaaacaagataaaaatcgcaactcaatccttttttctcgctatctttttatctttttttttcagaaattttctgctacgacgactagtattttggccataactctctcgatattgcttagaattagacgattcaagatgttcccaaaagctaaaagagagacactacaagaaatttgacttttgccagcacatttttgtgctggcaaaagttgatattgcgttggtaaaatagaattcacttgtgatgtgttagcaaaagggggttggcaaatcaat

SEQ ID NO: 159164 - DNA, 558 bp, Cannabis sativa
ctcatgcttgagcaccaagcacactataaataacccactacacctcatcagtggtctatatcagtcacatcggataactataacatataaacttcaaagtttttcaccacaatcactaagagatcaacgttgggggcaagagtagtcatactcagacagtgtcaaaaaaatttcaaacatcaaggcaacaaatgtgatggttaataatcaagcatcactaactgttctaatcaaaccgaaccctcaaaaaagtgggtcactccctaagagatccgaagccatgcaagcagctcatgtatggttttaggtgagccaacattgctccctgtggtagaattagatcaccactcacagtcaaaactgccctgtgtaaacatcaatatgattaccttcatagtgatcaacaccaagtctccttggaaggtcaacacccaacgacctctaagccatctcacttatctaccacctatctgtcaagttctcgacaacggctggtatcgaccatctccttggcaaccaaattgtagaatgtgaatgttacaacacattgttgacatt

SEQ ID NO: 159165 - DNA, 655 bp, Cannabis sativa
aattattcaaagtatgtttaagtttgcttactaagttataagtggcagattataattgctcgtgcgaagtagaactgataagaattgctcgcaaagaaaaagcatagcacagtataactactcgcatacatacatagtagattaataactacttaagaaatctcaaaagaagaacgagatcaatggaaatgcttacttaaagtatcttaagtttgatcaaaatataattgtttaagttgtgaataaatatgcaaataagcaaacatattaagttcaagtataaagatgcaaggcaataaatgaaaagataaaagtaaagttggccatcctacaatgcaaatttgtctttatgaaaaattaccacaatgggcaaaccattgtctcagccaaaaggccagtttcttaaaaaataaaaagttaaaaaccaagcctacatcgtaggagacttggatggatcttcttcttcctcagtctcagcagcttcttcttcttctttcttagccttctcgcagtaagctaagacttcctcggcagcctccccctagaaacttaaatgcatctcaggattcgccattcaggctcgataaatggaatgcttggcaacaacgtgcatcgttctttagcattggcctcagcgccctcgagcttctcgttg

SEQ ID NO: 159166 - DNA, 966 bp, Cannabis sativa
  modified_base (692)..(712): a, c, t, g, unknown or other
  modified_base (938)..(941): a, c, t, g, unknown or other
agaaatctttttttttaataaaaattatcatacaattttttatttaataaatagagtgactacttaatggttacatttttattgtaaccatgatgattacattcttttaagatgtaatagcatgttatcaataagtaaaaaaattttatttagaattaaattaatcataattaataattttcctaaaaaaattaattttaatttaaatatttaataagactttctttagcaattaatatttataaataattttatttttatatttaagtccctattataatatttttaacatttaaaccatttaactataatatttacaataaaattctaattttttttatacaaaatttacatttccaccccttctaaaataaatttttgaatacttaattaattttaaaaattacatctaattattattttacaacaaccgcttgacccatcttcctcctttataaaaaaaaactttaaaaattagggtttcaatttatcccaacctaacattatgtgaattttctacttcaatacaatctcctacatcgttgccacaaacttatttctccattcaaccagcgacagttatatttttccttggtttttaataatttgcttgctgtgttcctactactatgcttatttgtaaaaaaaaaaaaaagcgcgcaacaatttcaattaattggtaatctactttnnnnnnnnnnnnnnnnnnnnntagattgataaagatgatttcaacgaggagcgaaaatagttaacaatcattaattttataattgttattatattttttacttaatttttcatttttaaaagaaaaaaaaaactaaataacttgaactaatcttggactgacaaactaatttagcacttaaatgtgttaaaataagattgagcataaaattacctctaattagaggtcattcatactattttttatnnnntaaggttatgtgtgtaataacttta

SEQ ID NO: 159167 - DNA, 561 bp, Cannabis sativa
agtttgatgtgggggttggaattattgcaacatggtatgcggaaggttgtgggagatggcctgagtattaatgcttttcgggatccttggctaccgagggctagaaagtttcggcctatttcaccttctcctcctagctgtgtgatggttaatgacttgattggtgtggatgggtcgtggaatggtcactctttgtcccaatactttttggggatggatattgagattattcttagtattccgttgcggagaggtcgatgttcggatagttggtgttggcactatacttctaatggttgttatactgtcaagagtgggtatgctgttgcttttgagatggcgggtgaacggaatggtagttcctctgtggattaggcgcattggtggaatgggatgtggaatttgaaggtgccacaaaaagtaaagatttttctttggcgaatgtatcatcgtgcccttccaactaattctcagcttatcaagcgtaagcttcctcttcagccgctgtgtcaaaggtgtggtgaggcggcggaaacaccggaacatgctttagtcttttgc

SEQ ID NO: 159168 - DNA, 602 bp, Cannabis sativa
atatcatcacaaatattatcataacaaatttatattagattaatgattaataaatattattattaataatataaatacataaagtcacatttaattataatttcatttatttttttaaacacattttttaataattaataagcatataagtgttacattttaaattatttaagaccttttaataaaaaaatatttattcaaataaataaataatcttaagtgtttcatttttaaaattattatgaattttaataaataaattatatttattattataataaacatactagattaataataacattataaacactaataatgctaaaacatattaaattttgtatattctttttttttaattttatattaaattttagtaacatattattctagtaatatattaaaatataaatattaatttttatatttatatttatatatttttttagaaaataattagaagtaattaacaagttaaaatcataaacataaatatttatttataaatttaattaatttgtaatcaaattatgtttatagatacatcaaatgtttaactcttggttttaatatacagtagccttttcaaaaaaaaaaaaaaa

SEQ ID NO: 159169 - DNA, 538 bp, Cannabis sativa
gacaacttgccatatctctgtaatctgatcccaaagttataaggatttccttgatgactcacgatgcgaaagctgaatttgctaagtgttgacgttctgcgtggattgcccactgctcggtttagagaacttcgtccgagcgaatgtatgaggtgtcctgttcggcctgtgtcttgcaagcacctgaagttgattccacgtgtcaccactactacaatgtaagcatttagcttcccttttttcaacccaatttataaaaagggaagctaaagggggtgaaaatatctgcattgacatttagaggtggttttttggtaaaaaccgtaggtatagaatgtatatatatctatgtcgtcggttgggggttggggaaaatcagggtttttttatataaccctaaggcgttggttattaggtattaaccgaagccataggtgccactttattcgacacgtggcacctatggcgtcggttaatacctaataaccgacgtcatagggttatatatcagaccctttctgcttcgtcttcctcactt

SEQ ID NO: 159170 - DNA, 546 bp, Cannabis sativa
tttacatggttcagacgttaatgattcttagtctacgagtctatattattagcctatttcggcagatgttttgagattacaaggcattacactgtggaattctctgtgaaagagagtttttctatggattttagtagggtgacggtaggtggaaaaattgttatccccttgcctcaagaagaatgagactatttataagcacactctttacctacctagggtttcgtaccccatacgccaccaagattagtactgcgagagaacgatctgaccttcggttggttggaactttcttcatcatgtggtgtatagcttgcagagagttttgtatgagcctggacacatgtcgcacaaaggtctcccatttgtaaaatagtctctaactaggctgtttgggcaaaaagtatactagagggtgcgtacgcgcactaccatgctcgggtacttgtctattctcttcaaaacccttactgccctccgggttctttaccgaaggaagttattcctggggggcatcgcctacccttcccttccaggtccgggagc

SEQ ID NO: 159171 - DNA, 505 bp, Cannabis sativa
aaccctattttggtatcggttagttatttcgttacgaaactagtgactctgatacactacacctaacttgattaaatactttgtgtcaccttaaacatctacagtgatatggtcagtacttcgagtgtacatccacagcgctaagtaaaaccctatttcggtatcggttagtgatttcgttacgaaatgggtgactccgatacactacacctaactttattacaaacagtacacctaacgagtgtacatcggtaacactaagtagaaccctagttcggtatcagttagtgggtgactctgatacactacacctaacttgattacagacattgtgtcacgggacccctaaacacctatggtgatagtgtccctactgcgagtgtacatcgaccccactaagtagaactctatttggatatcagttagtgatttcaatacgaaactggtgactccaatagcctacacctaacttgattacatactttgtgtcacgggacacctaaac

SEQ ID NO: 159172 - DNA, 522 bp, Cannabis sativa
aggcctgtccgaacttcctcctcgagaatccttggacttagcaacttttggagtagaggggtttgcaacagttagctccttagaaaggttgataaccccccggtaggcaccttttccttggaaggggtcccttcaccgcccttagatttcttcgctggaggagatgcactcgagcttcctccaactgtcttctttagagcatcaagcatcttctgagacatctgcatgaaacaaaaacaacatggttagagaaaatagacactagaagcataaagcataatagttaagaagcttaaaaacaagacagggtagtctaccaaacgatttcccgagcaagactcgaaagcccatcatcacctgataagcctcttatctcagacataatagctttcccttttccgagcacgggaggaggtggtcgaccaggcgaactaggctccctaatgcgattttcatgttcaataggcctgggcggagccggaagtttcttcctccttttaagtggagttacctgctcttcct

SEQ ID NO: 159173 - DNA, 705 bp, Cannabis sativa
  modified_base (97)..(98): a, c, t, g, unknown or other
atcagagccaccaggttgtcttccaaagatcgtcacgacatgtacaatcatcatcagcagttagctcgttccactgttaggaagcatgttagtagcnngatagtagaatatgcacatgttttcgatttccaaataagcggcattagtaagtttttctttgatcacggtctgaccaaactagctcttggttacgcaagttgttcagattagtatggacgtcaagcgaaacaccaggagccagggcaattcggttgaatcaagtggtggtcagggagctcagatttcccttaatatttgtggtcgaggtagaggtcccagaggtagggcacgtggttggggttatgctaacccaccacaagctgcccaagaatgggaaaacagatttgtagaaatgcaagccaaaattaatgaacaagatgaagagatttggcggttgagatagcagggtgctcctgcagtccttgctccagaaataccagtagctcttgcccctgctgtgaaagccgaacctattgttgcagtgaaccgaatggaacccctgtatgaaaggtttcgtaagcaggcacatccagttttcctgggaggtcccgatgtcataaagtcgagcaatggctaactgtaatcaccagaatattaaattttatgggcgtcacttgtaatgatagggtggcctgtgccactttccaattccaagaagacgctctg

SEQ ID NO: 159174 - DNA, 593 bp, Cannabis sativa
ctttgaaatcgaaaaaaaaaccccacaatccgatggtcggaccatggggtccgatggggtccggtcaaatattataatgtgcgcaattatttagtatcagtaatagttcaaaaatacaattttattgggcaaatgttcaagggagaaaaaaataacaatttattaccattataataatttaagttataccataaccataaagttcaccatgaatttcaatagtagtaaaattacttttttatatagagcagtaaaattactttaaataataatgatgggggattgtagcctcaagtataaaatatatattttttaaaaaaacttatgagaaatattaaaaaatatataaaattctttaaatatatgcgattctcaattgtcataaaaaccgcgcaaagcgcggtaatgtttcctaattttatatataatcatgatacgaaacttaactaacctttagattgtttgtctgccatgaaattaaattgctttttcaaatataatgataatagatatagtaatatatatatactagcaaaaattacgtgcgaggcacgcatactaaattttaagctagttttttttctatgttattt

SEQ ID NO: 159175 - DNA, 1146 bp, Cannabis sativa
ttttcctcacttgccaaagcatttcactcctttcataggctaaatgcagagaaataccatatctccaacctgaaagtcaacattccatcacttcatatgattaaaactcttttgcattaactgagcagtaagcattcaagttctaatcttattaattgcctcactcattttccgaacagcttcgggacaaagaaactttgtctcacctaacttatcccagtgaataggtgatctacacttcctaccatagagcagttcaaaaggggccatcctaatagttgaccgatatctattatcataagaaaactcgatcaagagaaggtattttacccaatatccctcaaaatccaacacacattcctgtagcatgtcttctaagatttgaattgttctttcagattgtccatcaatctgaggatggaatgttgtgctaaatttttaactgtgtacccatagctcgttctagactctcctagaatcttgatgtgaacttaagatctttgtcagacactatagactttggagcactgtgaagacaaactatttttctaacatactactcagcatactgatcaatggagaaatttgtttgtataggtaaaaagtgagctgaatttgtatacctattgacgattaccaatacagaatcgtattaccccatagtcttatgtgatctaaccacaaagtccattgtgatgtctttccattccattcttgtaaattcaatggttgtaacaaatcaaacacttagaaacaaagtccgctatattattcttcattcttggccactaatacatggtcttaaggtcctagaacatcttggtcatactggatgaacaaagtggtatgggattcatctagaatctcttttctaatatcagcatccatcaaaacacatacacagttcctaaatcgtgacatactactatcatcaacagtaaaatcttcagctttgcgagctaataatttgtcccaaatttggatcttcatactgagcttttttgattatctctagtgacgtggattgtagattaatattagctagtagtaccactgttggaatttattttacaaggacctagatttactaacaagtatatttttaacatcctaaatatgaacttctagaacgatgaaaataaacac

SEQ ID NO: 159176 - DNA, 647 bp, Cannabis sativa
  modified_base (591)..(592): a, c, t, g, unknown or other
acctaaacaatgcataagcaacataatccaaccagtatttcatagaaaaactcaataaaatcaaacatgccattaaagacctaaacttgagttttaaagctcaaggttgatcaaatctatttccatagctaaaaattaataaccagaactcaatactaacctaaaatgaacctaaaagcttcacttcaaatactatcaaccctaacaaccctcattcaaataaatcacaacatgaaacaaattaaaaccttgagaaaacttagctaaggagtgtctaaggttaccttagcttcaagagttcttgattccttagttgaatctcagaaaaacaccaagataaaggatgtttccttctagtttgcttcagccgaaagagagaaagagaaagagaattctctattttttgtttttcctttcaatttccttatttttctaaaatgagacttaaggataaagtaatttatccttgctgaataaataataggccatgtgtcacttcctagggcagccacaaagtatttcccttaaatgactaaaataccctttaagcctataaattaagcatttcaaaattaggggtaaaatggtcannttccataaccccgcttaacctcgatattttattttctctaaaatatttcccacta

SEQ ID NO: 159177 - DNA, 504 bp, Cannabis sativa
tattttgggtcgaatttgaaaataatggaattgttttgtacaaattagtaaggggtataaaatttgatacgtgctgtattattaaggccaaatagtaaaattttcctttataaaaaggttataaaaatatgacaggtttgtcacttttctacgacattttttaacatttaaaattttttatggtatttgatatgccatatttttataaatctattatccaaacccatatttcatgtttttatttctaacttaattagttttattttttttctttagtttattttacttttatattttatggtttctttctattttgaaaatttacagaaaatattaactttttttcaaacattacatgtataatttgacaaggaaatttttacatttatacttttcttaatttcttttttactttttttacttataaaagcttcaaaaaagcttttttttttttatatatatatattttttagtcaattttgactccttttttttttttttttt

SEQ ID NO: 159178 - DNA, 519 bp, Cannabis sativa
cttgcattccagttatcatcatctgagaattcatgaggaagatattcttaagaccgcatttctgaccaggtacgatcattatgagtttttggtgatatttttcgggttgacaaatgctccaacaacctttatggatcttatgaacaaagtattctaggatttccttgataacagtgttataatgttcatcgacgacatccttgtgtactctcagacaaaagaggagcacaagaaacatctccgaatggttttacaaagactcagagatcataggttgtatgcaaagtttaaaaagtgtgaattctggttgtcagtagtgtcccttttagggcatattattagaaaatgtggaattattgtcgatccgaaaaagatggagtcagttaaaagttggccaaggccaagaactgttacagaagtatgaagttttctcggattaggagggtattatcaacattatgttgaaggtttctcaaagatttcaatgaaactaaagaaattgacaaagaagaaccaaca

SEQ ID NO: 159179 - DNA, 507 bp, Cannabis sativa
aaagtaatttatgacaaaaaaaaaaaattaagtaagtttattttagcttgaataattaatgtaacactttcaagaaactttaagtgaaaaatgaaattttagttttaaaatgggacctatcattaaaactaaataatttaaatatatagggattatttcacaaatatacaaaaacaacaaaaaaaaattacaaaaatacgatcgtacggaattttaaacatttttacgatttttatgattttatttatagaacttatggtctttttatgttgtactcttgttaatttattgttaattttttttattatttatatgttattttttgttgcttatttgatattatttttctgttacttttatgtagttttcttgttattttcgtgttgtttctatagaaaacgtaaaaatgtaaaaatgtaaaaattttacaaaaaataatgctttatataattatcccatatatatatatatgacactagtaccaaatgatgaataagcatatcagaa

SEQ ID NO: 159180 - DNA, 576 bp, Cannabis sativa
tactaatatctaaaacaaattttaattaattaaaaaaattaataaaaattaattttattatgataattagatttttatttaaaaattcagattctacacaaaattctaccaaaatttgaattttgtcaatgcaagatgatttttcaaagtcaaaatataacaaaaataagattgcacattgcatactccttgctcgcgcacaaggggccaaattgtgtgaaaaagggctactggtagcctttttgagaggcaaaactcggtcaggaggggtttaggataacccttgtctgcgcgcgcatgcgtgttgctcagttttaaatatttttatctaaattcaaaaaatcataaataattcataaaaaatctaaattaagttctgtaaaagccttaatttattaaattttcatctaacattcaggaaaaatactttcagaataaaattaaaaatatttaacatcgtaaattgcaattttcatacaatcatcaaatatacgtataaactaacatgaacacatccaaatctacacaaacatcgttttaaatccatatttcatgatagtaaatcattaccatggc

SEQ ID NO: 159181 - DNA, 809 bp, Cannabis sativa
tcaatcttattcagatttctgattatttttttctttagaaactctcatgtatgagttttttcgtcccctttttcatcttgtctgccactatttataattacatagtgcgcgttaaattacaaaagttgacaataatctttacatcaattattccctcaaatcatgggatttaattacaaattaggctaagtaaatgcggtttttatttataatccacacaactgtgagtatcccgcttttattgggccgagatgaatgcatatttaaggatatacggtaagccttatctcatggggatgcctcgctaggaatggagcggagttaactttggtggcgagttgtggctcgtcaaatgacttcctgaaattaatattgctttaattctgataactacattttctagtatcgagatgatctttctcccatacatgccctcttctagcgagatagacacctcgctgtctgtcatcttgattcaccaaactgtttacacttagtttgtatatcatgcaatatacgctaagtgtttttatcgttatcatttctcttccacacgacgaggttgaagcctcatcatgcacacttgcactcacatggtttctcgtcgatacatgagttagtagtctgtacatttctgtctcgcagaatactgttcagtcagtcgagttaaaaacatactctgcgaattgtgtttctaaggagttgttccatgccaagtgtacttacgattgggtgtttgagtccttcattcttcccagctcgacacgtgtctccctctgatgtgctcaccgaattttgggtataataat

SEQ ID NO: 159182 - DNA, 759 bp, Cannabis sativa
aataatttttatatttatttttagaaaattaataattttttaattaggaaaacaatattatatttttatatttttttatttaatttttaaaaatttaataatatttaatttttttagttcacattatatattataaatatataataataatttaattatggatgataatataattaatgatataatttaattattatataccaaatttaatatgttttaatttagctatatataaaaacctatataataaaaataaaacaaaatatatacagaactaaaaaatacttaaatcatttctcaaaaaaaaaatatacacttaattcaaaaaattataaacaaaggggcataaacatttaaaatcccttaaagaaaaaaaaatacaaaaattaataaaacaaaaatacactgtaaatggctctggaacgaaccatgcccaaccgaactactggttgcttctccctctatcaatccatggcggtgacaatgcagggttctcgattccgatccacgcatttgggtttggtgtagacaatgatgcctcatccatgcactcgattttagagatttccggtgggactttctcgttcatagagactgaggccgtgatccaggacgtttttgcacagggcataggcgggcttttgattgttgtggcacacgaactgcaggtagtagttgttggaaatattttactaggatctagatttactaccatgtatgtttcattaacatcctaatatgaattctaaaagggaaatt

SEQ ID NO: 159183 - DNA, 734 bp, Cannabis sativa
tttcaatggcatacggttgtgaggaaatggtcccggtggaaatgttatttccatcccacaggagaacgacttatgatccaacaacaaacaaggctctattaaaagaagcgttggataagaatgaggaactccgggatgagtctcaaatacgaatggtggcttatcaaaagaaggtgctaagtactttaactccaaggttaaaagtaaaaaattcgctattggtgatatggtcctaagaagagtcttcccagccactcaagagcccggagtgggggtacttgggccaaattaggaaggaccatatgaaatcgaggatgagatcgtcttcgggacctacaagctaaagagaatggacggaaccatggtgcctagggcctggaacgctaatcacctccgaaagtattaccaatagttagaaaatataaacttaggctttgttaagaaaatttgtacgaaaaagtatatgcaacctccaaatttatgaataaagctgagtgcctcaaaaacaatgttttcatgccattcagggggtagtaaggcataccacacggacaaatataaaacaggccaaaagtttagcaaagttaagcaagatatgtatttatgcaaaatatgtattttagtgtaaatacaaaggtgtcctgacccaataacaggtcctagaaaaaaacattaagggcctggggacgggccttaaaattgtctccccttaaagataataattaaaattgtct

SEQ ID NO: 159184 - DNA, 517 bp, Cannabis sativa
ttgtcatttaacaaaacacagggttcaattgataacttttgtaaaacagagggtctaaaattgtatttacccacttttaaatcatactttctcttaaaagaaaataaaaattaaatactttttatattcttttaaaaagtaactttgtattattagtcaattaatatatttattgttgatttagatgagaaatttacatattcattttttaggtttaactgaaaatctttgtaaatataaatatgaagaatgtttaagtaaacaaaaattcttagaactttttttagaaacgttatttggatattcaataataataaaaaagaattaatacaaaattatttttaaaaaagatgataaaaaaattggcataatatgatatggtcaaagtttaaacaaaaatatttggctaattagaatttttgccctgtgaattttgacatataccaaatcatgccccctgaatttttatggttgttaaaaatgtcttttgaactattgagattgttggatttaagga

SEQ ID NO: 159185 - DNA, 538 bp, Cannabis sativa
aatgagtttgaaatgagcatggttggtgaacttactttctttttgggtcttcaagtcagacagatggaaggaggtacatttgtatcacaaagtaagcatgtcaagaaccttgtcaaaaagtttggccttgagtcggctaaacaggtaagtacttcaatgagcaccactttaaatttaacaaaaaatgagcatggagtgaaggtagacactactctttatcgtagtatgattggtagtctattgtatttgactactagttgtcctgatatttgttatagtgtgggagttgtgctcgatatcaaagtaatcctatgtaatctcatgtatctgcagtaaaaaagattattcgatatgttaatagtactctcgactttggaatctggtattctaaagacactaattctaatttggcttgttttagtgatgttgatttggcaggaaatgttgatgatcgcaagagtacgagtggaggttgtttctttcttggaaacaatttggtttcttggcacagtaagaaacaaaattctatttccttgtc

SEQ ID NO: 159186 - DNA, 606 bp, Cannabis sativa
caatcttttacaatctgtgcacaaatgggctctcgagaccacacgttctcataacgaaaatgaggagcagtgatagtactatgatgggcattagattgtaaaaatatgggagtatcggaactagaaaaaccaatgttgatgagagtagctttagtaaaagtgtctatccaactaagagagacagttgctttatcgaggcgaatttctacacaatggtctgtgcctcgtccacgatcccaggtgaaagggtatccgcgaaagtcaagatcaataaggttgcaatcatcaagaaccgactgaaaaccgtcaataagagaagttgggtacggacgcccgcctctcttgtcagattgggttgaaatattattaaaatcaccgatgatacacaatgggagagacgactcgctgtgcaatgaatgaagaagagtccatgttcgatcctgttgtcttctgtttggttcactgtagaagccagttaggcgccatgtcgacatgccccttatacaaacttcaacatcaatatgatttgttgaaaaaccaactagattagcttcttctgaaattttccaaaacagagccaagccttctttcctttcggaagcatca

SEQ ID NO: 159187 - DNA, 500 bp, Cannabis sativa
  modified_base (450)..(474): a, c, t, g, unknown or other
aaagttatgaattttggaagttttaggttgaatcaaggtcgagatgggtgcatccgcacgcacagaccttcagataagaaggatccgcgcgcgcacgtgcacgtgctcggacagcccactatctgaactcggcgtgcaactttccttcagacatgtcccgcgcgcgtcccccctgcagctgaccgaggtttctcggtcagggaggctgcagatgccgagtttcctcggcgtcacccctttctacgcgcgcatccgagcctttttgcagcctctagaggctgcacgtgcaacctcctgggcagcacactcccaaacccgattttcatgggattttttcccaaattccgatttgttccaattttcaaaccccaaaattaaaataaaatattatttttaatatatttgaacgtacatatcattttttgaattaataatatttattttttaatnnnnnnnnnnnnnnnnnnnnnnnnngaggtttaaatttaaaaattgattat

SEQ ID NO: 159188 - DNA, 659 bp, Cannabis sativa
aactaatgaaggtaggggataggtacggtggtccgtggcttttattgggagacactaattttgtccttagtagctctgaatgagagggatcaaagggtagagaccaatttattcctataatctcaaatctggtgaatacccgggggcttatttctctaccgattcagggagacaagttgacctgggacaaccaccgttctgggtctaaccatgtcaagtcggctttagataaagggctcgctaatggtgattgggttaggctttttccgaaggctattctttgttccgtccagactaccaactcggatcaccgccctctgtgtttgtattctggtggtttgggggagaacgtcagaagaaattttaggtttgaggaagcctggaccagggatgagcgaagtaaacttgtggttgattttgcttggaagtctgtttcctttccatgggctccggccagaatctttaagaagattggggctactcgggttgctcttatgcattggaatagagcccagtttggtaatttagatgtccaaatccgtgatctcgaaaaaagacttgatagtattcagaagctgcctgtgggatctagagattgggaaatggaaaaggagcttcgattctctcttaatgaggcccgggctaggaaagaagtgtat

SEQ ID NO: 159189 - DNA, 671 bp, Cannabis sativa
taataggatagataggtaaaaaaacagaaatttgattaaacaagtttgttaattgtctcttcacttgagcataatttaattacaataaattaaattttaatcaaacttaatatgtcgtaagaaagtcaaacttaatattagattttaaccgtaattgaattacagtaaattcttaactcaaagtaaactgcccacattaaaaaaacatacggtttgaaatttttgcagtgctgtgtagtttgtagttttaaattttgatattgtagttcaaaccgcatgttgaaaaaatacaaattattaaatagtcttaaaaattttgggctaaaaaatttcactgctattaaaattaagagtggttaagatttttgccgcctagactttgacatgtaccaaattattcctctatacattttagaccattaaaaattttctttgaactattgagatggttgaatttaaaaatttttgtctaattttgttcgattttactattatggcgattgtccatatactaaattgcctccaaattttgatatttacaaaatcttaccccttggactttaacatgtactgaattgtgcttcttgaattttcattcaactttcattagtaaaattaaacaaaagtctttaaatctaacaatcttaatagtttgagaaaaaaatttaaca

SEQ ID NO: 159190 - DNA, 587 bp, Cannabis sativa
ttttctgcatctaacaatgaagttgaatatgaggctttaatcacaagattgaagcttgctctcgagatgagaatcgagtacctacaggctttcagcgattcccaaatagtagtatgccaagtgaatggattatatctggccagaggcgggagattggttaagtatttagccatagtatgcgaactgatgcaaaaattcaagaaaatagtcgtgtctcgagtaccgtgtgctcataattcacacgcagacgcatttgcccgcttggcctcgacgagagaacccgaattgctcgatgtaattccggtggatgtattggctcacccaatgataaatcaagaggcgatcatggaaatagataccgtccaagaagtcacctggatgactccaatagtcgcatatctaggaaggggtaccttacctgatgacaagatggaagcaagaaagctgcgacacagagctgcccgatatgttatatatgacggaagattatatcgcaaaagttttcgtcagccgttactcaagtgtatcgatggagaagattgcgattatatactacgtgaggtacatgggggtatttgtggcaatca

SEQ ID NO: 159191 - DNA, 638 bp, Cannabis sativa
  modified_base (191)..(206): a, c, t, g, unknown or other
gcaaggttgctcgctgatggaacttggtgggcactttccatctcttcgtcaggtcactcttgagatcttcgggttaatactattttttccggtgaaaaacttaaagattttggctaaagctctcaatgaaagcaccaaaatattgactggatttttagccaaccgacgcagagtcgtaataaatgagattnnnnnnnnnnnnnnnntaataaatgcagttaataacaccgaaatttgcaataaatataaataaaagacaccagaatttaaagaggttcggccccggatgtcggtaatagcctactccacttgagttttattgatctgagttgcaaaagtcaagaacaaggtcttaattgcaaagaatgagatgtgtttattttactaagtgtttctgcttgcggatccccctcccaagtcatgggtgaccccttatataggggagggggttggtgcttctcgcttcaggagacgcgaccaacgcagagctatctcaaccgtctccttaatttttggaggcagttgcagtctgatttttattataatatcccgctattttcgtgggttgacaactgtctttgagcctttcacgggatttgaacatttgaaggagccactgatgacaagggtcccttatg

SEQ ID NO: 159192 - DNA, 560 bp, Cannabis sativa
  modified_base (149)..(154): a, c, t, g, unknown or other
  modified_base (495)..(503): a, c, t, g, unknown or other
ataaggtcaaaagactattttgcccctagggccatataacatgcataaacactctcaagggcatatttatcactccatacacatttcattcaaataaaattcagattatcaccattatcaaattaaatgccaacatttaatcccaaatnnnnnntcgggcccgaaccccgttcggcctaaaatacctggttgtgactataccgcgccaactgtcttgcttcccattacaaaatacagttccaaaagtttactattcatttacaaaatatttgtcaccaagcgactaaacagcaaaagcccttatgtcccgaggatcgatcgctctaggcctaacagctctgacatgtaaaccttcacgtgctcgctctcacagctcctcagctttatccttgcccttacctacacatgaagatagcactgtgagttgacagactcagaaagaaaagcataacataaaaatatactaatatcccgaattataatcaggcgcccatnnnnnnnnncataaccctaactgaatcaggatcgatcttgaaaaagtatgactaaccgcgaatcca

SEQ ID NO: 159193 - DNA, 799 bp, Cannabis sativa
  modified_base (397)..(403): a, c, t, g, unknown or other
ttgatgtatgaacgttgcctttgtgagggtatgacttattattttaatttggtgttaatattcttcatttttccttttggtgatgttttatgttattcgcttgatatagatttaacattcatccatgtactatatcccctagtctaagtcttagtgagtgtcactgaaacttagactttggagaggcttgactgagtaggtcgagtttggcttgaccgtaacattgttgaataaatgttacatttagttacgattgaacgtaactctgaagacttgatttatgatttgaaaagtaagactaaacatagctcttgctatttgatctgtggttgagcatgactcttgtccttgagtttataaatgaatagatgggttgggcgtagcccttatcacttannnnnnnagtgaatatttgggttgagtgtagttcctatcacttactttataagtgaatagttgggttgagcatagctcatatcacttatttcataagtgagtagttgggttgagcgtaactcctatttcttaatttgtaagtgaatagttgggttgagcgtagctcatatcacttactttataagataatatttaggttgagtgtagctcctatcacttattttataagtgaattgttgggttgagcgtagctcatatcacttactttataagtgaacattttggttgagtgtagctcctatcacttattttataagtaaatagttgggttgaacgtggctcatataacttactttataagtaaatatttgggttgagcgtagctcctatcacttattttata

SEQ ID NO: 159194 - DNA, 515 bp, Cannabis sativa
aataagtatattttctttctattgtttctatatattgattatattctaatgagttagtggacgaattttctattgaagtataatcactactacgaaaataagtttttccgacgtttttaaacagttgtttaaagtattcccgtcgattttcataatcgtcgcctatacgatcgtcgtaaaatgggcagaataggcgacggttcaaaacctcgctaatgtgggtttcccgacgatttaaaaacgtcgcctataactaggtgtaggtgacggtttataaccgtgccctatactataggccacggttttaaaccgtcgcctatactgtaggtcacggtttaaaatcgtcgcctataccctcaggaatgtaaaaaaaagaaaaaaaaagtattttcgcccatctgcatttgcgcccatttttttttcttgcattacttttataattttacctaaattaaaataaaacaactaattaattttgttacaataacaactaacttaaaacacattaaatttat

SEQ ID NO: 159195 - DNA, 516 bp, Cannabis sativa
ttgtaaaacagaaggtccaaaatggtatttacccttttatgtaaaataaaaattattaaaatgagatatatttataaattttgagggtgcaaataaaattttcttttccccctagtaaattgtcattttaaggttacttaccatagtatagtgaggtggatgtatatggataatctgtatactattttatttgttgagttatttaaatcaaatttgttttacttttcaatttttaaataaattttttgaatattattattatggaatttttttaatattatgcctaaaaataattttatttacaaaaatacctttaagaaaattatttgcacaaataccattgtgccacgtcagcatacttaccgaattccaaaaaaatgaccgaaaatgaaaaatatcgttttcagaatttttttcgctttttgggagttttggaaaaagtaaccttttagttacttttgatgtgaataagatatcaattggttatttctctattaaagaatttattttagaatt

SEQ ID NO: 159196 - DNA, 583 bp, Cannabis sativa
tatttttttttaaaaaaaacaaatcactttcaaaattttttaaacagtttttttcttaattaatattttggactccgaccccaacttagaccttgggacccagaccccggctacggttccggactcagaccacggccccgaccccagacctaacttaaataaaattaaaaaataaaaataaaattgaaagttatagaacacacttctgttttttttttgtttttaaaattgaaaaacaaaagtagttatagaaaacatttttattttttaaaaaaaaaatttaaaaacacaaattttacttttatttactgtttttaaaattaaaaaacaaaagtgttactaaacgcccctttaatgtattttaattttagaataaggtgtgaacctatcattagcgccatttatagtagatggtataaaatttgtgttatatttagctaaaaaaattgtactccaatttaaaactaaaaaattaatagaaacgtataaaaaaaaggaataaaagtattaatttttaatttaaagtataaaaaaactctattaaatatattggaagaggtttcaatggttacatttttattgt

SEQ ID NO: 159197 - DNA, 582 bp, Cannabis sativa
tagatcgttcctcggttggaatttcaatttctcagcggtcttttacacttcaacttcttcatgacacaggtttcttgggagaaaaagttgcctccacccccatggaaccaaatatcaaattaagcaaagatgttggcactcctctttcggacccaactatttatagaagacttattggtaagctcatttatttatccattactcgtccaaacatctcctatgtagtcaacactttaagtcagtttttacatgagccacacacccctcatttacatgttgcacatatgattcttcaatatctcaaaagcacaccaggccaaggcctgattttttatgctaattctaatcctcatttatgttcttttattgaatctaactttaaaaatgcaaaaccacaacttaaaattttttagatgcagattggggctcttgtggtgttgacacccgtaggggtcgtccatcacagggtattgtgtcttccttggtcattccttggtgtcatgaaagtccaaaaaacagccaactgtttcgaaatcttccgcagaagctgagtatcgtgctatggctcaagctacttgcgaa

SEQ ID NO: 159198 - DNA, 585 bp, Cannabis sativa
tttgtgttaattttaatatttattttaattttattttcatattttttttaaacaatgtatagatttttttttttttttttgctaataaaattttacatatttttttgatcataatatttaaaataaaaattatttttatttgatagatatatgttttaagaatatgaattagaagaaaaaagttaaaaaaaatcttagcttcatcaaagatataaattttatataacataaaaaattaataaaatgaagtgtctgtctttaaaagtttttggagtgtaaataaaatttctcattttctaaataaatgtaacattttataacttagcttattttttttatttttttattatggctttttgtctaaatatttttttctcttaaataaataaaagttatttgagtaagttagttagaatggtattattgtaataaaagtataatattatgactaattattaagtaaaactaaacattaattaaaagatgacatttgtcatcaaattagatagagagtgcaaaagagagtgtgatagagggtgttcttagcactcctctttgggtaatactattgtaggacctagcaaa

SEQ ID NO: 159199 - DNA, 556 bp, Cannabis sativa
tatgtttgagatttgaaaatgtcactataaaattattactttccaatagagtaatgatttaagagagtagacaacatagtattaaaaaaaaaaagtttcatgtacttcgactataaaaaaaatcaaaactttattagcttttctctaaaaattgataatttcattaccattttggaatagtcttaataggtacattctcctctcttatgatatgaaaatcattgttatttaattttgtttttcctataaacttagttgtattattattctaaaaaaatgttagttttctattattgtattaaaactgaaattataatttatattatttgtttcttaaaagatttatatcatgctaaaaaatattttaaattttatatttagattaaatctctaaatacaaaataaagtatacacaaattttaattaatttttttgccttttcaattttggtgaccttgaactcaataaattttattttaatataatctaaaataacaaaaagaacataaataaaaaaaaaacataactaatctgaatttttttttaaaaaaattat

SEQ ID NO: 159200 - DNA, 664 bp, Cannabis sativa
  modified_base (599)..(601): a, c, t, g, unknown or other
actcgcagcagtggtatttacgctaaagatttggcagcattacctatatcgcgagaaatgtgagatatacactgatcataaaagtgtaaaatacttcttcacctagagagatctgaacatgagatagagatgctggctagagttggtgaaggattatgactgtgagatcctttatcacattggtaaggccaacctgcttgtcaatgcctttagtagaaaaggccagagtcagataaatacagtgaagcaaatctcccagcagttagcaaatgagatgacccgagtggaaattgagtttgttgtagggaagttggctaatattaccctacaatctactcctttagagcgaatcagagaagcacaattgcaagatccagagtttgtgaaatctcgagatagggtttcggctaagaagactggtgactttacagtggatgacacgagaacgctacgatttatgaatcgtgtttatgtgcctatggatgatgatataaaaagagagatcataaatgagtctcatacgactccttactcagttcatccacggtcaacgaagatttaccaagacgtcaaggccatgttctggtggccaggcatgnnnaatgacattgctgagtatgttgctaagtgtcttacttgtcaacaagtgaaagctgaacatcag

SEQ ID NO: 159201 - DNA, 538 bp, Cannabis sativa
acttttgttcacaatttaaacatttaataatatgtctgcttatttattcttggattgttcttatagctggttcaattcgttgtgaaagataatatgaggaagtggaatcactttctctatctttttcaactgggcctgaagtagtaggattgtcaaaggaatcattctcaatatcttcagctttctttttgcccttatctgtattactggagaaggacctccatgcaagtgacaatgcccgttcataagcacgcaattgagcgtccagcttgtctatgtcggacaagttccaattgttaacaataaattgatcaaattcaggtgataagttgtaaagaacaaaatgaactttttgctctctagataaaacaattcccagtatagttgctttctggaatttcatgttcatcgtgacaaagtgtaaagtgatactctgaccaggagtcatcttcacactttggagttcatttgtaaaggcatacactaaaagaggattggggtgtgggttgttcattttaacactacaaatatcaataaa

SEQ ID NO: 159202 - DNA, 546 bp, Cannabis sativa
ctgattactaataaatgtatgttggctaaaatactgatcgatgctgtcacatcgatagtattgtcttatgaacgttctagactcagtaccctgtgggacaacgggattagggttaagataaggtttatgggcgccaggttataactcgggttatttgtatgatatgtgttatgcttttcttactgagtttgtcaactcaccgtgttgtttccatgtgtaggtaagggcaaagctaaagttgaggaatcgtgaggacgagcaaatgaaggttgtacattttggggcgattaggcctggagcgtacgatccttgggacatcaggacttttgttgtttagtccctgggcgacaaatattttgtaaatgaatagcaaacttttgtaactgtattttgtaaacgggatcccagaatcttataagtataatatattattttttaactaaaaagaaaaattttaatcattcacatttttccaataacctcgttgattagcaacgagctgcacaatacgttaaaaattaagctaacatgcctatgctagttagg

SEQ ID NO: 159203 - DNA, 542 bp, Cannabis sativa
  modified_base (30)..(35): a, c, t, g, unknown or other
  modified_base (216)..(220): a, c, t, g, unknown or other
ttaatgacttttgtctaattttagtaaaannnnnntaacatgaatgaaagttcaggggacattatttagtacatatcaaagtttgagggacacgattggtagatagcaaagtctgaggagcatggtttagtcataaacaatcattgaaatagtaaaattgaatgaaattcgacaaaagtccttaaatttaacaatctcaatagttcagggggaatnnnnnacggccaaaaaagttcaggggcatgatttggtaaatgtcaaaattcgaggggaaaaattgctaattagcctacaaaaaaattataaaaagaaatattgatggctaaaccaactcaactttaaattttttaacatttaatcacaaaaattaattttttgggcaaaactacctaaactctcattctattttgctctgtaccccttcgttcaaaaatcacagttaagcacagtggactgcccgcgtaaacacacttgtacatgtggaaaatttttagtggcccacgtaatattaattttaaaaaatcattataaatatttaaaaa

SEQ ID NO: 159204 - DNA, 572 bp, Cannabis sativa
  modified_base (201)..(204): a, c, t, g, unknown or other
ctaaacaacatcaaaacaaactttggagtgcatggagacgatctgacaataaactttgtaaaggcagcaaagacgtacaagctgacctcatttgagcgctacatggcagaaatagataaaattgacaaacgaataagacaatacttggagaaaattggacatgaggtttggaccaggagccactgccctacaagaaggtannnnatgatgacttcaaacatagtagaatcaataaattcggcgatcctagctgcaagatcattactattaaaacaatgattgagtgctttagaagccttgtccaaaaatgggtgtggaaaaatggtaatgaagcacatggaatatttaccaaagtagcatcagatgctgaaaaactactaagagacaatttgcttaaggcaatgaaataccaggtacaaaaactaaaacatagagaagaacaatgattaaaaacctgtttcttgatcatgtttttttttttttttggaaaaagggaaagctttattcaaaagacaaacaaaacaaatacaaggcaagagccaacaagaccagcggctgctgctgcagaaacc

SEQ ID NO: 159205 - DNA, 605 bp, Cannabis sativa
cctctccaagttcatagccctataaatagtgatgcatattcactagacaaagggtcgaaggattttacttgagagatattgtctaagaattcatatttacatcgctcttcattctaaatttcaccacaagtacgatggtggtgcagactcgtaggggcctggttgattcggcaaatccacaggcggtggatcctacattgcagaacccaggaaacacaagggttccaccagctgctaatcccgagcagccgtcaaacgcgggtcatggtgtggcaactcctgttgatgaaatcgcagctagtctgcaaaagactgggaatagcagttcaacaccaagccaggccatttataacacgcccggttcgcctgctaccaacgctcgaacgaccattggagatgatactgagatccaaaacctccgtgctgctcttggactcatgcaaggtcataccaacaccttacatcatgattatgaggaactcttcgttgcggtaaatcttgcgttcgaggagcagagacgcatgtttgccaaatggagggacaaagagatggaagcgttaagggctcatcatgcagagattgacaatcgtagtcggcaagctact

SEQ ID NO: 159206 - DNA, 884 bp, Cannabis sativa
tactgtgtattgtgttaaattttcattgttccacggttatttattagttgttccattgttgacttataattgttctgttttgttgttttgcggttttttttataaaaatacagtattattgtaaaaaatttcgtatgacagtaaaattgtaaacttttatccaaaatttaatatttttgtaaaaactgcataatgtgtagcattcaaaatacttttgtgttcatttttgattgctgtcttttaaaatctattatgtttatttttttttttcttcaattattctactaattttacccttatcattttacgataatttccattcttctctaaccaaattttttcacaaacatacacgtcaatctccaaatagcacaatctattatgtgagggtgtgagaataatttgggtacaatttaaattaaattttatttagagataaatttaattaatgtataaaataaatgtatttttcaacttcttccaataaaaatagtagaaacctaaccctaaaattgagtatataatacaatgattacccaccctaaaattgagtatgcaggtaggaatgtgtactaaaatagttaatggggatggagatagaacaacactgtattttcgtaaaaaaataattaaatccttaaaaatgtgaaaaataaaaactctgaattcatgaaaatgtaaactttgtgttattttggtattcaatattcgaaataatctctttgattgtcttcatttatttatgggatagttacataatatataattctttgtaaatttttaatgattttttttataattttacagtattttataaaaataataccaaaataacaagaaaattacataaaaataatatcaaaataaaataaaaaataacatac

SEQ ID NO: 159207 - DNA, 528 bp, Cannabis sativa
agtttggtaaaccattgtctagaggcttgtttcaagccataaagacttttgtttaacttacaaatagcattttggggaatttgtcccttgggtttatacccttttgggagtgtcatatagacagtttcatttaaatcaccatgaagaaaggcattgtttatatcaagttggtacagagaccaattgttaatggccgcaatggcgagcataagttttaaggtattaaactttgcaacaggggcaaaagtgtgaagataatcaataccttgtttttggttgaagcctttggcaactaatcgagctttacatcgatcaacggagccatcaacattgtatttgatttggtatacccatttgcagccaatggcatggtgaccatcaggaagagtgacaacaatccaagtgtcattggcttcaagagcatcagtttcggtatccatggcttttgccatatgggatcctttgctgccattttgtagctggtaggttctacaaaggtatggacagcgagagctgctgctcgaaagt

SEQ ID NO: 159208 - DNA, 711 bp, Cannabis sativa
tagtcggatatgcgtgacaaattcccaggttgtgattggttaggttcctcgaaacggtgggtgtctccgagtcacttcagggtcatgctcaaaaacgcatacccgtcgggtcactgggaaacccccaaccgttttttgagatatccttctattcgcacacctgcgatttcgtgccttggtgggctgattggttttcgcaagaatccgaatcagccttctaagaagattttaaattttatatgcgggtgaggtcaattattttgttttttcacattcaccacgctgaaaagagcttctatgtttcagatgagcgatctgtcggacagccaaatgcttggctcaggaggcgatgcattcgatgtcgatcaggaccatcaggaggatagcttcatcccgacttcgatctcaaaagaggagatccctactgccggagacacagagctgggtctgttttcttctgcagacatcgagaggatggtataggaacttgctgaaccagggactatcgagattcgagacagcgagtctacggtgtcaggtcgtgaacacctcgttcattccaggcatgctcctgatgtcgaggtcgaggagatggacaaagactggatggccccaaatcgcgagtcagatgaggaagaggatgcagagggaagtgggaccgattcagtggataacactcaattggatgagcctttctcatgcgaggacttg

SEQ ID NO: 159209 - DNA, 515 bp, Cannabis sativa
  modified_base (95)..(106): a, c, t, g, unknown or other
tttaacgaatatatattctttcttttattatttgtgtaaataaagcatattctgttaaaccaagaattgccgttacataggcacttttaatatannnnnnnnnnnntatatatttttttttttttaattgagtgtgatgtgtaatttttcaaaaaaatatatttaagtatagttacaattattcttttttatttttcattaataattaaaagggctctttacaaaaaatataagaaaatgaagatgtgttttgatatacatggcataaaattttaattaccctaaatatgacatttttttaaaaaaaaacttacaaatatgaaaaaaaaagtcataaggaatgccataaaaaactttaaatttgtatttctttttatttttctttttttttttaagataaaacactaaaataaataaaaaaaaatgatctgtaaatatttttttttacagaaattaaacttattttttatttaaactaccgtttattttttttctttatttttttgttaaaaact

SEQ ID NO: 159210 - DNA, 538 bp, Cannabis sativa
ttagaggtattttaataggccaactgaattattgcggttttaataagttataaaccattcaaatttttttattgtacaacccaactctacttagtacaataatatagggggtgggttgggttgggttcattgggttgagatgaatattttaaactttaatatttatgttacaaacagaataaaattatttaacctagtgcatacacaaaaaaaaatgatacatatatgcatgtgtgtgtgtaatatagtgcttttaaaataactaaggtagtagtggtatcattgtgtgagtaacaaagttaatattagtgattgattctcacattaagcttgttggtagaagtagtaggataactatagactacatgttagtgatgtgttttagttaattcactttctaaggttatcacaatataatttatttatatataaaaatgttaactatatatgtaacgccctaaatatttaggcacgctacccaaaatacttataaagccctaatcccctaaccgggattactaattaaaatagcgcagaa

SEQ ID NO: 159211 - DNA, 656 bp, Cannabis sativa
ggggaaatggccttagccggccagccatactctaggctactgctcatggccggctatccctacactaggtagggcctagcctcctattcttctgtgattggatggtgtagcatgtgtgttgacagggggtagattacacaaattagtggagttagatggatctatgtatttgaagtgattggagtcacttctcaagttgttgctgtcttcggtgtttccaattgttcccgaacataactgattaatgattggcctttggattacacgctcccggattgtaacttcctaaaacttagatacgctatagtgattttctaattgatgtcccacctttgctagtcaaagggttttccttgaaaatcatgccaaattaattttaattaaattactaaattttatatcgttttatatatttatttacaaaaggtcaggatcccatatttaaactttacaaacattctcaaaatatattaaaatttggtcacacagcgactacaaaaatacaaccccagatgtcccgagaccgaacactcgcccagagctcactcctgtttagcttttgccttcgctttacctacacatggaagtagcaactgtgagtcaacagacttagtaagaaaaatatataacaaataatataatatcaacttgtatct

SEQ ID NO: 159212 - DNA, 555 bp, Cannabis sativa
  modified_base (503)..(504): a, c, t, g, unknown or other
tgtacccatccatagaatgattgcccgtacaaagaaaacaacgcgtctggctgacgcatctgatccccaagtagctcgacacaccactttccccagcgccgaacaggatccagctgtccaggtggagggggatcatgaaggggacgctgaggtccaggagattgaggagcaggacgatgtacgtcctggtagttcctccgacgcggaggaagagacagaggttgaacccccaaactacggggagtacaacgaggctggggagccagtcgatgctgacggagacctcctggttgagggcgtggactacgtcagtgaggaacttgctgctgcaattcctcatagaaggcagggtaccttgggcgccaggttggtaagccctgcgtccacggttaccgaggcgtgtcattgaactctcgaccagggcggatacgtgggcgagctggactgctacattcccacgcacgacaatcgtgccacgaaccctgataaggggatgtgtgccnngtcgggggctcacggccagcaaggggcgctgatgcccttgcataagtactt

SEQ ID NO: 159213 - DNA, 536 bp, Cannabis sativa
gagagagagagagaaagagagaggcggtagctgaaatgagaagattagggttttctaacccttttatttctttgttttttataaatagaaaaagattcttttaattaataataataatactcttactatagttaatttatttttctttttattttttattgatttaatttattattttattaatatttattataagggtaggttttttttttttccttttttataataaaaaaattctgacagctttcttgatataattaaaaaattatttttataatgcttgatataatgcttgaaattatgagagttgctctttagtgacccctcatatttttagtgacgcgaattatatgacactaacactgaattttcagagtcattttgtgcatgtcactaaaactcacccctagccttttagtgacccgcacttttgtgagggtcactaaagagtgtcactaaaaccccattttgtagtagtgccctaaccgagcttacaaagaagaatcagcgatttatttggtcagacaagtgcgaag

SEQ ID NO: 159214 - DNA, 511 bp, Cannabis sativa
atataacaaatacatgtgaataactcaatcaagattggatatataaaaacatagtacttggctaaattataaagtaagtaataacagatcaatcaataacatttcataaaaaagaattaattaattaatcatagtaaacaaaaaaaaaataatcaaataactagtaacaatatgctagtactgaaactcaaatgaaatcgaaaaataattgattttttttttcttatgtttttatttacatagtacatatgctataggaatattgtagtgcactttattgtatcaaaatcaaaagctacaaactataatagaacttttatttttctaaccaaactctaaattcaacaagtactacaaatagtcttgtttaattaatgcagatcaaaataccaaagaattattacactatcattacaaaaaattattattattagtgacaattttttagtcataacataattttttgtgaataaacgtgacttttagtcacaacaaaatgttacttatgact

SEQ ID NO: 159215 - DNA, 652 bp, Cannabis sativa
agaaagcctaataaaaaaagtgatatggtatctttagtactgttgataatttctatatttcgcaaaataacatcatctaaatttgaattttttctacatttttttatggcatgtaaatttttttttttaaagtaaatatacaacttttatcaaatcaactaaaagatataattgtatttcaataagaacatcattctatttggaaaagcacaagatgctctgtgaaacttacggcaatcatctataataacctcaaaagaagaaatcataggtgatgaattttgaagagtttagactgctaccaagcaatttgactctagctccaattttcgctatagttgagtttggagcgcctatgccaccaaaactgctcgagttagccatcattaattctccttgagagtctcgagggactatgccataaccaaacgcagctcgatcactaaaaatggtaacatcaacagttaccttaattgtattctcatgcggcttaacccgaaattcagctccatcacgagcttcaaaaactgaaaaagaagcctttgaacctctactttggtcgacttctattgcacaagacaactcatatatgagataagaataccatccaccgtagcatacttttggctctaaaccaactcgtttcgagcct

SEQ ID NO: 159216 - DNA, 537 bp, Cannabis sativa
acttgaggctaaggttaagagccagaaatctgaggtgaagaagctcgaggagaaggtgaatgccttagagatagctggtctcgagattttttattacttttggaaggcaaattccaaggcaaactttgaatctctcgacacttccaaagacatgtttcttgactactacactactcaagcggcctacgggaatcttgaggcaaccacttccacctctcctaccgaccagagtgttcaggctcctttcgcccagactgatgatcctctggctcctttagacctagttgagtcgtacaaagagcctgggactcatgttgtttgattgccttatttttactatctttcttttttttttatgtctatttggcctgtaggccctcttttgagacatggtgacccgctaagcggtctttaaacttggaatattacttttcatttttttaacaactggctgactagacatcctttaatcctgggtttgaatgctttgttattcttaatgaatttcatcctttgtttataatcattgtgcaattg

SEQ ID NO: 159217 - DNA, 604 bp, Cannabis sativa
  modified_base (177)..(177): a, c, t, g, unknown or other
cactctgagtttcgggagataaacatgaggaaggacatgcttgaaacgaccaacaagaactttggtgactagcttggagacgacgttgcaaaggctaataggtcgataatcttgaaccctttgtggatttttaattttaggaataagggtgattatcgtcttgtttagtctagtcgnatcaacgccatcattcaatacactcaaaacagcatcagtaaccgattcacccacaatggaccaattttgttgataaaacattgaggacataccatcaataccagggcttttgtcaggggccatagaatgtagagcatgctcaatttcagaaggtagaaaaggtttggtgagctcatcattcatgtcttgtgtgaccatatgtggaatagcatccaaagtttgggaaagagaagcttcatcaatagtatcagcaccaaaaatggaggcaaaataattatgaattgttgctgccatatcaactttggagtgcacccgaaccccagcctcattaataagtgatttgatcttgttgttggacttccttgctgaagctttagcatggaaaaacttagtattgcggtctcccgaacttagccaatccaccctt

SEQ ID NO: 159218 - DNA, 519 bp, Cannabis sativa
atacaagggttcataaccacccaaatctcaaagagtttagttcatagctgaaattaaaaactcaaaaccagaaaatgacatgttcatggagtttaagagagaactagagagtagaaattgatacaaaatgaagaggagagcaagagaaatgagtttttagctcaaatcctttctttggaggttgccttcttctccttcttctcaatcttcttcttctcttctttgtactctcttcttttttcctttcttttctctgtacttttctattttgtgctgtgatttttcgtactcctctcttcaaagtgcagccacatttctattctatgtccttcctttctttttttcccccaattagggtactaaagtttaccataattggaaatccaagtcatggtccacttgtccttcattttccacatgtttgttgagtcattagccaaatttcgccagctcagctcctttccttcttcattaaagcttgctggactttcagccaaaatatacttactgggctggcaa

SEQ ID NO: 159219 - DNA, 599 bp, Cannabis sativa
tcctcgcgagttcctcactcattctgcttatttagcgaattccatctaaagagagttgagagagcgaggaagcccgaactctaataccgaaactatcgtagggattgaagcttaaagatcaatggctggaggtatatcgatctttcattgcatatattatcgatatgtttatagtttttccgcattacatattgtttatatatatgctatattttatatactatattatagtttaacagttggtatcagagcggttttaatctctgccttgattttggttaaatttcatatatatatatatactcgtagatacagtgttcatatatatatttattttcgttcgtgtatatatatattcatattcaaacaattccaattatatatatatttttatacgtatatatatacatttattcatacgttgatatatatattatatactttatacgatacggtataatatatttttgttcgatatatatttatgtatatgtatatatgtttttatatatattgtacattatatatatgttttatcgcataataatattcataatacccattttcattattttatgtgatatatacatgcatatata

SEQ ID NO: 159220 - DNA, 582 bp, Cannabis sativa
gacgcacccgattgccccgttctactacgcttggaacccattacacacttcaaaattaccacacaaaaattttgggaaaaattcggcagcacttccccttaatttcttcacttttcaaaaatcaaaataataccacaataatcccacaacaataatatttcacaaatattcaacaatttctccaaaataatccacaaatttccaaatgctctagaaaattattcaaattttcgaaaaactcgcttaactactcaaaattttgacaagaaagagacttaataagcaagaatttcttccatccaccaccattgttgcacatccatggagaattcaaggttgaagatgatgaatagtagcaaattcggatttgggtgaaaaagggtaatttgtggtgtgatttttgaagaaaagagaagatttatgagagaaatttgtgtttttggtgtttttaatggaagatttgaagagaatgagaagagatttgatggttaatggtggaatgagattgtgagggctgagaaaagagagagggtcgggttgtatgagtttaggttgatttttagggttgtttgtgatttgggg

SEQ ID NO: 159221 - DNA, 652 bp, Cannabis sativa
tccaaaagatgaatgggtctttttgtttgccttttaaattatctttgtttttataattttttatttgttactttaattgggtgattaaaattatgttttagttatagcttaaaatatattggaatatgcttatatataatgtatttgttaaaatgcttgttagaactaatttaaaattaacataccttttaacatatatacatatatatcatgctaattttttaaaaatattttagagttgccatgaaaaaaaaaatgattatatatgcttgttactagatccatgtgttttggggttgatttctaattgagtaatttttgtaatacaattagttaatatttagatgatttgtagttgtttaattttttttttttcttttttaattttatggagattgtatcaatgttgtttttaagttgcttttgtcttgggtacgtaatgtattcatgtttggttgatttgtacattaattagaattgtattttaattatttatttgttcctatttaattgtacaattggtaaaatattaaataaaattatcctaaatgagtatatgtgtaattttatttttggtacatatatttttaagttgatgtacaagtgatttatagttgtttttaagtttattttatttttcaacaaaagaaaa

SEQ ID NO: 159222 - DNA, 743 bp, Cannabis sativa
  modified_base (472)..(484): a, c, t, g, unknown or other
cgcgtccatgaaggacaatagcttcaatctggaggtggcgtccaccatctggtcgatcctcggcaaggggaaacaatctttcgggcatgctttgtttaggttggtaaagtctatacaaacccatcatgtcccgttgggctttggcaccagtactagattggctagccattctggggaatacacatcccgaatcatgccactggtttgcagtttgtccacctctttttctaaggcttcagccttcactgagtcgagggggtgtcgtttttgttgaactggtggcatgtccgggttgacattaaggacgtgggttataacggggggcttatgccggtcatgtcttcttgacaccacgcgaaaacatccgtggcgcccctcagtgtctttattattttttctttttcctccggttctaggctctttcctagccggaggacttggagtcgaggtcgcacactgacacttcctcgannnnnnnnnnnnnttctacaattttttcgaatcccacacggggatccaactcatcttcttccgccatttctggctcaataatttgacggaccattaggacgggtaggtgggcagcaacgttgtaacactgcctggcctccccttggttccctcttacagttcctatcccggcctcttaagtggggaatttcaggcacaagtgccttattgacgtgactgcaccaaaatccaccagggccggtcggccgaggattgcattataagctgttggg

SEQ ID NO: 159223 - DNA, 982 bp, Cannabis sativa
ttctggctgccacgtgtcataatcccaatttatgagggatatgagtatttaagccctctgatacgaaataactttctcattttccctctcattcttaactttctcttccctttttctctctgagttttttttttttttttagagatccatccttcacccagattcacacttttcttcccaactttgtaaaacttcaggagagatcaaaaccatttgcagggaccaatcagaaaagctaaaggtcagtttctaatccactcgtgctacttggtttttttgaaaagatgaaaactatttttttgggttttctgacattttgataggttcggatatgtatgtttgtagggaatacacatagggctatatttttctgtgtagaactgggtaatcttagaaaaatagacctgaaatttgtataaccgtgggctttaggaaggtaagtttgaatattcgcacatttcttacatgtttatttcttgaatacacgcgggtattcggatgaacacttcgaatactcgtatacctacctactttaggttttacagagactttatcattcctagtctttgtttagaacataggattttatattctttgcatattctgttgggggaacattggttaagtctttcaaatggttggtgtgtcgcattattccaatgctcatacgtgtgatcgtatgttccttgaggtactgcgatacacccagccatttgcgacatacgccagtgtttcctgttccaatataagtgtattcttcgactagtagatttgctcgaaacggtgggtgtttcctagtaacttcagggtcatactcgaaaacgtatgccccttgggtcactgggatacacccagccattttttgaggtacatcgctagtcggatatgccttccaaactcgcaggttgtggttggttagattcctcgaaacggtgggggtttcccaggtacttcacggtcatgttcgaaaacgcatgcccct

SEQ ID NO: 159224 - DNA, 621 bp, Cannabis sativa
  modified_base (554)..(562): a, c, t, g, unknown or other
ataattaataacgtatctatatcgtggaacatatagagcgttcaatgtaactgagagtgcaattaaaagatggcttggctgtaaagaaatagtgtttggggtttatttgttaattaagaggctttaaggagtctaattaataaatattataaatgacaattttatttgatagttatttcaattattaaataaatacttttggccaaaagtggtatttgagaaaaatagataaaatagttgagaaaaatgacaaagcccaaactaatgtaagacccactatgtggccgaccattaggggtcaattttactctaattttatcatttttttttattcctaacaattcaaccctaaccatattgaagatagtataaaaggaaggctatgtctcattatccaactaatgcctccaaagctaaaaacctagctttatgatgagacctcttccttgttcttcctcttcaatttcgaaacactatagtcttcttcacaaaccaaaagttcaagcctcagtgattgagtaagcgcccgcacacatcaagttggtcctcaatcnnnnnnnnnaagactgtgaagaatccaaattcaagaaaaggagtttcgggctcagagtttggtgatac

SEQ ID NO: 159225 - DNA, 545 bp, Cannabis sativa
gagaataatttttctttccaagcattgagcaacttccatattcgctcctttatgttgctgaacatttcttttttgtccctgcccgagtaagcaggtaaccccaaatatcgttcatggcaatcactaataggcatgttcaatgtttgattgaaaaacatttgaatagcttggtcagtgttgggcgagaaagacatgactgatttttgtgtgttgagcagttgaccagaagctctgtgataagtccgaagcactttgttaatagctaaagccgaattcttggtagcatgacaaaacaaaaggctatcatcagcaaacaagaggtgggagatagatggtgcatttctagtcaggcgcagtcccgcaaggttaccaatgtcttcttcatgattcaacaaacgaaacaatccttcggaacaaatcaagaataaatatggtgacaatggatcaccttgccttaagcctctccccggtttgacattaccaacaatttctatattcaaagaaaaggaaaaacatgctgatgaaagacatttcatgataagtga

SEQ ID NO: 159226 - DNA, 922 bp, Cannabis sativa
ggttgagaagatgaagagaaaacacaatggtgtattttcggatttggggtgaaattgatgatgttttggtgtgatttttggtggaaagtgaagattgatgagtgaaattaagttttgggatgaattgggattgagaaatttttgtggagatgaaaagaattgaagaatgggtaatttggcggtggttttcggctgagaaaatttggtttaggtttaggtttaatggggtgaaaattggggtttttttttatagtaattcgtcagttggtcgcgactagcccattggtggtcgcgactagcttgaaattcaaatttttgtggttttttgtaaaatcccctggtcgcgactaggaaaagggtcgcgacttgggtttggtctggtcgcgactattggagctgaggaattcctgtggtttttgtaattgcccaggtcgcgaccctggtcgcgaccacgaaaaagagtcacgactcaagaacatggtggtcgcgaccactgggttccgagtcccgaattttttttttttattttttcgcgtttttcatgattcaactggaaaaatataatgtctggtactttaccaaaaatttaaaatactaaaaacactaaaacataaactaaaaacaatagcaaaaagtctgaaaaattaaagaaaaacacttgggttgcctcccaagagcgctgtctttatcgtcatctagccggacgctgagttgttctttttagagaggcgccagaataatggtggacttggcctggtcaattttacctcccaagtagagctttaaacgctgtccattaaccttaatggtttctagaccttctcctttcagttctacagctccatagggaaacgccttgaccactgtaaacggacccgaccatcttgactttaacttgccaggaaacaatttcaaccttgaa

SEQ ID NO: 159227 - DNA, 810 bp, Cannabis sativa
acttaaatatattttctaattaattaaatttcttaaaaatagatataaataattaagtgtcctgattaaaatcaactcatttattaattctaatttaagttctaagaaaaatatcataatttaagttggtccaaaattaattaaaattaattttcaacttcaatatatttttctacttaattaaatattagaaaacataaattagttactagaaatcactatctagaatcttttctttaaactaagtgtgttttattttaaaataatcgaatgaaaaattaatttcattatttcaaaattaattatgttgctaattgaataattgttattcattgaataagtccaatactaattgggcctaaataaactatcatgggtgatattttattttagcaacctagtccatttatctatctagaaataaatgaattttctatattcatctaagcccaaaagcaaacaaagaggctcacacatgtcaaattaatttggatgggctctatcatgtttctagatttacacagatgaaacaaatacaaaatttgcctgttgcaaattatttgtaagatctatcgacaattggacaatgattaaaattagattattggatctgtcaatatgttaatcatagcaatttaaatcaaataaataataattttgtttaattatttttaaataaacaatttaaagaaaataagtattatccatataacaatatgtgaaataagatatttaataaataaataattaaattattgtttaactaaccaactaaattttaaaaatttagggttgttaaaataatcttaa

SEQ ID NO: 159228 - DNA, 778 bp, Cannabis sativa
gtgatacgctaaatcacttcccgaagacttaaactagaaactaaaagtttccctatcgataaaaagcatggcaataacccccaaacaaaacaaaaatgggaagaactagggttcccaatttttccccaaccggtagaccggttccacaaccggaattccggttctggaaattcctgtatgccccaaccggtcgaccggttgctgaaggcttccctgaaccggaattctagttcagtacaggaattttcaaaaatttcaattctcattcaattcaaacccaaactctttcaaaccttccagacctgttctaaataccccaaataacaaatccaaagcattaaaacaaagcttcacgcactaaaacaaaaatcaccatgtgagctccaagatttgagttcaaaactcaagcttggttaaatctagtaaacatgcatcacaacctcctcaaatctccttaaataagcataactaagcctcagaaaacaacagcaaacaactaccaacaacacagcaacagattgcatcatttcaccattaaaatcaagatttatctcaaaacttcaaacttgcttaaaataaactcaacatgcatcaaaacctattctatttcactccattaaacataattaaacttctaaagataaaccataattacagcagcaacaagaaccaaaactaagcatgcgaactatcatttttgtcataaaactcaagaaaataccaagaacaagttaccaaaatcttaccaaggattagagatcactaaatcttgagaaaa

SEQ ID NO: 159229 - DNA, 531 bp, Cannabis sativa
tttttttttttttgtttttgaaaagatgtttttagaaataagaataaaaaataattttttaagttttcaaaacacaagtcacgtagggttagtattttttaaaaataatattgaccaaaattgaattgttttttaaaacagaaaataatattttgatgttttcaaaattcttattttttttataactttattttctgaaaactgctttcaaaaaataagactcaacaaccttaattgttttcaaaaaataattttctgtttttattaacaaaaataattttttaattatgatacaaaacacgcattaaataaatcaacgttaagcaaaatgataaaaataaaatatatgttttgtgtttattaaaatttgagtatggtgactactaaaatggttattaggcttatttcaatagtaaatattaagagtgcgtttgaaagtaaatgtgtaattactaagtatggtaattactagggtggtaattacacagtgtagtaattacattatattttaaaatgcaaggtgtgtttgga

SEQ ID NO: 159230 - DNA, 604 bp, Cannabis sativa
accaggtttgccttgtcacttatattgctgctcgccaatcgagctaacgcagatcatgtattttgctcagatatgctatcactttttctctccgaacctcctattcgccggatacatgatttaccaccagctgtgaatcactgcaaatctcaatgtgttcagccttcatttccttcgctagcttaagtccagcaattagggcctcgtactcggcttcgttgttagaggctttgaatccgaatttgaccgcaacgtgcaggtgttgccccccagcctttctcgatttgacgagcatatcatccacgtacacttccatatttctgccgatctggtctttaaacatcttgttcaccaatctttggtatgtagctccggtgtttttaagaccaaatggcattactttgtagcagtagagacccatatctgtccggaaacttgtatgttcttggtctggcgaatacatttggattttattgtagcccgaataagcatccatgaagcttaatatttcgtgcccggcagttgcatcgactagttgattgattcttggaagtgggaaacagtatttagggcatgctttgttgaggtctgtgaaatcaataca

SEQ ID NO: 159231 - DNA, 532 bp, Cannabis sativa
agcccattaatgctattgatgtgtattggaaccataaaaccgtcaaaatcaaagacatgcattttttcaaaagcgattatgacaaatatacactctgtaataattaaaaagtactttttcttaaaaagaactttttaaggggcaattgttatactcaaaattcggctagcacttcagaggaggacacatgggaaactgggagaatacaaatcaacaaatataatgattattatatttgaaaatggaataactcattaaatgtggaactgacagagtatatttacaacttgctgactgtaaggtcttaagcgaaatgaagatatacgaactgttgccctgtgcattaacgagaaaccatacaacatcagtagttcaaggcgaggcatcaaccttgctacgcatgaagagaaatagacgagacatgatggttgttaagacacttaccgtataatacacattgtaaaaactgcttaactttaatttgaaaattagcaaataaatagggtttaattatgaaacttgcatattagtt

SEQ ID NO: 159232 - DNA, 545 bp, Cannabis sativa
gatcgggaaagactgagctatgctagagttctaatcgaagtgcaaatggatcaacatctcccaaccatgatagaattcgaaaatgagcatggttgtgctacttcagtgagtgttaagtatgagtggaggccgatcacatgttctcactgttctgggattggtcattctgctggggaatgtaaaaaatctgctactcctctcaagcaacaatgggtggtcaagaatgataaccgaaaacagaaacttcctgaggttgattctgatggttttaccaaaattattacaggcccgagagtcgatagaagcaaggaacagaggttgcctaatgcagtaaggacggggaacacttttcaggcacttatattagaagaacaagatgggaataatgagggaaggcagggtgaatatggttttgacaaggttagcaatggtgaaaggaattttgatgacacaagaggggggggaggaccctctctttccaatggatagattgttatgttggaatgtccgaggggccaatcatcaatctaaacaacagttaatca

SEQ ID NO: 159233 - DNA, 623 bp, Cannabis sativa
  modified_base (388)..(397): a, c, t, g, unknown or other
attagaaatatctaaatttcaagattattatattatcttattagatattaaagtaatttaaattatttaaataaactaaaatttttgaaagttagttagaaatttgaatttcaattagaatttaggatatttaatagatttgtaagattttaaatattttcaaacaacctaaattttaaattctagttaagatatattttaaaattttattttaaactagaatatcttaacctactttccagttatctgttacatgtttgttatgtttgtttatttatttatttaatttattttacaaacctattatttatatgatctaaattgctatgattaacttgttaacagatccaatgatttgatttaaatcatagtccaattttcaatagannnnnnnnnnaatttgtaacagataaattttgtatttctttcatttgtgtaaacttaaaaacatgatagggctcatccaaatcaattggacctgtgtgagcctatatgtctacttttgggctaagaaacattatatttaaggttaaattcttctcctttgggccttgtgtgagagttaggggcccattagtaatgggtacgacatagtgaatccagccctcccgcacatgaacaac

SEQ ID NO: 159234 - DNA, 503 bp, Cannabis sativa
gtgatgctaggcttttcaagaaactggatcgggaccaggttcgccttgtcacttatattgctgcttgccaaacgggctagcgcatctgcagttgtattttcctctctttgaatctgcttgaggctacaactttggaattgtgcgagcagatcatgtatttttctcatatatgctatcattttttctccccgagcctcatattcgccagatacatgattaaccactagctgtgagtcactgcagatctcgatgtgctcggctttcatttcctttgctagtttgagtccggcgattagggcttcgtattcggcctcattgttggaggctttgaatccgaatttcaccgatgcgtgcaggtgttgccccccaggtgtgacaagggtaattcctgcgacgaatagcaaatctgtggccgatccatccacatgaagcttccaggtcagcttgttttcagtgctgttcggctgtggtgttggcttgggatcgccttctgggatgctttc

SEQ ID NO: 159235 - DNA, 620 bp, Cannabis sativa
gtattttaaattttattccatttcgatttttatttctattctcattctcattcctattcttatattttcattcctcctaaccaaacggcacctaaggtggtatttagtttgtaataccctgactagcataggcgtgttagcgtgatttttaacgtattgtgcagctcgttgctaatcaacaagattaatgaaaaacgtgaataattaaaatttgcttatttaattaaaaacttaaagtattacatatataatattttgggatctcgtttacaaacactttacaaaagtttgctatacatataatcaaaagtttgtcgcaaaacgactaaacaacaaaagcctcaatgtccccaaagattgtacgctccaggccttaccgccccgacatgtacaatcttcatctgctcgtattcacgactcctcaactttagcttttcccttacctacacataaagatagcattgtgagtcgacagactcagtaagaaaaagcataacataaaaatataaataactcgggttaatctggcgcccatacacctgatcataaccctaatccccatgtctcacacggtactgagtctagaacgttcataagacaatactatcgaccataatgtc

SEQ ID NO: 159236 - DNA, 894 bp, Cannabis sativa
acttgtggattattaatgattagttaattatggattctcaataatcattaaactaaagagttgttgtgaatcataattaatctaatacttgggatggaagtttgagaaaataaatgacacttcctcgaaactatgttcctagatcgatcgctcccactattcaattcaatttttaaatctataattctagtgttgtgagatggataataagatatgtaacccttagacattatagtatttatgatgaaatgcttatttattgtatttgggcctagatctttcttttgacgattgtactctaaatgtatacggacatttctaaaatgagtacatgtcataaagtcggtttttaactttatcataagtcaaaatatgtttgagaaacaactttggttagaacactattcgatatgcacactaccgttaaagagtatcaactgaaaaagatttaggaaattgtggagtttgttacgcaggctccaccccatgttcaataatgcttagtttcttaaacctgtcatacactattatttgggtgtattaggtatatgtattgggtaatgaacccatactattaaagaaactttgcagattgaaaaataggttaatcctgttatgaacactgtaaaacttaatttagccctaattaattcatgagagttaaacaatagcattatagattagtggaagcgtactggagtccattgaatcgcttgaaaaaggtatgatcttccaatttgcatcaaaacctttctttgaaactttttcacttggtgatgaggatattgttggaatttattttaccaggatcttagaattactaacaactatgttgcttaacatcctaaatatgaacttctaaaacgatactaaattaaacacatatacagtatg

SEQ ID NO: 159237 - DNA, 682 bp, Cannabis sativa
ataatcatcaactacttattaacaaaaatactctatttataaaatataccgtaaaataatacaaaacaacagtaaaattttaacacaaaacacagtataaaacttaaataatatttttataaaaaatttcactccagagtaaaaaaaaaaaaattaaaaggctgtttggttttataattcaaaaactgttctattttttaaaactgaaaacagtttttaaaaactaatagagttgtttggtaaaaatttttaaaaacagttttttaaaacagaaaacatcaaaatgttgttttcaattttttaaacttttttttgtctaacatattatattttatatttttgctcacatactcaaatcctaaacctggatacatacccaacccgaacctggatgggttcatgtcatagtatagtgttaaaatattgatttttttagtaaaaaaaaattaaaactaattttaaaaaatttgtgtgtatatccctaaaatttttaaaataacaaaaactattttctattctcactttttaaaaatacaattttaaaaactgaaaacactctaaaatttttgagtgagtggtgtaaaaactgctattatattaggaaaagaggaaattacacttagtatgggattttaaaagttcttatgataaatatggtacatttaagtttggccaatttata

SEQ ID NO: 159238 - DNA, 593 bp, Cannabis sativa
gcctttaggaatgaactccaaagtgtgaagatgactcctggtcagagtatcacttcacacttgctcatgatgaacatgaaaatctagaaagcaattatgctgggaattgttttatctggagagtaaagagttcattttgttctcaacagcttatcacctgagtttaaccaattcgttgttaagaattggaactcgtccgacatagacaagatagacgctgaattgcgtgcttatgaacggacattgtcacttgcatggaggtccttctccagtaatacagataaggacaaaagaaaagctaaagatattgagaataattcctccaaaaatcccactaatttaggctcagttgagaaaaatagagaaaatgtttccacttcctcaaattatctttcacgacagactgaaccagcaataagaacaatccaagaacaattaagcaaacatattatttaatggtctaattgtgaacagaaggaacattttaaattagattgtcccagacttctcaacactaagaacaatggtaatgctttagtttttgaatcatgtgttttagaggatgacaaatccatctggattgttaattctgg

SEQ ID NO: 159239 - DNA, 663 bp, Cannabis sativa
ctctctctctctctctcgaaaatcctagggcagctagggttggtgtttctttgtgaaattcaagctggtttttgtaagaaatcggtggtctcaagcaactttcttttagtttcttgattttttaaagaaagtgaattatgcatgtttggatgttttgcttgctgttgttgttgttgttgttgggttatgtttcagtaggtaaattatgtttttatagagtgatttgagatggttttgataggtagtttgttggatgagcaagctttgagttttttaactcaagcttggctcatcaatggtgattttgaattctgtatataggtagttgttctatcacttggaaaatgtttattggggtgtattatgcaggtctggaaagtttggttgggtttggaaacgatttggttaggggtttgaattttgttggttttctaagtaaaaccggttacccgaattttgtaataggggaaacccgttttttagcttgtcgtttcgtgtcagtttcaggtttctagttggttagctccctgctagtttagagtattaccatgttaagttgcagtagataggtttaaagatttggcagcattatttctatggagagaggtgtgaaatttacactgaccataaaagtctcatatatttctttacttagaaagattt

SEQ ID NO: 159240 - DNA, 501 bp, Cannabis sativa
tacatttggtttgattctaagggcctgttcccactgttgtagtgtgaggaaaaacaattgtagctgtgctgtaaaaaaaaatagctgtagtaaaattgtaaaaaaaaactgaattaagtgtaataaattataaattttaaagtgctccgagttgttaaaattctattataataataatattttaatctatttcactaaaatcataaatatatatatataaaaatatgttatataaaatttttattttttatatattcttaaattttttttctatagtataaatttatatgtatttaataaaaataatttttaatattattaaattatatttttatcaattgtaaaaaattataatttataagaaacttaggttgatattgtttgttgataatataaatatagatataaatataaaatattttttaaaacaaaataaaaattagaaatttaaatattatatattttaaatattttttccgacaattttttttttaatttttt

SEQ ID NO: 159241 - DNA, 574 bp, Cannabis sativa
tatttaaaattatattttcacttagacattaggtattggactctacctaaaagtaatttcgttattaacataatttacaatcactgagattagtacgtgacatacatttgtttttcacatgctttatatttttcgtatttagctgcaagtattttttaaaaaaacaaaaaaaaaatattaattattttatcgatacctggtacttaatcatttttgtttcacatttttttgggatttcaataaaattattttcttattttaatttttgataaaagaatatcctaggaaatatatgtaattactctaaaattaataattttctaagattaatcttgcataattttattaaaatctgatacttattattttttaagttttttttgggggtttggtaaaataattaaaaaatatataattttattgaatttaaggttgaataaatgttggtgtgttataatttttgaaaaagagaaaattatattaaaaaaaaattcaccatatattttcgatctaaaaaattaacaaagaaaaataaaagatattatggaattttatagatattaaaagatcataa

SEQ ID NO: 159242 - DNA, 510 bp, Cannabis sativa
taaccgggacctggacccagaattaggatatggacctgggaaacagaactaggaccgggacctagtacccgacccatacccgaacttaaacctctgacccagctcgtgacgccgcaccagaaatggaaccagactggggtcccgagattgggatctggatctggacccagggcttggacaaaacccgtagtcggtatctggatttaggacccagccctggacccaaaccctaataagcacccgaacccacaccaagaactaaacccactgccaaacccaaaagtggactcgaacccgtaccctgtgacccaaaattggaaccaaaatcggaagttgactgggacttgaactaggacttggacttggaatcataactgaaattggacatatatatgcagaaccgtaattggcccaggacccgaactccaaataagacctagatccgaattgttagccgcacccagatcccaacccaaacatggactcgggacccgaacatgaacctgaact

SEQ ID NO: 159243 - DNA, 535 bp, Cannabis sativa
  modified_base (504)..(509): a, c, t, g, unknown or other
ctcctatcgttcctcaaaagaggaagagtgatgttgtcgcgactcctgttgctgactcgtccaagaagcaggttaagccttctcaggacaagggaaagaatgtaatgattgatccagttgtccgagctcgcgaagtcttagctcttcaagagaagtttgtgggggaggaattcatgtcaaaggttgaaggaactccttctgaggaattaatgccacgttctgcaaaattggcttcgcagttcatcaccatgttctcgaaggcgtttgtcgctgtctccaaggaagttgaccttttgaaaaagtagatcacccagcttcaggagagcaacaagaagctaaagtaggatgcgaattctaaggacaaagatctcgagaacctccagaagtccaaaaagcatgtggaacttcaagccaagctctctcagtcgaaggtcgaggaattttcttgcgacttggagaccgagaaggaaaatgggaagaagcagtatgtgttgggttttatgnnnnnnataaaactctttacaatctgattagt

SEQ ID NO: 159244 - DNA, 580 bp, Cannabis sativa
gattaattgactaattgcataattgttaaaagttttaattttccgaaattagtttaaatttccaattcacccccctcttggaaacacatcttgggctaacagggttaagattttttttttaattggtaaggttgtatgtagaattttacaaaccgatctttacgttgggttagaaaatatgtagtataaaccgactaaaacgaccaatgtacaaccctactttgtattactgatgtcatttttgtgattgtgtcttctgacgcaaaatggtttctcgtcaatgcatgaatctatagtttgtacatccttatctcgcttaagactttatagtcagcgagttatagatatactctatcaactccgtatttaatgagttattccattttaatatcctttaatataattgccattatattcgttgattcgtattctccaaggttgacacgtgtcctcttctgaagtgcaagctgaatttcgggtataacacttatatcttgggaacatgatagtataattgagtgagaccgctaatcatagatatggaatctatagcttctataagtatctaaaagtaaaacga

SEQ ID NO: 159245 - DNA, 754 bp, Cannabis sativa
  modified_base (207)..(211): a, c, t, g, unknown or other
gtttctaatttaccatccagtgcgtacaaaaggtttggtcaaacccaaagcaccaaacagataaaaagcatacttgtaagaaacaagtgaccaagagtcataattctggtcggtcactgggggggcacctaaacctgtacaaagcatttggtaaagataaaacaatcacaattgcacgatgattataaatagagaatgaaattcatnnnnnataacaaaagcacgtaataccgggattaaaagccgctcggtcagcccgttgtctgtaaaatgaaaaataattccatgtttaaagaccgcttggccggtcatgatgtcttagaaaaggccttatgggtgaataagatatataaaaataaaaggataaaagaagaagtgtttaaacagctgaagtcccaggctcttggtttgggtcttctgggcctgcaggagctggaggatctgttgtttgaacgggaggtacatcagcattttggccggaggtagaagcagccacctcggtttcaccataagccacttgggaagcgtagaactcaaggtacatgtccttagcttctcccaagtagtcgatatttgcctgaggattagccttccaaaagttgtagaagagtttaagaccggctgtctccaaggtatgaaatttattttttagcttcgtcacctcagccgtaagctcctcctccttagctttcttctcctcctccacccgatgaaggactgctcgaagagaggtcctctcatcctgaagactgtt

SEQ ID NO: 159246 - DNA, 601 bp, Cannabis sativa
aaagaggaatagagaaagaaactgttggtggatgaattctggatcttcactttgaattactctgctcttcctacaactctctactgtgttttaggtctccaaatcgcttcacctgatttccaatcgcagttttctatttatatgtgatttttaaggttcgtcggacgattttacccctgggccgtacgggatctcgccgcggccaagttgttgctcgccgcggccaaatagacgtctaaaaatacgtcttcgtaatttctatatggccgtgacgagggtgtatctcgccgcggcgactggagcttcaaatgttgggcattcttgatctagcgccagaagtgcgtcacgcctcaaattggtgtttttcttggctccgctcgtcttttactggacttttgcatcctgagacctctattattcctaagaacctgaaaacatagaaaacaagtgtaattccgtcctaaaacagtgaaaatcgaacataaaatcgatccaaaatataggctaaaaatagcctaacactaggttctattatttcatatattctctactcctaaaaacaaaaatgcatacaaatacccaaagaagagacaacgatgat

SEQ ID NO: 159247 - DNA, 519 bp, Cannabis sativa
tcataagcacgcaattcagcgtccagcttgtctatgtcggacgagttccaattgttaacaacgaattggttaaactcaggtgataagctgttaagaataaaatggactctttcctctctagataaaacaattctcagcatagctgctttctggaatttcatgttcatcatgagcaaatgtgaagtgatactctgaccaagagtcatcttcacactttgaagtccattcctaaaggcatattctagatgaggactggggtgtgggttgtacattttgacactacaaatatcaataaacagaaataaattattggttcaataaattcatacacaagtttagaaaataacaagtaaagtaattatattagcaaaaataccaacgcaaaacatattaattatgttcaaaggtttccaacataatgaaatatagtgtcccggtaggagatagtcaaagataatattttttgaatagagtagtcagctcatctaaaatggagaccattttagcaaccttttattc

SEQ ID NO: 159248 - DNA, 572 bp, Cannabis sativa
  modified_base (378)..(381): a, c, t, g, unknown or other
attattattattattttcattggtataatatgttctaattattattatttttttctttggttttgtagtgaggttcacagattagccaagctaaacttatgcagctttagtggttgcactggattggtctcttgcattgggctacctaataaatcttttgagtctagttgattattttcaattactgtattttctacgagatccttcttctttgttttaaagtaggatctttcctagaatttttgctagtttgctatctaattttcctgaggcatctctgattcatgtttattgtacacatgaattagtagttcgtgcacttagggtggatgataaactagtttggatagatgatttttcatcttttctctatgtatnnnnttttgagtattttcaataaaagttcattgtcaaaaaaaaaaaattaggaattttaccgccatttacccatcaatcaatatcaatatatatatatataaatgaaagtataagagtagtctatgtggcatcttatctttttttcttcttatttttctaattttatgacacattctctttattttttttttttt

SEQ ID NO: 159249 - DNA, 599 bp, Cannabis sativa
  modified_base (35)..(35): a, c, t, g, unknown or other
ccgctatttttggaggttggggactaatctgcatnaaagtgacctttttggggacttttgccgcaaatttccctataaaaaattgtcaccaaaccattttgtctacgaattaagggcggtattctaattatattttcttatgtatgtaataattattataggactcgtttagtacgccatattgtattgtgttgtattatattagtattatttaatacaatattatatttggtattgacttgtattaatatattgtattatattgtattactattatttaatctgggtctcggtcctgggtcccggtctcggtcccggtcccagtcctgggtcggggtgttggttcgcggggttcgagtccggttcgaattctgggtccacatccaggtctgggtacgggtcggggtcggggtcggggttggggtcaaggtcggggtctgggtcggggtccggggtttggggtgctgggtccgggttagggtccgagccgggtccgggtctaggtctaggtcccaagtccggattggagattggtgttggccctgaatcctttataaatattataatacaaactaatacagaccatttgttatgtatta

SEQ ID NO: 159250 - DNA, 521 bp, Cannabis sativa
  modified_base (157)..(159): a, c, t, g, unknown or other
aaatggatacatccatctcgcccatactggcccacacaaccttgcttctctcactggatgaaccattaaatgtatcatgatgtcaaaaaaagttggcagaaaagaattttctaggttgcacaatgttttgactacatgttcatgtaatgcatctaannnatccagttctaattccttcccgcataatttattaaagaaaatgcaagcatgtgtaaaacactctcgaacattttttggcaagactgatctaatggaaattggaagcagatgttgcattaacgcatggcaatcatgtgatttcagacctattagtttcaattcagcctcatttgccaagtttttgatgttagacgagtaaccatcaggtactttcatatttgcaaatgatttgtaaactatttgtttttcctttttggaaaaagtaaaacaagcaggaggcaaatataatcgttgacctttcttctcaggtgccagagattgtcgtatacccatttcaatgagatctaaacgactatttagac

SEQ ID NO: 159251 - DNA, 558 bp, Cannabis sativa
tatatgaacctgccttctccaaggttgtaagcttagtatttgcaaattaaaccttttagggtttttttggtacgtcgtattagatcttgtatactattatactaaattatgtttcatatcatatttatgtataatattatgtgaaattttaatttatatcaaaatattgtatgtgtatatgtacatacaagtcaatgtcaaacatagtagtatataaatatgatatgtattataatttaatataatattatacaatacgatgtatacgttgtaccaaacggactataaagattcaaattatgttgttcgatagtatgaatgataatatatatactagttatatattagttgtagacttgtaattacttagtttctaatttcttcctagttacctatttagtcttcctagttttgtacatatatacttgttattctattgaataaaatacactttttgatccaccatttacaacatagtatcagagcacaatttgaaattcaaaatttgatattagatcggaagagcgattcagcaggaatgccgagaccgatatcgta

SEQ ID NO: 159252 - DNA, 672 bp, Cannabis sativa
tgtttattttaaaattcaaattgaatcaaaattactaacatgttgctaatttaccatccagtgcgtacaaaaggtctggtcgaacccaacacctcgaacagaatagaaagtatacttgtaaaaaaataagtaaccaagagtcataagtctgctcgatcacttgccagagtagattcttcaaaattttcaccactagaggtagaggtgacacctacctcgtcaagattgtgaaaggcggtagttgagattagagcttcattcactagttgtggtggaaaactattaacatgcaaacttaccagatgatcagaaaattttctcaaatcctgcttaatttgtttcagctcagcaagtaagtctttcatcatctcacaatttatcaccatagatgtttgtaactcaacaatagtgtcatttaaggaacgattgtatagatgttgagagttatgagaatataaaggatcttcgtctatacaatcccactcatataatggattatagtcgtactcaggcttccgactataatcatcgagactatagtaagagttgtaggcttgttctgcctcttcgtcatagggatatgcactagatggtgtatgttcacaaggacgtggtcgatgagactcgtaccaaaccttccactttttagaactctcactcttgtaaaaagaa

SEQ ID NO: 159253 - DNA, 645 bp, Cannabis sativa
ccgccatttcaaaaaaaaaattgaaattcaaaggttctcgactaaacctccttgacgaaagtggagccgaattgttataacatcctaatcaaacatttttgatgaagaagggatcaaacaactataatttttaattcaaaacctatctgaggggagaggagaaaatcaaaagttataactcgcgtataaaactgaatactaacggttctcacgagctaggaaagtactaaacaaggcatcacgacgccttgataaaaagtagttaattctagaaatggatagataatataactattcatacgagaacattaaaaatatacaaagtgatcaaatccttaaagtatatttatgtttgcttaaggaagattataactgcaattgcaagacagaattgacaaccgctcgaaaatcataaagtttggtagattactaactacttaaacaagaagattacgagcaatatggtgaaacccaaaagtgttgtatattcgatcaaaatatagttgtttacattgtgaataaaagaagcaagcaaatacaattttattaagtttgaatgaaaacaatacaaggcatttaagataagaaaaacataagactggttacaaacttgtctttacgaaaatgccgctaggggcaaaccat

SEQ ID NO: 159254 - DNA, 593 bp, Cannabis sativa
aaaatcgcaaaccgcaccgcaccgtgcggtttatgaaaaattcaaactgcgatcgcaccataaagaatttcaaactgtttttttttttacagtgcgagcagtttgagcggtttgataaacactcctataatatatctcatataaattaacaatcatttacaataatagagaaaataggataaggaatttctcctatccaagaaacatcttcatccacctctagagcgtactttgccaaaccatgagcagctttattagcttgcctacgagcatgagtaacagtaacttcagggaaagaggataaaagacaacgtacatcgtcaattagatcattaaaacaagataagtccctaagtaaagtgttcaaagcagaggatactcttagggcatctgtttccacaataacaattgataggtggtgctgagcagcccagtttaaactgtggaaaagcgccttcgcttccatttcatcccttctgaagcattcttggactgatctggaaagcgcagtaattacttctcctttgtgattgcgcacaacagctccaattcctaaaattttatccttgaaattggcagctgcatcaacattc

SEQ ID NO: 159255 - DNA, 519 bp, Cannabis sativa
  modified_base (369)..(369): a, c, t, g, unknown or other
aaataatgtgaaaataaaacatttaagttatcataaaagtctccaaaaatccatctaagaaaaataaattagaaagttgtgtgcgtacacttgagtaatcactgttgatttttatggtctgatgaatgaacagcaaaaacaactttattaaaaaaaatcaattaaaattataataccagaatcttatatatgcaatacacataaagggttcgtttggtacacaccgtattgtattatataatattatattcaattgtattttatgtaaacctatatgtggtattaatttttatgggcacctatagtacgtataaattaaagtttaacatattattatataaaaatgtgatatataatccaattcaatanaatacaatacaatacaatacaacctattacgacgttccaaacgagcccaaaaggaagagaaaattatctcttaatatttgttgacttaaatttagacaatgatatggagttaagaatacgacaatatgtataattatagttgtgagaaca

SEQ ID NO: 159256 - DNA, 557 bp, Cannabis sativa
cgggaatatgctgggcatctccggagggaataactggagccaatactcctactgcaccccttggtgctccttgcgacaaagccccagccgcctgacctgggttgagatgaggcaaccgattcttgatccactagtagaggtgtcccaaccggatcaaattttcaatctcgtctttgagatttttgcattcattggtactgtgcctaatttcgttatggtattcgcatctcttattgggatccctccggaagctgtctttgtacaaaggaggcggtctccgatagtgcgtattttgcctagtatcaaaatatacacattcttgggagtctgttaactccgtatactgagtatattggggagtgtatccccttttttgccgcctatcctctgtccgggtgctgcctttggaggaccttttactcctcgagccctgggaaggaccggctaaactggttgtcggagcggagtacgagggggcttgtccatttatccctgagggatttccaaagtgggacgatgcgggggccagggcctggccttggctatacccgggagta

SEQ ID NO: 159257 - DNA, 512 bp, Cannabis sativa
gatttagtttaataaaatttaatctttattcaaaaaaaaatatatatataattaattattacaattaataataaatttgttcatattatttatttttttactgaaaattattttcaattttttttttttagagaaaagatgttcatttaattaaagaaaacatagttgggaatcacaaaaggggatccctcccttaacttaaaattcagaaaagactcattgtttcgcgcaagctttgcaagtgcatcagcttgaccattgtcaatcctattcaaatggatgaaaacacaactagtaaagacatcaaacaaactccatatcttagcaaccacagcccttgacttccaacaaggaggaagttttcgagcagtcaatgattgaaccaaaagcagggcatcagacgcgactgcaatggaatggaaaccacattctgatcccatttgcaatgcccaaaaaactgctaaagcttcggcttccatagcagagtcagcatccatagctttagcagacca

SEQ ID NO: 159258 - DNA, 518 bp, Cannabis sativa
ctttgtttttacccaacgtcacaattgcttttgaaccaattgacttggattttgaaattatgactcccatgacacgtacgtcaaagactccccaggaccccaatgtcacttttgagactaagttgatagaatcaaaggtgcgatctatctcatgctacacgggcgagatgctgaagacctgcgggatcgaacttaagcaatcatgccaagttagattagtatgggagggtgagttcagttgttacccgcctgcatgtttttcaagcagtaacctggggaccagtggtgagactagtaccggtggtttgactggtatgggcgcctggagccttgagcatatcagtgcaggggccacacttcctcttcgagactacttcaaggactacgtaatccacattggagctgccccattccagctgagtcccatctcctataggattcttgctagtttgaaagtcttatacaaaattctcaactggggtgccccactcagtagagattgagtatctttactcagt

SEQ ID NO: 159259 - DNA, 505 bp, Cannabis sativa
acctttaaacttgtgtttccaaatttaatctttaaggttttgtcctctcagaaaaatgtggctcaatatcatgaaactcttgagccttcactcattggaacaacatttcaaccttcggagtattttgatggcatttttcaaaagaggcctaaagctggggctactgctgctgcaagctcgagttctgcttttgcaaaaatccaggaggtcaagaatgaggttcagctagtgaacaatcgtcttgctgtcatggaggaagttcagcaagagatgtcaaagcagttgtccaccttggtcaagctttacagagactaagtttttttctttctttgcttttgttggacatattactatattttcttgtttgttatctttggcccttagataaacaaaaagggggagtaatattttgatttttaaatgtttgtttgaccaactctggaccctttttccagggggagttgtgtttggtacttgtgaacttatttggattaaaagttagcat

SEQ ID NO: 159260 - DNA, 602 bp, Cannabis sativa
gatactttgtgaacttgcttgcaaaatgatcaagaaaagattagtaacaaaaataatcaaatatttgtttatcatcaaaataaatgagtgatttgactttttgtcaacaatatatacatatgtatgtttataagtttattaattttattcaagttttgatttgacacgatttttgaagaaaatcctttattagcaaggtagtatattatttggaaaattactgtagcgcgcctaagcatcaaggcgttacagtaacacatagaaagagcatgactaatcttatatatttttagtaaaaataatgacaaagagaaatagagatggagatggtggtgatagtgaaggaaatgaacattaatattacttacttttattaatttttagacacatatggagagcatgactaaacctatatatcatttaacaaaaaataaataaaaatgaacaaaaaagataggaatgaacaatactatcattattataatcactaaatatatataaaattagaaagaatatgactaagtctatatatatttggtatataatagcatagatagtagtatagatggatgaagaaaataaaaataaaagtagaatatgaa

SEQ ID NO: 159261 - DNA, 507 bp, Cannabis sativa
  modified_base (207)..(220): a, c, t, g, unknown or other
ggtaatcaccaatggatcgtcgtgaggatatctcacgtttttctcgtcttcctctgtgaatataatggcaggttcctcggttttcaacttcttagaaggttttagggtaggtgcctactgctcgttctttatctctttcacatatcttttgtgggcgttattgctttcccgggcgatatgtggccctcccaaaataaccaggatgtnnnnnnnnnnnnnnggaagaggttgtaacccctggttttttggtttattgggtagactaggctggttgtatctgtggccctatcttttcctgtattgtttaaagtggcctcgagcgatgagactttctatctcatcttataattggcgacattcgtcgatcgtatgcccaatatctttatggaatttacaatacctgttaggatctcttttgctcctcgcattcctcatgggcccaagcttgctgaaggtaaccttttcctcatgtgtgaggtaaatattctcctgagtttcattaagttc

SEQ ID NO: 159262 - DNA, 815 bp, Cannabis sativa
acagactcccagggagaatcctactaagtttactgctttctctgtcctgacagaagatttagaaactatatacatggctactcaatcattagctttgtacaagaagcccacacacatgaaaaaggacgtaagcaagagagacatgaccaagtttttccgttttcatgaggattatggccatgacaccaacaaatgcaacaatctaaagcgggaaattgaatttctgataagaaagaataatccgcatgtgcaaaaatatgtataggtcaatcaaaatcaaaggagcgatattaaccaagatttactaccaccaccagtagatggacatctgtaagtcattattggaggtttgcacatagctagagattcggacaaaccccgggaaaggtatgccagaacagtacgacatgagcaagaagaagtagtataggccgtcaaagaaagaaaaccaaaaataccacgggtaggggagcccagcataacattaagtgatgaagatgctatcacgattagtttcccgcacaacgacccgttggtcgtggaattccagatagccaacaagattgtggcatgaaccatgatagataatggagcctctacgaacatcttattcaagacaccgtatgaaaatatggggctccaactcaaagacttaattccctgtctccagccaaagtgttgcacctctagggcaaattcgcctacccctcactattgggcaagctccgaacatcataattataatggcacaatttttagtattagacgttccatcaatatttaatgtcatgttaggccgaccagttttatatgac

SEQ ID NO: 159263 - DNA, 630 bp, Cannabis sativa
aagcattatggctttaatcttctctattgcttcaatagtccattgtactgattctggacccagatatttcttctcccctgtttcatcctagtgaatgggagctctacaagaattttatcaacggtaagtacttactctaggagctctcgaaatccataacacaggctcgtaacatatcttcgagtatctgaattgtcctttcggactgtccatcagtctaaggatggaaagctgtactgaatttcagcttggtacccatatcccgctataaactctgccagaatttagaagtaaacttcggatctctatccgaaactatagactttggtacaccatgtaatcttactatttctttgatggacaaatcagcatactgatctactgtaaaggttgttttaactggtagaaaatgtgcagatttcatgaatcgatctaccacaacccaaattgaatcaaataaacctgtggttctaggtaatccaaccacaaaatccatggtgatatcctcccacttccacttaggaagtgccaacggttgtaataaactcgtcggtctctaatgttcattcttgatctgctgacaggttaggcatcgcgatacgaattctaccacattcttcttcatcccgc

SEQ ID NO: 159264 - DNA, 503 bp, Cannabis sativa
ctcgtaatagatcctctagtatctaaatagttctctctgatttcccatcagtctgagggtgaaaagatgtactgaacttcacctttgcgcccatagctctttgaagactcactcaaaatttcgatgtaaactttggatccctgtttgaaacaatggatttaggagctccatggagacgaactatctcctttacatatagttcagcatactgatccactgtataagtaatctttactgggagaaaatgagctaactttgtgaatcggtccactatgacccatactgaatcaaacactctcgtggttctaggcaaaccaaccacgaaatccattacaatgtcttcccacttccactcaagaagggctaatggttgcaataaccatgccagcctctgatgttcaactttaatttgctaacaagttaaacttttggatacgcattctaccacatttttttttcatcccatacgtggttcccgaatgcaacgaataaggtgtggtgtg

SEQ ID NO: 159265 - DNA, 792 bp, Cannabis sativa
  modified_base (36)..(69): a, c, t, g, unknown or other
ctaatccaaagagttaacagaatcaagcacacagtnnnnnnnnnnnnnnnnnnnnnnnnnnnnnnnnnngcagtatacaactatcctttagctcattgccattccttagctcaaacaaaaactaaaacagaaaattaagtgcagaaaattaaaatatttaaatctctccccccaaactaaatatgacattgtcctcaatgtatacaataaaatgcagagagaagagacttacctgagaccctctcagaaagggttgggtggtggcggctgatcatatgggtagaaccgaggaggttgcgccaaataattcgggtcatcaatcccgatgttccttctgttgatgagagagttaagttgctgaacttgtccctcatcatggatactcctctgcatcatgtagttttggatgtggttgttctgctgaattatataactcagatgtgtatgagtgtattgcatcgttggatcgataggcccaagcaattgtcggggctgctcctcttcttcttcaacactaggctctcgttgccgcctacgtccttgcggttcatcaagtggaggttggccataaggatgtggctcttttagcctgttgacaaaggcgatgtccatcttgcgaagtggcagcaccgtgttgtcatactccaattggggaacttcatatgccctgcagagttctgttataactcccgcaagaccaaaaccacctcccatggctccttgtacaatctgatcaatgttatgccagatgacttgtccaatatttatgttgtaccccttcataatggcgta

SEQ ID NO: 159266 - DNA, 686 bp, Cannabis sativa
ttcatgacacatgctcgcagtaagttttccaatatctgaattgttctttcccactagctatcagtctgagggtgaaaggatgtactaaactttaacttgatatccatagcgttttgaagttttgggttcctgtctgacacaataaatttaggggctctatggagacgaacgatccccttacatacaactcagcatactgatccactgaatatgtagttgtcactggtagagagtgagctgattttgtgaatccatccactatgtcccttactgaatcatgcattcccgtagttctaggtattccagttacaaaatccattgcaatgtcctcctacttccactcaggaaggactaaagattgcagtaactctgccggcctctggtgttcagctttaatttgctggcaggtttatcatttgaaccataatccaccacttctcttttcatcccatatcaccaaaaatagggttttaagtcctgatacattttggtggttcctggatgcaataaataagtgtagtatgagcttcatcaagtacctctttcttgatcttttcaacattagaagcacaaattcgagctttaaataacaacattccactgttcgagactaaaaagtctttaggtcaaccgaccattacatggtctcgaacttcaactagctcagggtattccaattgcgcttt

SEQ ID NO: 159267 - DNA, 515 bp, Cannabis sativa
  modified_base (240)..(241): a, c, t, g, unknown or other
gtctaaattgaaaacatttcaaagtaataaagggttttgggtaaatagtaaaagagatctcactgattacaaatattttttttttgaaacaactcaatcatggttgtcgtcctacatgctgccacatccacctctgtcggaaataaaaaaaataacgtgaccgaacacatgattcttcttcctaagcttagtgttgactggatttttaaccaaccgatgcggagtcgtaataaatgagannaaactaaaattacaataataaatgtagttaataacactagaatttgcaataaatgtaaataaaagacaccggaatttaaagaggttcgcccgcggatgtcggtaatagcctactccccttgagttttattgatctgagttgcaagagtcaagaaaatgctcttgattgtaaataataagaagtgtttatttttctaagggtttcagatcgcggatccccctcccaggtcatgggtgaccccttatataggggagggggtcggtgcttctcgctt

SEQ ID NO: 159268 - DNA, 540 bp, Cannabis sativa
ttaaaaccataaagcaatgtcaaataatatccatctaaaccataatcaagtgtttagctactcatgtttatggaagcagaatcacacatattaacttaaggaaagagaagaaaataatgttaaaaaccctctgaagaatgcctacagtattgacttcggcctccgaaattcgtactcctttgtcggctgtttatttccttctgaactgcctccagtattgattgaaaatcactccttatataggtattgagggactagaaagataaacaaaacgcacatgctgaaaatcctatttagcattgaattgaaaaaccaccctcgagctcacgtgaggaaaaaagtgatattttgctgctttaggggggcgagctgcggcgccactttgatgggtcacgatagggatgcacacggggtgggaaattggcgaggagtgctaccgtcgtccccatccccatttattctccatcggggatggggcggtgaatcccctaatgggggcggggacggggcggggaatcccctaatagaaaaataaaattt

SEQ ID NO: 159269 - DNA, 703 bp, Cannabis sativa
catgatcaggacgaactccgcactacggtaaatctcgtgttcgaagaaaggcgtatgtttaccgagtggagagatagagagatggaggcgttaagggctcaccatccagagattgaaaatcgtagtcagcaacctacagtgctgatacggaaagcctaccaaactgtaggtcagtaacctccaaatgtcattcccctgggtgagacggacgaagatccagcgatgaatacttcccagactacaaatggtcagccgcccaatccccggtcacaagttccagtcgtgggcctagcggtaagcgggcagaccatgtctagtaattcatcaggcgaagtcatacctgatggttccaaccagatcaatggtgccattccacccgtcaaccaagcaaatcaatcgctgaggcaaccaggcgcttctgtattcgaaaggttgggggcgacccatgacctaaggaatgatctgaacagaagaggggagtagacgatcagaatgtcacgacaatcgtgcagcccggaacccgcactcaaattcccgctcagaaagatgctgacgtaattcaaattgatcagaatgtcgagcagattagcgtagccgtacaggcacagctagacgtactgaaaaatatgtttcacggcatggctggacaaagaaacaatgatcttgagctggaccgagcacgcgaaactcctttctcacctga

SEQ ID NO: 159270 - DNA, 727 bp, Cannabis sativa
acaaaaatccttccaaacatcaatatatatatatatatatataaaggagaggtataaggcgatgacgtgacactctaaaattacttcaaataggtttatctttttttaattctctctctcttttttttttaattttttattaagtttataaatatttatttattttctcatatttttttaaacattttattattattaattatattaattaataattttatttaagcttttttaaaaaaaaaacaaatgccgctttttttaataataaaatctatatatatttataatatgaaatgattgagagaaaaaagaaaaaagttatggcttttagaaaaaggttatgattttttcttccacggaactcttttgattgcaatttaagagttatatttgtaaatttatgtatatacataaaaatgcatgtataaaacataattttgaatcaattttttaagcttaatgtgaaaatttttgttgaattaagtgtttttcaatattttttttttattaaatatgagaatttattattttattatttttacaatttttccctacacttttgctacttctttttaaggtaaagattattttggacgatgtgatttgcaaaagttgctgattggactctctgttttgttaaatgacaaaatggaccatgtattttccaaaatggtaaaaatacaccatgagcttaatttttgacaacttttttttaatataaccaact

SEQ ID NO: 159271 - DNA, 930 bp, Cannabis sativa
aaataatttccaacaaaaataatacaaactttcaaaactagtatcaacatttacataaactaaatattttattaaaagatacagaataaaaagtagtttaattaacaacataataaaagaatacaatgcacaaaagtataatgtacaaacgataccaattttaaaatccaatttcttcaacattaaaagaaattaattatttcattaagagcagaagaaaaaaaatcaatttcatcaacatcatattgaaaaaaaaacacaatgtaaaaaattataatctaaaatgatacaaactttaaaacaagtttcattaacattaaaagaaactaataattttattaaagaagcagaaaaaaatattttcatcaacaagataatggaaaaaaattataatctaaaaacgatactaactttaaaaactattttcatcaacattaaaataaactaattatttcactaaaataggcaaaaagaaaaacaaaaaccagtttcatcatcaacaaataaaaaatatacaatgcttaataaccaaactttaaaaagatactaactttttaaaaactagttttgaacatataaattttatatcaatacctaataaccaaacttcaaacttcattctttattttgatattaagttttttatttacttactaaaaaactagagttaatttaagcatacaatgtggatcaaatataacaaagagaactagaaactaaaactagagagaaaaaaagaaacaaagtgtttaccaggtttttcggaaactaaatatattttgagcttaaagaagataaaagataataaataataaatagacatatttttacgtggtgcaggcgttaaagatccttagtcaacgagtctatagtgtcagctattggattgtctgtcctaaataaaacccatttcaatataaacagatttac

SEQ ID NO: 159272 - DNA, 958 bp, Cannabis sativa
  modified_base (801)..(801): a, c, t, g, unknown or other
aggatgttaatgaaacatatttgttagtaaatctagatcctagtaaaatatttccaacaaattgttgttgggggttggaagataatctcatattggcccaactccactgcccatttgagtaaccgtctagaagcatccgatttttgcaatatttggcgtaacgattggtcggtgtatacccgaatagcgtgagcttgaaagtagggccttagctttcttgttgctagaatcaggcaatacgtgagtttctctatcaatggatatcggccttcagcctcaatgagtcttttactgatgtaatagaccggatgttgaatacttgttttcctctctgatcaacatggcacttacagcatgctccatgacagccaggtatatcctaagttcttctccgtccaaagattttgagagtacaagaggttttgcgagttgcatttttagctcttgaaaagctttttcacattcctctgtccactcaaattgtttatttcctcgcaggatgttgaagaatggaacacacttggctattgattttgaaacaaatctgttgagtgcggcaatccgaccagtcaaactttgaacttccttggttcttattggcgatttcatatccaagagggcttgaatcttctctggattggcttcaattcctcgagcgttgacgataaagcctagaaacttacccgagctgactccaaaggagcactttaagggattgagcttcatgttgtacttcctaaggactttgaagcattcgtccaggtcatctatatgcccccaaccttcctggatttgacgagnatgtcatccacgtacacttccatgtttcgtctgatttgttctttaattatcttgtttaccgatctttggtgtagcttcagcgtttttgagaccaaacggcatgaccttatagcaatacacacccatatctgttctgaaacttgtatgttcttggtct

SEQ ID NO: 159273 - DNA, 532 bp, Cannabis sativa
  modified_base (41)..(45): a, c, t, g, unknown or other
aatatctatataattattatttttaaatatatataataatnnnnnaaaattaataaagaatattctgttagttaataagatattctgttaaagttagcgtaaaaatccaaaaagcatcattagaccaagaattacatatatataaatatatatttctataaaaaaatatatttttttttaatgaaacgtactctaagagatatctaggttgatgttacgtgcaatgcacgcataattagttttttttaattaggttcaattaggtgatgttaagtgcaatatatgtatgtttaatttttttttttaattaagtaatatatatttttttaatttttaaatggggtttgagattttgatcttcaagaaaaaaaatttagctattgctacattggagtgtcatttggatatgattatatatttgtatttttaaaattttttgaattaggtaacgtatctgataatgcatatattataatttactatattcttaaccaaaactcacataataaaatttgagtgtgtttatatatag

SEQ ID NO: 159274 - DNA, 629 bp, Cannabis sativa
  modified_base (377)..(377): a, c, t, g, unknown or other
ttctaggtgatgcaattatatgatatacgagtgcaggtttttgtcacaggctcatctgattaggtaatgaagttatacaatatatgggtgttagactatggcacagacttgcctgattaggcaattcgatacatgattatcctatttaagcatctacttgcctgattaggcatatgagattgttactttatgaggtaacatatatataatttatataatttaatgaatataaattctattattggtataatagttttatattatcaaatatctgtatactgatgtttatttatggtagatgccagttgtgatttagatttcatcttatgaacaatgtgtgatggtttgattttgattgtgtataaatgacaatattngaataataaaatatatgattattattattacttttcttattgagtcattgtgactcacgcgtgctatgtggtgtaggtaaaggtaaagaaaaactagatcaaccatgaggtgacagtcatctccaacaatgtacatattgacctcatcagcctggatgtcgagttgccagtagttgttttgggctggttgtatctgctatgtattttgattttgtgtttaaatggttgtcgtatatatttctttagcaaaac

SEQ ID NO: 159275 - DNA, 524 bp, Cannabis sativa
cgttagctcggaatcacaagtcaaagtttggaggttcaaactttgaacagatttttcggccacctccgttgttcgtttgacgagtcgtcttcacctctagagtcagcttgtcgagaataacaacctacactaagctattttgcccaactcgctactttttttagtgacatttttgtagctctgcccctttatggtgaattttcggcgatatcgtgtactattttgacaaacggttggcatgggtgtgatctacttgttgatgtggtcattttgatatatactactccttttttcggtgacattttcgatacactaatttttaccgccatcgatagttaatgtgcaccgcgtaggcgaggcttcagaactctaaactttaaatctagtcttattatatgttgttggagtcaactttgtttatagaatgaaatgattatagttatttagccatttgatggtatagatgagagtgatatttaagattggactaaataattggagctcaggacttgagagcttaagat

SEQ ID NO: 159276 - DNA, 567 bp, Cannabis sativa
gggtacatattatttgttcacgtatgttttaaaaatatatatcttgtgtataatattttagatcatgttttataaacacacacatggctacttctgttttgaaattcttttagcaagccacttttattttttcatttgacactcttagataaaatgagttgaagttctacctattttgttatccaataggggaacaaatattcctcagtgaaaaatgaagaaataattatgtatagtttgctctttcttggaggtcatatagttgtttttgatatgatttaattgtgcatacttatgttgtttcttcttatgtgttttaatactataaattgcatgtgtctctcttttatttatttcggataaacaattacactcacacaggtacttgtattataattacgatgaagccttttttctggagaaactcttgtgaaaaaatactcctcagtgaaaaatggagaaataattatgtatagtttgctcttgcttagaagtcatattgttgttttcgatatgatttgattgtgcatacttatacttatgctttttttttttttgatttaagcg

SEQ ID NO: 159277 - DNA, 739 bp, Cannabis sativa
ctttgtccagccatgccgtgaaacatatttttcagtttgtctaactgcgcctgtacggttgggctaacttgctcggcattctagtcaatttgaattacgccagcatctttttgagcggggatttaagcatgggctccgggctgcatgatcatcgtaacattctgatcgtctactcccctccttctgttcagatcattccttaggtcatgggtcgcccccaacctttccaatacagaagcgcttggctgccacagcaattgattcgcttggttgacgggtgtaatggcaccattgatctggttggaaccatcaggtatgacttctcctaatgaatttctagacaaggtctacccgtctaccgctaggcccacgagttgaactcgtgacagaggattgggcggctgaccgtttgtagtttgagaagtattcatcgctggatcttcgttcgtctcacccaggggaatgacattcggtggttgccgacctacaatttggtaggcttttcgtatcagcacggtagcttgccaactacgattttcaatctctacatggtgagcccttaatgcctccatctctctatctctccacttggtaaacatacgcctttattcttcgaacgcgagatttaccgcattgcagagttcgtcctgatcacgatgcagagtattgttgtgatcctgcatgagtccaacaacgttgtaaagattttgtaactcagtagcatctccgatggtcgtct

SEQ ID NO: 159278 - DNA, 505 bp, Cannabis sativa
gacagtatatagcagatttggatgaatttggttgcaaacctgaggtctgtgagaacagtttgagcccttgaagcaagtagataatgctcttgtaatcgctgttgcaaaatagaagaacatcgtccgcaaacatgagatgattcaatttcaactctttacgtctatgaagaaagatgaaatctgatttctgcccaattttccccatgattcttgttagatattccatacccagtacaaatagtaagggagacatgggatctccctgtctcagacctcttttagcttcaaagtacccatgtgaggatccatttatcatcagagaaaatctaggagttcgaatgcataacatcacaagctgaatgaactgagtagggaacttcaaaccttgcagcatttcttcgataaaattccattctattgtgtcataagccttttgcaaatcaagcttaataacacaacttggctttgtcagcttccttccataatgtcgtatcagatcctggca

SEQ ID NO: 159279 - DNA, 799 bp, Cannabis sativa
ataataaaagaggccgggtctatagtgtataaaaaaaaagaattactttacagtaccacatattgaaatttttaatttttttacagtaaggtagaattttttttttcaaaaatactgtataagttttatactgcgtattgtgttaagtttttgttgttgtttaacagttattttttagttgttctgttttatattccacagttgttttataaagacacggtatttttgaaaaaaaatcgtgtgatagtatttttgtaaaaattaatctaaattgtagtatttttgtaagtttgtaaaaagttaaaaaacttaagagagggaaaagggctaaaacattaatttaaatattaatgatgatatctaaaatataaatctttttatataacaaagaaaaataattatatatattgcttctgatcaagtccctcaagttaattagagtctttgggcaaaaaaaattaataattggacttttttttatatgaaaatttatttatacgtggtaaaattttaaaatataattggatcttttttttatatataaaatagtataaattacacaatatatgtaaaaattataagaattaactttttatgacataaataaataatattttagagttatgggctttttagttcttacattactaagtatttttttatgtcatattttaggaaaacttacaaaaatgttgatttttggcccattctttataaaaatactgccataccacacagcagaaattacttttatattatcttggccaattttttttttcttttatactgtaaacacaaa

SEQ ID NO: 159280 - DNA, 541 bp, Cannabis sativa
aggttgctgccctgagtcgttttacctcccgatctacagataagtgcatccccttcttcaacctattgaagaagtgccaaaagtttgaatggtcggatgagtgcgaggaagcattcaaaaagttgaaagaacacatggccaagcctccaatcctgtcaaaccccgttcttgtagaggacctgttcctatatctggccgtctccgagcatgcggtcagcgctgccctagtccgggaagaagagaaaactcagcatcccatgtagtacgtcagcaagcgcatgataggagcggagacgcggtaccccatcatcgaaaaattagttttctgcctccttatggcctaaagaaaattaaggccatactttcaagcgcacccaactaaggtactgacaaatcacccgctccggcaagtcctacaaaagccagaggcgtccggaaggatcctcaaatgggcaatgaagttgagtcaatttgacttacactacataccccgcatctccataaaagggcaagccttggcagacttcatcaccgaatgcaa

SEQ ID NO: 159281 - DNA, 534 bp, Cannabis sativa
  modified_base (167)..(176): a, c, t, g, unknown or other
tgcaccagatagttgatctgtcgctgacccatccacatgtagtttccaggtcggtttatgttcttcgttaattggctgtggtactggcttgggattgccttctggtatgctttcttttttttcctgtgcattccaccacaaagtcggccaaggcttgtcctttgatnnnnnnnnnnggttggaagttgatttcgtactaatccaattctaccgcccacttgagtaaccgtccacaggcatctggcttttgcagtatttgtcgtagtggttggtcagtatacacccaaacaggatgagcttgaaagtaaggcctcagcttccttgttgctagaatgaggcaataggctagcttttccatcaacggatatcgaccttcggcctcgatgagtcttttactgatgtaatagacttggtgatgcacgctgttctcttctctaatctgcatggcacttacggcatgctccgtaaccgctaggtatatccctagctcctcaccgtccagaggtttagaaaggatgggaggttttgcgagct

SEQ ID NO: 159282 - DNA, 522 bp, Cannabis sativa
ataaaaagtaatacaacagtattatattgatcaagcacaaacctagaaaaaatctacttaataaaaaactaatacaacagaaactaattagtataccaaccaatactataacaaaaaatactactaaatcacaaactgttaataacatacacattaaaaataaaaaaaatacactagaaaacctaaaataacaaatatatatacatatacacattccatcagaaaactatacagtaaactttaatctttaaatgacaaataaacatacataaaaaaaaataaactactcagtacaataaatagagagagacaataaataacaaaaataataaaattaatcctaacttactttttttaaaaaaaaataatatatacactaaattttataaaaaagaatatttttattataataataaaaaaaagttgtagcttgaaaagaaagaagtaagatactgacaaaaacatagatagatatattgtttagagaaaaaaaaaagtaaaacaatatgattaaaagctgaa

SEQ ID NO: 159283 - DNA, 711 bp, Cannabis sativa
  modified_base (468)..(468): a, c, t, g, unknown or other
  modified_base (532)..(534): a, c, t, g, unknown or other
gttgtgccgtcagactttaagacgtatggcagtttcaatacgcctcctcccatgcggtattaaatgcgaggtgactgttcagataggatctgacacctcccggagatcctttgttgtatctttgctctccgggagtatgtgagattgacatgccttctccgggaggcatgtctaaggttgatccctgcgcttaagaagacttagctgaattatttacactctaaacccttttcatctccgtgtcatcatccgattggtccacgtattttgggctaaatcaggggcaacaggagtaaacctcataattctggaaatggtaatgggatgattaaacctgaggcacatgtagcctctacttcaagacccaagacaaagaagaagtggaaaaataccaagaagcaagctcaagctgtgaaaacagttaagaacaaaaaggctgctgctcctggtgatacactaaaaggaaantgtttctactgcaatgagaaagaccattggaaaccccaatgtcttaaacttcttgcaaagaaannnggtatttctttctataaactgatgagttttagtgaattattatccaactggattattaattctggactactaaccttgtttagttgtctttcttcttattataggccaagctgcttgaactcaggtgctatcttagtgagttaaatcggaaagctggacaaaggggtggagttcgtc

SEQ ID NO: 159284 - DNA, 535 bp, Cannabis sativa
ctgtcacaactgacggactagcatcagcgtcagcctgagtcatggtgaaaagtcaccctgggttttgtgtagtactcttcttaggctcctctttcttggcctgagggtaatctctaataaagtggcccaccacgccacactagaaacatgccttggctcgacactcaccaggatggtgtttcttgcattcgggatatgatcagaatgagaacctccccctgatgcttcggaagctttagcctttcttttgtgatcagggttgccactatcggtccctttactaacattaccactagcaggaggattcgataccgtgacggcatcctttgcagcctgctcctttattacttcctgctcagcctcctcagcaattaaggctaagtctaccactctcttgtatagagtgtcatgtgaggtggtaatcttcaagtcccgagtgattgtagcattcagtattcgaacatacttctgtttcttggtgaaatctatgggcaccagatcaccagcaaatttagacaaccgatcaaactccaga

SEQ ID NO: 159285 - DNA, 648 bp, Cannabis sativa
ttcagtcaagccccaccagaaatttgccatcatagattccacttgcttgcaaaagtagactggcaatctgaaacaactcatggcatatgttggtatggattgcacaactgcttttaaaagtacctctttcccccctgctgaaaaaattttctcatgccaagtattcattagtttccatattttctctttaatgtggctaaacatttcttttttatcgcgtcaagagtaagatggaagacctaaatacttctcatgacattcacaaataggcatggcaagctgctgatgaaaaaacacttgagcagcaagagtggtattcggagaaaaagacatgaccgatttgcttaaattaagctcttgtccagaagctttgtgataggtttccaagacactcttaatagcaagacaagatctctcagtagcttgacagaaaagtaggctgtcatcggcaaagaacaaatgagtgattgatggagcatggcgtgtcagtttgaagcccattaagttaccaatttcttgctgatgctgtagtaatcttgagaagccttcagaacaaatcagaaacaaatatggggatagaggacaaccttggcgaagacctcgggatggtgttagattacccataacttctccattaataagaaaaga

SEQ ID NO: 159286 - DNA, 616 bp, Cannabis sativa
taagccttatatgtgccctgtttaagacaattgcagagtctgtactgacaaaattagagaaaaattacagttttacaaacattgggtactcatgctgctaaaaataaacattggtcgggtttatgccgcttacaaacataaaactttgagtatttatgccgctatttacccttttatttaaatctgaattttctaatgactttttcggcaacaatgacttttctagtgatgatgattttttcggtgacttttttggcgatgataattttttcggtgactattctggcgataataactttttcaatgactggtctgacgacttttctgtcgttggtaactttttcggcaaaatttattattgttttacaaatataaattttttatttttttaaaaaaaatacagcataaaaaaacgtatttaaatgtaaaagaaaaataaaaaagaaaattcatgtaatttctacaaaaatatatatagttagtaggctggtggcttatgtgacgtttccattttatttatttttttataaaattctttttttttttaatttttgtggttggggtgtgatttcaatcaatttaaataatatatattataaaatatatgataacaaaa

SEQ ID NO: 159287 - DNA, 555 bp, Cannabis sativa
gatgaggctgttaaatgggactcgatttctaagcctttttttaatggagaaaataatctaattttggttccaaaagctagtgtaatgcatatgtttcatatttagttacctaaaaattaacattcttaattatataaaaaaaatatataaaatgtagaagcagtttacattaaaattttaatgtaaatattataataaatatctacggaataatagtaattttaacagaaaagttattagtttattggaataataaaaaataataataatttgaagtaaattgtatgctaataaaataagtaacagcaaaaaagaatggacattaaaggaaactatcaatggtttagaatagatgatctagtagaaaggacctagttgttcgtcctcatcgtccgagcacaaaaaattcgggacctgagctgcttctgaagcttgattctgtggcagacccatttctccggcacgagattgacccgttggtgttgtaggtaggggaccaatgggtcccgcatgcgactgacccattggtcttgtaggcaggggaccaatgaatct

SEQ ID NO: 159288 - DNA, 516 bp, Cannabis sativa
  modified_base (36)..(50): a, c, t, g, unknown or other
cgctcttccgatctagtcacaacataaattttttgnnnnnnnnnnnnnnntttagtcacaacaaaaaattatttttgactaaaatatatcttttagacacaaattgtaactaatttagttttagtcacaataactattgtgactaaaaatacatttagtcacaacaaattgtagttttttgggctaatatattaagccacggatcttttagtcacaacataagaatcataatttataattagttacaattttttttacttttaatcacaaatttttttgtgactaaaagtaagatttttgataatgtatatattataaagatatgttgttgctaagaagaagaattcatggtatataatacataagagataagatatggctattaatgagggctcatctttcttgaaaatataaaatctgccatcattagtcaataacaattatctttgtattaattaatatatagttcaggaaaaagagatcgaaactcataaatgtcatgatagaataattaat

SEQ ID NO: 159289 - DNA, 927 bp, Cannabis sativa
atcccaactcagtttggtcatttccttgtttaatggattgcaaatgtagattgttaggtcttgagtagggaagcaactccagcaacaaatgagatcctgacacgataacaaaatcacaacatcctcagggagaaaatcaaagattgtctgtttgaattgaaagccttcttcatcaacagaaatgtatgtcacaactttgatatctttgttgagccacgggaacttttcttggaagatgaataatgagatagagaattttgtcctttgtaattgagattggataaaagaacgatcagatatcaagttgttccaagttttagatacacatttcaattgaaacaatgtctttttaggtaataggtatagcacttcgatgaatacatcattattcaagcaccttatctttctcatttcctgaaacacaaaatcagattttctcattaattaaatgtataacatgtgttgctatactaaacaagtaaaagaccataattgaaactctttaacaataaaaacttctatgcaccatacaatcaactattgccataccacaaaaactgttatgcaccattcttaataatataaattacgttgcaatataacttgctatgcagtacaaataagaccaaaagaaaaattactttatattgaactctcaggatacatcttccaagataagttcccctgactcaacaaagatatcgaaattgtcacattcattcctattgatgaagaaggcttttaatacaaatagataatctttgattttctctttgaagatgttgtggtaatgtcatcgtgttagggtctcatttgttgcaggagttgcgtccctactcaagacccaacaatctacatttacaatccatttaataagggaatcagttgggattcacatggaaatgacgactttatatctttagcttt

SEQ ID NO: 159290 - DNA, 543 bp, Cannabis sativa
  modified_base (60)..(61): a, c, t, g, unknown or other
gagcataagatattgtaaagtatgataagatattgtaaaatagcataaaataaaattttnnttatcttttcttgatctctttggttatagaccaaagataagataggacaattgtatttgtgtttgtattatcacatagtgataattttcttttatgtttacacatgcacgaaataccttagacccgtttggagaggctgagtcagtaatgactcttaaatacacttccacagttggatgatgttgactatgttcgccatgatgtggacccaactgaagttgcaaacatccatcgtctgaattcacagcctcaacaattagatgatttcattgttgatgatgacaccgagggtctaaataccgaagacgatacctccttagaattagagagtgacagtgatgataatgttgtatatgtaactgatgatgatgatgatgaattgtaatttgatgaattataattgtaacagtgttttaataggaataaaaattaaaatcgttcttctttaatatgttttgaatatggttgtttattttaaataa

SEQ ID NO: 159291 - DNA, 769 bp, Cannabis sativa
agtctgtcagggccccacggtgggagccaaattgtagagggcaaaatttacaatgatcggaatggaaggatcgcgggcactgacaacctataaaataaaggaaaaaggattgttgataccttgggacaccgggatggtaccagccgaagggactctgacgatcaagtaagtaaacaattcaaataaagaatatctgaatgtaaataaagaagatagaaaacatatacttccattgtagagtgatggagaaggactggtaataataatagtaatgtatttcgtaaatgcttgaataagtgttcagtgagtgaagatgcaatgatcctttaggactcttgggctctccttttatagagcctctgatggttgaattttcctattctgaagaatgaacgtgggaagtggtcttccccttttccaagaggaaggatcgattcttatgcttcagctatagactcgttcctatcctttgatagattgatcttgtagctgctgtgctcgtttgggccttgtattttagccaaagcccaatgtattttggatgagtgggttatatttactgacctggtttgaagggttgtaatttcgatttgggctgtaagaggcatttatgcttggtgtaatttttggacactacagtttttatcttagttactttacggaaccaattttattgtcacaaatttgtaactagctgataaatataaccaattttttaatattttatttgagttattatgtgttattatttgtgtttatttattttttt

SEQ ID NO: 159292 - DNA, 620 bp, Cannabis sativa
ttaggatttagggcttaggtcttaggggtaactgtaaagagtttagggtttagggtttaaggtttagggtttagggtttaatggtctgcttctagttctgggtccaatttttggtcacaaggtacgatttaaggtttgggtgtgggtcttggtccgagtcctggtttggatctaggtccgtgttttggttcaggtctgagtcttggtccccaatccaaacaccaaccacatgtcgagtctagttcgagttcttgtatgggttctggttttggtctgggtctaggtccaggtcgaggtcgaattccttaatttagacaacgactatcggtcgggtccaagcctcgagtcttgggtcctatcccgggtcaaaatcttgatcttggtccagttctagctcatgtcttgggtcctggttcgggtcttaggtccaagtcatgggtcttggtccccgattcaagtcaaagtagtagttcccggtcttggttagggtcccaatccatgtgtaggtcccggtctgtgttcaataatggtccttgtctcgggtcttggcctggtctgggtctaggtcacggttcggttctcaggtcccaggtctgagtatcgggtcctaggtcccagtc

SEQ ID NO: 159293 - DNA, 564 bp, Cannabis sativa
ttcatctacaaaagacaacacacgagatgagtgttggtcaaaatatcgaacgacaaacaagaaaatatgccgaccaggagtactcaacagataaaagaacgaaaatgtttaaagaaaagtcagaactcaagaagttagaaaattttcttgagttagggaaaaaaagttcatgaagcttagaataatcaagatgaaagacggacgcaatgcagtttagaaacaagctttatggccgtaaacccacatgaagacatgataaagaataatcccagaagtttctaaccctagggtttcctaagcatttttctatagcacactgaaagttgcattcgaaatgtaaacatgcaaagataagcataaaggaaatcaaaaacttactcaagattcgagtgtctgggttcgagcaacgtctatccaaccagtagttgtatgaaggaacttcggcgactttgaagccaggaaattttccttttcgctcttaagctcacttagcaaagaagggtgatgaaatttgttatgtgctaatgctgtcggtatttataggcaagtcatgaaaaggggtaa

SEQ ID NO: 159294 - DNA, 710 bp, Cannabis sativa
  modified_base (251)..(252): a, c, t, g, unknown or other
aaatatatggattacactcaataaagaagtaccaacacaagcagttctctatgaagataatactgcttccatcgctctactaaaaaagggctacattgaaggtgatataatttaaacacatttcactaaatttttcattatacatttcaaggggatgcatattggtgtcaatttaatcaagtgtcaatcttgcagacttttataatgttattaccaacatcaatatttgagaagacgatatacaagattgnnatttgtcgattagaagatctccacgaatgcctaaatgaggggagttaatttatactgcactctttttgttttgattaaattttttgagtaagatttttaatgagtcagtttttatagacatccatacgggaatattatgaaatattatatatcgatgtctaaattatcaaattaattatcaccattagtgtttgattgtatcttcttttaatttagttttctattcttttaatcatatttttgtataaataagggttcattccattaaaataaactattgataaaaatcccattatttttttctttgtattctctcttttcttatttttttttatattatttataataaaaaatagtaaatttacgatgtaaattatacatcaaatatgtcaaatttgcatcacctacattttttttttcagtaagtaaactgtattttagttttataccaggaaaga

SEQ ID NO: 159295 - DNA, 586 bp, Cannabis sativa
atctcctcgatcttcatctgagagttcttggcttcgagctcgacttgctccttagccttgcaaagttcttcgagctctttgtccttggtagtcgcatcttgcttgagcttcttgatgtcctcctaaagctgaacattctatcttttcacaagtttgacttccttggatccagtgacaaatgccctcgaaaacataccaatgaactgcgaagccatttctgcagaacaaggcaggggctcttcagcaagggtcctgtcgacctttgatataaactcatcacccacgaacttctcttaaaaagttaagatgttgtgagctaaaatggtcggatcgatcacgaacttcgtccccttgtcttgcgtagccttagctagcttcttggaggaatccgcggcaggagtagccataacatcgcttttcctcttctaaggaacgataggtgatgtcgtcgctgttccagtctttggcttgcggttaaggatcggtgcggacttcaggtaagtcatatctgtgaggataagaaaagataagtacaaataataatagattttaatgcactagtttatacatgcgaaatgttacctga

SEQ ID NO: 159296 - DNA, 736 bp, Cannabis sativa
ttagcattagggcgttacatctaatatctacactactgcaagcacgtaagagtaacaaataaaaaaaatatatataattggtaattttactataaggcccttagtttttacctcatggcatgatattgttttttttggccaataacattagtaaaaattactcaaaatatgagaaatttttaagagtttacttttttattgcataaataaataaagctaagtggttatgggttttttttttttgttttttacatttatatgggtttttttatgccatatttttgtaaaaacagatgagatggaaataaatctcaaaataataataagttttgccggaaaagtcacaggcgccagagaagtcgccggaaaaactaacagcactgaaaaagttttcgaataatcaccatcgttggaaaagttatcgtcgttgaaaaagtcaccgtcgctggaaaaagtcatcacaagtagatgtctcaaatataaacaaaaatagaaccggttataattgaaatataaccacaaataaaacaaaataactcaaactaattataattaaattataaccggttataactaaaataaaaccagttatataatataatgaattcaaactagtatcacaataattcaaacggattacaattaaacaatgaagaggaaatcagttcctaaaacactgaaaataaattaaaaacaaaactagttctacaataaaaaaacctcataacacataata

SEQ ID NO: 159297 - DNA, 589 bp, Cannabis sativa
aaatataaatgctaaataataaagttaactgaaacaagtcatcaaaattggcatagtcactggaaatgctgctggcaccgggaaagtcaccagagttgtttctggtgctgaaaaagtcatcggaattggcattatcgccaaaaaaatcacaaaaaaaaactagtttcttggtgatttttctagtattttttccggcgacaatgccaattccaatgaatttcccagagtttgctgtcggtaccaaaaaagtcacgggagtagctgccggtgttggaaaagtcgtcggagttgctgccaacgccaaaaaagtcgtcagaattgacatgtcgtcaaaaaaatcaccgaaaaaattatcaagaaactggttttttcatcaactggtttcttgactatcttggtaattttttttggtgattattccaattccgatgaattttttgaagtttgatgtcggtgctggaaagtcgcctaagtagttgtcagtgtcagataagtcgtcagaattggcattgtcactggaaagatcaccaagaaagtggtttcttcatcaagaaaccggtttcttaatgccaatttcgacgaatttttc

SEQ ID NO: 159298 - DNA, 813 bp, Cannabis sativa
ttttttccttatttcaaaaataaaataaactattgaggtacctatgataccaattatatactgattagttaccattaaattattttaattgtttaaagaaaatttaatttgtaattagcttctaccctttctacaataaaataaacttggaggttactcaaatgtattttaaataataatatattataatataacataaaaataactaatttattattaaaatgtatacaattaagttttggaaaaaccaaaaatgtatctcaaattatatattgattagttaccattctgcaacttctatttagttaacaaatcaaatttattattaaaaataaaaatgcttatactaaataaaactatttcatatatatgcttacttgttatattctacgaaatctaattagtttctacgataaacttaaaaggtaattaaaaatgtaatttcaaatgatttaacaatttaaatatttaaatattttactagtattttttattttttttttttgaaaaagttttactagtaagttatgtgaattttttttttctactttattgtgacttattagtttattaaatagacttgaaggtaacataaatattgttataaaagaaaaataaaaaaagtaatgtaaaagtatttaaacaacaaaacaatgtaatataatataaaaataaacacatagatttcaaagtaacaaaaatgtttataaagtagatggtatataaaaatagtagcttattatattacatgataactcattagtttcaaaaataaacttttaggttacccaaatgtattttacataataagat

SEQ ID NO: 159299 - DNA, 594 bp, Cannabis sativa
atgtaaacataaatgacttctaatcttttattgataacaaattagattagattgaaaaggattttatttagggcataaaatcccaaaagaatttacctctcctcaccgcagccttgacatcgtcttcatcaattattgagcggagccaaagaagctttttgaaataccaactagcatcatgatgaaagtcggcaatccaaatgctttgtcctttctgataaatggcatcaatccatataacccaaaggttatcttgcttgctcaaaatagcccaaagatacttagccattagagcaatcttccattttttcccttccctaaacctaatgcctccaaatttcttagggagacaaagtttctcccaagaggggatgtgcattttactacggtttccattcactccccaaagaaaagtcctataacatttatcaatggtcgttggtaactttttgggggaagcaagaaaaggttcatccagtagttccgaacacccagaaggacagaatggatcaactgagctctgccagcaaacgagagattcctgctagcccagttatgcaagtgtttatgaactttatcgatgatgataccaca

SEQ ID NO: 159300 - DNA, 863 bp, Cannabis sativa
ttgttatctctcaaaaaatccaagataattgtgcatgaatttttcttctagatatggaagtccaacaaaggagcactttggaaaaaaatgagcactttggccaagaagggagcactttggccaaaaaagagaactttggccaaaaaggagcactttggccaaaaagggagcactttggcacaaatgaagcacttcggcacaaatagagcactttggcacattgcacctcctaccaatggagcactttgtgcgtactaagctcccagctccgtcagttgctaaggcacaaagagctcctcagctaccaaattacctcaaggacctgattggcacgaaccaacccaattggctcccctcgtgtgccaatgaccatccaggttcgctaaataagagagacacgtgctcttaaagctatcccaaaaatatagtcaaaaaatgataagggaagagatatttattttttaaatgattattttattattatgattttgtatcttgaacctagcccaactatagttacggattggtgcacctatgaataaggaattttagatcctagatgaaaatctatataagggggtgaagtcacttgtaaagggaccctgaacttgatacttacaaaatcatactcttgagctcccactctcaaattctaaaaactcacttgaggagtgaactcttggacaacataagtctagagaactctactcaagcattgagatcaataacactccaagtggactagcctattaccgctgaaaggaggtgaaccactataaaattcttgtgttcgtctttggtgaatttacttttgcaaacatgtttactttgattaactattgcttgtgttcatcttgctcgtt

SEQ ID NO: 159301 - DNA, 613 bp, Cannabis sativa
  modified_base (410)..(422): a, c, t, g, unknown or other
acctcatcgtgtttcacgacccccacgtactgcttcagctccttgcgggtagttcctccgatatggggtcctccagagatcatggcactctctcgttaggtctgggtggcaggccggcgatatgttgggcatctccggggggaacaactggagccaatactcctcttgcaccccctagcgttccctgtggcaaagctccaactgcctgacccgggttgagatgaggcaaacgattcttgatccactcgtagagctgtcccaatcgaattaagtttttgatctcatctttgagatttttgcattcattggtgttgtgcccaatgtcgttatggtactcgcatctcttgttgtgtccctcagggagctgtcttagtacgaaggaggttgtctccggtagtgcgtattttgcnnnnnnnnnnnnnacacacgctcttgggagtccgttaactccatgtactaggtatattggggtgtgtacccccttttcagtcgcttttcctctgtccgggtactgcctttggaggaccttttactcttcgagccatgggaaggaccggctagactggctgtcggagcggagtgcgaggggacttgtccatttatccctcaggga

SEQ ID NO: 159302 - DNA, 510 bp, Cannabis sativa
cataggtaaaccgaattggaggcctaggattcacatcattacccccccctccaaaatcccgaaccttgtccccaaggttgaaatcttgaaactgggccgtaatggtgtctaacttctcccaagtagcttcaaaaagaggcaaatctttccaacggatcaacacttccataagagctcctgtaggtgtaggccgttgacgcacattcaaaagttcagcaggttcgaccaacaactccaggtcagcagtcaatgtaggaggaatggtaggagatgagtgagccgtaccaaccgcagcacggagttgggacacatagaagacggggtgaaccgctgatgatgtgggaaggtccaaatgataagccaccgcgccaatccgtttcaagacagtaaaagggccatagaaacgagcagctagcttctcattcttgcgaagggctaaggatttctgtcgataaggccttagcttaaggaagactcgatcgccaacttcaaactcaacatgtcgacgag

SEQ ID NO: 159303 - DNA, 544 bp, Cannabis sativa
taattaaataattaaatttgaatctagaatttgtaaaattgaagataatttaattatattaataaaattttatcaaaaaattttgagtttagggtactgaatatgtatgtttttaaaatacatatgtatgtttttaaaatacagagtatcaaataaatattattgaaaatacaggataccaaacttgtatttaaatagaacatacggtaccaaatatatttacatatataagtttagagttatttagtagtgttgcttaattaataaaaagaataatttaggaattttgatatgaaaaacacaaattttgtaattgtacctgtactattaatttattatatttatattatataattaaaatcaaagatgtataattaattgacttaaattaaaaagaaaataattaaaagtgtttaaaatactttaaaagtaccatgtcattcatatatagtatatagattttaggtaaaaattctaaacacattacataacattaaaattaattaattagtttaattctaacacgtaaatatatatatatata

SEQ ID NO: 159304 - DNA, 587 bp, Cannabis sativa
agtttcttcttcctcttcagtggggtcacctgctcgtcctcggcctcatcttcaggatgcaaaggctcccgagcatactggttggccctggcacctcctttcaacttagcctcgcgcttaagttgaataagctcattcttattatgagctcgttcagcctggccagcaccgtttttcctctccttccctgccacagacttaggagaaaagtcctcgggatagagcccgtacttcacaagattctcattggaggtcaactggataataatcttgtcttgccccggcaaccgggcaagtttctgagctctatccctaagagcaagagtgaggggaggacggtgatatgtcagaatctgctgaaaccgagtctgggaaatgctcggatccttcaccatgaagtactcatcaacaaaatgccctatcttgcttgatggccttggcatccgtgccgatccaccacttgaagcctgactgagaaaaataaaagtaccccgatctgccttgtttgggggtagacttcagatcaaagaaccaggcaacctcgtggggagaaggagcaccctatccttgggaagcgtagaggacga

SEQ ID NO: 159305 - DNA, 643 bp, Cannabis sativa
  modified_base (141)..(150): a, c, t, g, unknown or other
tgtaaaaaaatattctttgaacgtaaaaatgtaattattttacaaaaaatggtactttatgtaattattcatttttcttttaccttactaataggtaaaacatccttttttagaatcaattaattataattaattattttnnnnnnnnnnttaattgaatatttaacaagactttttttagcaattagtaattataaatattttttttatataaatccatactataattattttaacagttgagtcatttaattaatatttacaatgaagctttaattttttttttttttacaaaaattagatttctctttagacaaattataattctcttattgtataataaatttttaaataattaattatttttaaatgatattaaattatttttttataactagaaaaactaagtatgagtttttctattcgagtttgaggttgcttcattttctggaggagcttgacttcattttttgactctcgtttggttttttgagtaaatgactccttataaaaaaagatagaagagtttagccttttttttggaaaatacattcaacctatttcactttttactttttaaatgtttgaattaaaaaaactaaataattaagtgtaatacttttaaattaaagttataagtata

SEQ ID NO: 159306 - DNA, 593 bp, Cannabis sativa
ttatcagaaaatcaattatttatttattttcttaaataaaaatttatttctttaaatagaaatatatttctttaaataaaatattcttataggtcctactgtttttaccctatactatagggaagaaaatttaaccaattaaaattaaaagaaaagagaatgtatatagtatttgtttacataggtgtaggaaattattgtaacatttggtattattttcttattactattttagaatatgataaaataagtttatgtatataactaatacactaatatactataattattttaataactaatatactataattattttaactgatattctgatgttaataactaatatactataattattttaatatatttttattattatataaaaaaaaataaaaagattattaatcaaaacaataaataaataataatattaagtatgcttaaagcccttaaaagactatatatcggtaaactcttacttgttgtagcatttaagagaattttttagtccaattttttttatgattgtgtacatcatagttgtttagaactacctgtaaatttttaaaaaattctgaattgtttacaat

SEQ ID NO: 159307 - DNA, 585 bp, Cannabis sativa
ttattttattcacaactggaattcaaaatatttcatcagtaatgtgattttacaatcattaatctcaaaagaacttccccagttcaattgcttattttatcaatattctagcagcatctgattttgataaaataggttttgatgtccagggtcaatccccaacatactcccacaattttttcaatattcagagtcaatccctgacatatacacgggtttcaggtaaagtaatcctggttttagttgtttgtcttcgagtactactggttgacatccatctttcctcgcggtaacttgatatggcaaccgcagtgggctgatatctactcacgtcgcaattctttttacacaatagctatactggagtaactgccctttgtatttttgtgactcgcttcctctcgagataaccaaagtgtcccttcttctcacagaagagggttataatcttcagtcgctcgagttattgggcatatcaaactgatcgtaggcatcttccttcccctttatatatcgttgaaggtgcccttgcgctatgagaccttctatctcaactttcaactgacgacactcttccgtggtatg

SEQ ID NO: 159308 - DNA, 707 bp, Cannabis sativa
  modified_base (81)..(84): a, c, t, g, unknown or other
aatgccaccatctgatacttgcttcggagcttctagctctagggatgaacaacttatcgactttgatgggtctgatgattnnnntaacaaaggatttgacagtgaggcattgcctgcggagcccaccattctaccagaacagattgtctcagcagagacgggtgttccatcatcagttgttccctcagatttgcttattcctcaactagacccagtgttgagagtgtcaacatcagcagtcaccaacttggacttgaatgagcataccaaaaggtttgtgattaaatgcatgaaagacattcttcatttgttatcttctcctttgaccacatcagacatttcaaaacatcgtgttgacgtgggtatgcaacttgacgtgttgagtaccctttgcgggcattataagtgtggcttagcagaggttgcattgttcactgactctgtcaataattttctcaaggctcaagaaaaatctctcgcttctgctcaagttgttgagaatgcccttagtcttgatgaacctcttatcatggaccttcttcgtcatgataaggataatttggcagctttagatagtttgtccatatctgtcactaacatgacaaaggatttgaagattttaacgcagaggaagcagagattattgcagaagaactagtcatacaacaacgacgagctcagttcgaagccaaaaaaacatcgtttga

SEQ ID NO: 159309 - DNA, 638 bp, Cannabis sativa
ttcttattatttttttttttttttataaaaagataactaattcatctttataaaaaataactattaagttggacacaaaaaatattatatttagctcaatctctcaccactttaaaaaaaaataaataaataaaaaatataggaccaattacggatgcgtgactacatccgtctcctatatatatttagtagatatacataaactagtaaacaggccgcgcttcgcgtgcggcaattaaattattatataaatattaattgaacaacaaaatcggtatcaaataattttaaatttatttttatgcatttttttaaaaaagaaaaatatatgtttattaaaaaaataataaatttacatcgaaaactctaaataattcaaaaaaaaatatcataaaatttcttatataaatataaaatcatgcaatttttttaaatgtacattatagtgaagaaaattaaaaactaaacaatccttacacaaaatagagatctaaattaatagaaagaagacaataaatctatagaaaactcatcatataatatcaaaacaactatcatcaccgtatctcttttgtagttaccactgtatttaaagttgatgtcatcaccgtatcttacttgtaatcattattaatact

SEQ ID NO: 159310 - DNA, 532 bp, Cannabis sativa
gaaaataaaatatcggggctaagcggggttatggaatttgaccattttacccttagctttagaaatacctaagttataacctaaagggtaaattagtcattttgttaagtgaaagttgacgtggcagcctagcttagtggcacctagctagattaatttcagcaagagattgattaatcttttttcatttgaatcaattaaggaaataaagagaaaacctaaaattgaaggaaacctctctttccttcctctctctcactctctctctctcttcgaaaccaagaagaacaaggaagattgctgctggtttttggtggtttcagcaaggaaatcttgggagaatcaagctaaggtaagccctagtaacacccttccttagtttttaagttcttacttggtttgaggttgtggttttgagaattagtggctgttagggttaggttgagttatagttcgaattttatggtttatttgagttgatttcaagttcttgcagctggttttagtgtgtggtgttggatttatgcaagtt

SEQ ID NO: 159311 - DNA, 546 bp, Cannabis sativa
caaagaagtctaagggcggtgaggggtcctctactaaggaaaggaggccttccggggaggtcattaatcttttcgaggagctgactgctgcaaacccctctacccccaaatctgtcaagtccaaggagtctagaccaccaacagttggttctgaactggtcaatagtgatcctgaacgtgtgcgggcacctactccagctttgatagtgcttccagaggccaaaaagagcaaggagatgctggcccattacatgaaccagcttgttcctgaggtcagtgagcaactggttggtgctgacaatgactcttctttagatttgttggtgggtgcagtcttgaaggagttcaccagggtaagtcttttttgatacttccctctaatcttccatacttagatcgatatgctaaagtttttcttttgtgcaggccggtctgaagttggcttacacttactcccaggctaagtatcctgcttccaagaacgcggctctgtccgacttggcggggaaggatgctgaagaagctagggcagaagtcggagctgtt

SEQ ID NO: 159312 - DNA, 562 bp, Cannabis sativa
ataaacctcaactcctaagaagtaatgtataggaccaaggtctttcaaggagaaggatttattcaaatccgagataagtttggagatgagagttgtattgggacctgtaattaatatgccatcgacatatactaacaaaatcacaatattggctcctgtcccatagataaacaaagaactatctgctctagaaccttgaaaaccccaagagacaagtgtttgtctcaacttatcattccaagcacgtggggcttgcttaaagccatatagagctttttccaacttacacacatgagtagggtgagtagagtcctcaaatcctggaggttggcacatgtatacagtttcatgtaatggtccatttaaaaacgcattactaacatcaaattgagatacattccaattttgtgtaacagccaaggataacacagtccgaacagttgtgggtttaaccacaggactaaatgtctcctcaaagtctatcccagcctcttgcaaataacccttggcaactaatcttgacttgtatctgtttaaggacccatctttattcaacttcacc

SEQ ID NO: 159313 - DNA, 648 bp, Cannabis sativa
  modified_base (395)..(408): a, c, t, g, unknown or other
  modified_base (580)..(584): a, c, t, g, unknown or other
aatcgacttgctgccatggaggaggttcaacaagagatgtccaagcagctgtcctcattgatcaagctttatggggcataagttttcctttcttttatttgttttgttgggcatatttctatattttcttgtttgttatctttggcccttagataaacaaaaagggggagtaatattttgtttttaactgcttgtttttatcaactctgaaccctttttctagggagagttgtgtttggtacttgtgaactttttgggattaaaagttagcatgttattttgttgttttttgattttcgattgtgttagtgagggggagttgttatttgttcttgataactttactttgcaggtacttatgtgttaaaatatattttgttcatctaaagtgccannnnnnnnnnnnnnaaagtccttttttggcaagttagattacaaaatatttttcttttatggtaagatttttttgcattcatacccgattttcttaccttgtttattcagttttagttgctcttttctatgttaggaaagatgcatttttcagctagacattcctttgtttggaaacttcttgtannnnnagcaattctcttatggaaagttggttttttaaggaaactttgattattgccttttcctcattga

SEQ ID NO: 159314 - DNA, 872 bp, Cannabis sativa
tgtgtgatccaatttcccacagaaaaaacagaaatcaggcaggcgctcatacttgaaatcaatccacttaacaaactcacgccccatcctaataaacttaatgttcatacccctcctgataggcaaattaacatccatgagaactctcaaacgcaaatagggaccagtaccctctttgatagtgtccttatccacctcaataagatcaccaatctccattgctataaacctagcaaggtcataagacttacacatgaaaggaataccataaacatggatccaaaaagggacatagtggagattgtcaggagtaagggggaaggaactatcaggagcagcaaagatagtaagagattgggcaaaatgccacggttgaccctctaaaattctacccttgtccccttcacagccaaaggagaccataaacatgccatctgcatgctcagacacggtaacaggaaaacggcactgcgatgaccagatacccgatagagttttcattagagaaggtcgattataaggacatattgtatgcaatttaagaagaagattaatgggagctggttcagaactggaagaaccagtatcataagtaaagacagtggattcttcaggagggagaacaagggcatttgaaacattgtttaaaaactcatccataacgacacaagaagaaaacacaaaagtaaaaacaagaataaaccagatgagaggatggagatgaagaaaaagatacctgagcttggagatatatatgagaagaaccaaaagccacggagaatacacctgagaaccgccctagtcatgtctgaagtcgcatccatagcagccatattaatgaggggaacctgaaggacattgggaacacaggc

SEQ ID NO: 159315 - DNA, 754 bp, Cannabis sativa
ttctttgaaggatcaagaagcgtaatttattaattacggaaattatattgggatatgtgtgtatcaaagataccatttttgaaataaaaatattttatcaggccccgcaactgtggaaatttagcattatggtcaaaaatgtcacaacattgatggaagaattaggttgagggtattccgaacaaggttagaatttttagaatgtcggcttaatggattagtaaaattaccaaaatgcccctaggttattttttagaattaagtttcttggagggtaagttggtcattatttaggatagtattttatattttatattattatgggctgaattttgaatttaaaaaaaaaataaaaaataaagcaataagaaaaataagaaaaagaaaaccctatttaaaagaataacttccaaggcaagaaaccaaacttcctcttctcttcttctccttcgtgcaagacaaaaccagcccaccttgaggattttttcttaagcttctaccctcattacagggctcgttcttgtcccaagtcaacctagaagagcttgaagataggttcttaacctttttggattgaaaatattagtttttgagttagttttcatgtagggttttataattctgtggctgtgtgagttaaaccaggtttggggtgtatttatggtaggtttttgagcatgttgggaatggttttaagtggtctctatggctgtttggattggatttggtttgttgaagccaaagttaagttttc

SEQ ID NO: 159316 - DNA, 510 bp, Cannabis sativa
ggacatgcactcaatcactaaaggctgtatttgtttcgtgaagaaagttaaggattttgaattagaagaagagaaaagaagaagaagaagtctcaaactcactagttttctgacaagaagaaaactaggtcaagagtctttagaagcattagttggataatgagacttttttttttcattttatactaattcacttagggttaggattgatttatttggaataaaaaaagataaataatggaaaaaatgacacttaatggccagccatgaagagggcccaacacttgttagattttatccatttttctcaaccatttatttatttttcacaaataccattttttacaatttcaatcctataaatgccaaaactattggtttaataataaaataattatcaaattaaatagtcatttataatatctattaattagactccacaaagtattttaattaataaattaatcctaaaatcctagttctcacaatcaagtcatatcttagtgaaaa

SEQ ID NO: 159317 - DNA, 555 bp, Cannabis sativa
ctcgagcaatgagactctctctctcatctttcaactggcgacattcctcgatcgcatgcccgatatcttaatgaaatttacagtatttgttaggatctcttttgctcctcgaattcctcataggctcgggtttacaaaaggctaccttctgctcatgtttgaggtgaatattttctcaagtttcattaagctcggtataaatagtatacactggcacatatttgtcatgcttcttttgtttctttgtatctttcgacgattccctacctccgtcttttctttttggactagaaacccctgagttatcaattctcatggaaaaagtctctgttgaaacattgctgggtttacctcccgagcttgttttcaataagttcatttcttttcgggcttcttccttctggatgaacacttgagctctctcattgaactcaatgatgttttgtacaagacgtccttgtaggtcatcccacaaatcgctcccagcgattaatggatcagtggagattctcgcctgaagggctataagttgcgtgttgtcatccaagtttctaa

SEQ ID NO: 159318 - DNA, 575 bp, Cannabis sativa
tcatactagaatataacaattacttattttagttgttgtcaatttctccattttctcaaaatcatgttttgtacacactattctattttcctggtccatgtatagtaagagagcatgaactaatggaacaaagaaataatacacatcttgatcttcttctctctcaacaagcaaacaagtaaatataggacaaaagtttatgtaaaatttgtaaaaataaatgttgaagaaaacattattcaattaaaatttttttactaatcacctgtttacttaccaacaccaaacaacaaatcaaagcactaaatgtaatagaataattcttagaataagaacgaagaggagaaaaataaaactactcattttttaatttctttatccaaccataaaatcaaacaatttatttcttttttcttttaactttgaaaaaaaaaaaaaaactcatcaaagagtattagagtgaaatatcaccgttgaccctcataatttaataaatttcaattgttagtgtaaggataaagtagtaatttaaataaaataagtgagtttctaaaaagggagttctatttgcaccc

SEQ ID NO: 159319 - DNA, 973 bp, Cannabis sativa
  modified_base (232)..(245): a, c, t, g, unknown or other
  modified_base (523)..(531): a, c, t, g, unknown or other
ttaacctgtgaagtctatcatagcctatatgaccaagacgtaaatgccatagatatgtttcatcttcattatcaatcttttgcttttcgtggtttctagcattagctactttaaatagttcgttattaagcgcaaatggttcttcaggtcttagaacataaagcccctgttccattaatgcaacacaaatttgaatgtcaattcgagaaatggtagaaccaaaactcaaaannnnnnnnnnnnnntgttgcaattgtaagcatgaaacaaaaatcaagtttctaatgaaatttggaatgaataagacaatgtctaattccaaaattctgttctgaaacttgagtttggcttttcctctagctctaacagataccatctcgccattaccaactttaattttcaactaattctagtttacagcaattgcaatgaacaactaacatggtttgtagatccagaatcaagaatccagatgggtttatcattctctaaaacacatgattcaaaaactaaagcatcattnnnnnnnnntttttggattgttcttattgcgggctcaatccgttgtgaaggataaactgaggaagtggaatcactttctctattcttctcaactaagcttgaagtagtagcattgtcggagcaatgaactctctgctctttagataaaacaattcccaacttacctgctttctggaattttatgttcatcatgagcaagtgtgaagtgatactcttactaggagtcatcttcacactttgaagttcattcctaaacgcatattctagataaggattgggtgtgggttggacatttttgacactaaaaaaatcaataaacagaagtaaatcatttggttcaataaattcatacaccaattcagaaaataacaagtaagcatatatgtttgcaaaaataccaaaaaataaacataggcattattttccaaggtttccaacataatgaaataca

SEQ ID NO: 159320 - DNA, 595 bp, Cannabis sativa
ttttaataaaaaaaaacaatataagggtatttttgattaatgaatacaaaaaagaggtatatttcaacttatccctaaattttttattgaacaaaagaaccctaggatcgcctctaggcataggtgggctagacccgcgcttagggcccactcattttaggagcccaaataaaaaaaatatcttttaaaaaatatatatatttttaataatttttaaaaataccatttatttttatagtaacgacccaagaaatttttttggggggccggacttgaagaaccctattgtttttattttataattatagaatattaaaaaagggtaatatagacccttgaccatttttactatattttttattaaaatattattttttttctttgtaatggagtgtaattgtaatgggaattacattgattttggtatataatcatcattacaatactcaatgtaataactattacattgtaatggattacaaaagtttaaaaggaaaaacaaagggcgtttttcataaatgtacaacaaaaacaacataattacaaaaaatgtgtaaaaaaaattattttaaaaacttatacattttgaaaactt

SEQ ID NO: 159321 - DNA, 544 bp, Cannabis sativa
  modified_base (237)..(237): a, c, t, g, unknown or other
  modified_base (299)..(307): a, c, t, g, unknown or other
atcttagatcaaaagatcttaattttgagatggttaggttcgagcttaactgtattatttatgttcttcgacttattcgttaaagctgacaaaatggattggcccaatacttatatcttgggaacatggtagtccaattgagtgggagcactaatcatggataagaaatctatagcttctataatgacatagaagtgaaatgatgattttcttggagcttggcttaatagagataantggaagagctcttatttcagtaattatattagtttacagaaatatcatttataggaagctannnnnnnnnaggataaaatacattgaagggtacaatgataaatttttccttactcgatgtaaatcatctatagatgatctttgattatttggattataacaatggatatttaatagtgtatctatatttggaaaatatagagtgttatatgtaaccaagagtgcaattccaaatctataatggagttaggaggcattaataagttaagaaatttactcggtaaattctagaactacttattggaag

SEQ ID NO: 159322 - DNA, 502 bp, Cannabis sativa
  modified_base (207)..(209): a, c, t, g, unknown or other
gtcgtcgcccacctacccgtgttgatggtccgagaaattagtgagccagaaatggcggaagaagatgagttggatccccgggtgggatccgaaaaaattttagaaccaatggaggacgtcgaggaaatatcagtatgtgaccttgaccccgccaaggtcctccagcttgggaaaagcctggagccggaggaaaaagaaaaaataatnnnagcactaagggcagccacagatgttttcgcgtgatgccaaggggacatgaccggaataagtccccatgtcataacccatgtccttaacattaacccggacgtgccaccggttcagcagaagcgacgcaccctcgacccagtgaaggcagaagccctggagaaagaggtaacaaactactgaccgatggcatgattcgagatgtgtattgtccagaatggctggccaatccggtgctggtgcctaaaccaaatgggacatggcgggtatgcatagattttaccgatctaaacaa

SEQ ID NO: 159323 - DNA, 516 bp, Cannabis sativa
  modified_base (453)..(470): a, c, t, g, unknown or other
ttcatactaggcctagagttcagagttatattttcatgccattaagacagctttgtgacaacttagctacaatatttatggctcaaaaactataatagttctagtcaaagctagcatatcaacatcaagtatttagtcataaagaggcgtaagtggtcattaagcatgcaatattgaattgaatgattacaatatccttgactaaagacatgccaatttcaaggaccataaagtaaacatgtgatttagtttcccctttttcacttttcgtgtacaactaaaattatttaatgaaacacttatattttctcatattcatgtacaccttaattttatctaagaaaattactttcatgagaccaaaataaacatatgatttattcgcataagtgcattgtcacattaaataatagggtgtacgttagtcgatttggtcggtttacgttacatttnnnnnnnnnnnnnnnnnngatcgggttacaaaaatctaaatgcaacccgcccaattaagaaaaa

SEQ ID NO: 159324 - DNA, 600 bp, Cannabis sativa
ctggggcatgatattgttggagaacttgattcgaaagcctcaggatcaaagagaaaagataattccaaaaggctacccaaggataagaaacctaacaagtatatccctctttatgctaaatttaccaacctcaatgaaactcgaagaaatatctacctcgcacatgtacaagaagccatttttagcgagccaagacctatgaaacatgcgaggcgtaagagggatccaatcaagcagtgtgaatatcatggggatattggtcataccacggaagaatgtcgtcagctgaaagatgagataaaaccagtggcagccaaagacaaaaccaggattattgcacctggaaccatgggatatgtcagggattgaccctggatattgaaacaattgacggagtgtgtgagggattgaccctaaacatcaaaacccgtttgatcaaaaccagatgctcctggaagattgataaaataaatgattgagctgggaaagtccttatgagattaatggttgttaatcacattattgatgaaatattttgaacttcagttgtgaataaaataatcatttctttcaaacaagtaattataaagcgtaaaccct

SEQ ID NO: 159325 - DNA, 516 bp, Cannabis sativa
tgattgtacaatctgctcttatgtaatgcagcaatacagttataaatagaaagaaaatcatcagcattcattgagctgatttcattcatttctctgtccattttattatttctttacttccgctacccaattgtggaatatatataccaccgactttcggattgatttactttcttttaaaaaatacacttctctttcgattattatttccttattaattagatgatcaatatatatatatggatgttttttttttaaaaaaaaaaaataattaacattttaccactcatttattaaaaatactcctctgtcgagtattatggggttccatctcaaaattaattggtaatgcgtgaagtagatcatgttcttatatatggcatggtggctatttttgctcaccaatcttgaatcaccttatcaaaggccttgctatttgctcgcttatttttgttcggatctcaggcgtctttgcaccatctggatctcgtgcggctggctaaccatctggatagg

SEQ ID NO: 159326 - DNA, 532 bp, Cannabis sativa
atgtaaaattcatgtaaacataaatcacttcaaatttcttatattgataactaataagattgtaaagggttttaacattggcagttaacagaagtaaatagatgacacattaaatttactaacgatttaatagtttggtagattttaccgtcaaaatttaagtttggagagttaaatgtaagtgaaatattaatttggaggatttaaccgccgaaaactctatatataatccttttttaatatatataatcatttaatacttaatttcatcttgttaaaaaaaagatattggcagtaaaatcacttaattttatattttttaataattaattacttaaatagatttttttgatgaaaactaccaaaattccttttctattagctatttatccctttcgtctaaaaatctcaattaactgcgacgatggactgcttattagggttgtacatcggttggtttgggcggtttatcctatatattttctaacccaatctaaagttcaggtttttaaaatttaagtgcaacccgccc

SEQ ID NO: 159327 - DNA, 914 bp, Cannabis sativa
attatatctcacttgttgtctcattgtatctcacttatttttatcatcatatctcactcgttgtcatcactatatcacatcccttgttattactatagttcacttgtactcgtcactattgtaattcccaaatctatatcttaatattagatttcatcacgaattttaaatattttttttaaattcattagtttgttttttattaattaaaatgtttaaaaaaattaattattatttttgaaatatcttaattataaaaaatataaaaatataaaaatataaaaatgtgatattattaccgtagttcacttgtagtcgtcattattttttattttctaacttttttttaaaatattatatagaaaaattattaaaataatagtaaaatactaatttgtaagtttatgctttttatatagaaagttattaaaataatagtaaaatatcaatttgtagatttatgctttaataaaatattaaaattgagaaaattaaggagagaaaagaaaaaaaaaattggaatgattttatagatatatagatatatagatttataaatagattggttgaagattatatgattaggtttttatctatgtagataattacggttttatgtacataaaatataaatgtgtatagataattgataggtagatattttagatcttttaaattagggaataatttttttaaagcaaaataacgtaagtattggtttctataataaacaaatctatatgtatattttttagagaaaaaaattaaaacttacgtgtgtatataaattgtataattaaattttatatatgtatttttatttagaaaaataataaaataatcactcaatatttatatagctaataaataattaaaaaatgagagaattaaagagaaaacaaataataattttt

SEQ ID NO: 159328 - DNA, 545 bp, Cannabis sativa
  modified_base (232)..(236): a, c, t, g, unknown or other
gagtaatatcgagagagttattgctagaatactatcagtcatcgcagtaggaaatttctgaaaaaagataacgaaaaaaaaaagataaattttcaagaagagttgcgattttttttatcttttgtttaaaagataagttatcttttcttttagtgagatatttcataatactataaatagaatcttaattctaaggggatttatctatccactataaatagaatcctaattnnnnnaggattcatctatcttgaagcactataaatagagcctcttagactacaaatgaggaggaagtctaaaaagctacaaattagagagagaaactcttactatttattatgattatcattataatgtctagttgtgagtagttttcttttagttaagggttatttcaaaacccgaaacatgaattcttaattttattattgaatgttactttttagttccattatatatcaaattgcttctattcttctatgttcaatgttctgattattgttttaaccttgtttagacggccgctaaattaggttttactt

SEQ ID NO: 159329 - DNA, 557 bp, Cannabis sativa
ctctatatataatatcatttataaatataatcgagatagtatttttttttttttggaaaatcgagatagtatttaatcataacaattataaagatattttacatatatttttatagttctttattaaaaaaatacaaaaataattataaaattacataaaagtaacagaaaatattattaaaaaaatatacaaataacaaaaaaaaattaataatgtaaaattcttttttgacaatttagatgacaaaatattttttatttatggtgcgattttttagcttttataaaactgattttctcaccttaattaaatgtttttattactcttttttattataggaaagattccatatgcagttgtcattttctttgtttagaaacttcttgtaagagaagaaattttctaatggaaagtttgctttttatggaaactttgactattcttatttttccttaatgagttcgattgtgtcttgataaaatcagatcaaacacacagtttttggcaagtatgaagtccaaatacaagatcagactcgtttttggcaagtttcctt

SEQ ID NO: 159330 - DNA, 788 bp, Cannabis sativa
tcaggctgacaaggaaacccggaggaaagttggcgtggtttctatcagagaatccaaccaacccaagacccaaacttacaccagaagacctttgcgtcgacctctctctggtatcacggaatttcctgaggctgggaataaggtctcggctggaggaaatgagatcttttgatgaggttaatgaggtctatgtagaggttgagaccttctacatgtagacggtctttctcgagctacgtgtagccagtgtttctccaatctatgtgtagacggtctgtcttgtgtttaccaaccctcccatcacattctttgtttaggaagatgacttaatggttttcccctagtggtatttttgtaaagacaagttcataacccaacttgggttttttcttatcttaaatgccctgtactattttcattcgaccttaatacaattgtttttgcttgcgtttttatttacaatgtaaacaactatattttgatcaaatgtaaagtacttttgagtttttccattgttcgcaatcttcctgtttaagtagttggttatctaccaaacttttttttattttcgagcagttgtcaattctgcctcgctatagcagttataatctgccttaagcaaacttaaatatacttcaatgcttttatcactttgtatatttttaattggcttgtatgaatagttagcttatctatccattttctagattcaagtacttttatcaaggcatcgtgatgcctcgtttagcactttcctagctcgcgtgaaccgttaatattaagtttta

SEQ ID NO: 159331 - DNA, 508 bp, Cannabis sativa
gaggatcctaaatagccgccactttgtcaacaatgttacccgatacacaagcttctcattgctcttgtataatagcataacaattagaatcacacaaccaagcattgtaaaaccgaaacaccctcctagaagctgcctggaaccgaaacgatggatacaaaaatagaggacaatgatctgatgtggaaaagaccatgttaatcaacctatcatttagaaacaaactcatccaagaaggtgtagctagcgctctatccagcctcacttcgatccaactgtctgtgcccctactcttctcctaaggtaacggatgacccacaatctcatgatccacaagattacaatcaaagacagtttgttgaaagccatctataagccaattaggataaggattaccacctttctaatcatcttggctaagaatattattgaagtacccaataacacaccacaggagatcattttcttccttcaacaccctcataagattccaagtattgccccgcaa

SEQ ID NO: 159332 - DNA, 524 bp, Cannabis sativa
aaaaaattataacaatactaactttttttttttgaattaataacaatactaacttaatactcaaaatatatatcatactaacaaaattatatatatcactattaaaatatatacatataaaaaattatatataataaaatagaaactaaatatattcataaataaataatatactataaacaacaaaaatcatatatcatacaacaaaacatttatacgtacgataaaaaataaaacaaaataataaaatattattaaaaagaattatatatactatattaacaaatttatatatcacaattatatataataaaataaaaattaaacatgcatgatttaaaataaaataatatactatataaaaaaacttatatgcgtaccatataacaaaacatatataccttacaataaatatatgtaataacaataaataaaaataaaaatgtataaaatactaataaaattatatatcatgtcaataaaagtataatagaaaataaaatttaaatattatttttaaaaaa

SEQ ID NO: 159333 - DNA, 604 bp, Cannabis sativa
aaaaaaaatgataagaaaaaaagaatacaaaaagtttgaaaaaataataaatatatagtagtaatagatttttaattttttgcttaaaagcattaatagaatttaaaatgggctttggggattgggattgaagtgactagtgacaaattgttagccctttcaaaagttaggttcattaaaaaaaatctattgggcattaaatatattaggccctttattttttttttgaccctgtgcagtagcccacattgcacaccattatggtcggtcgtgctgctagggctttaaacacaaaaccccaaattcaaaactcaaagctcactcttcactcaatcaaagctaaagctccaatctcactcgtcactctcacggctcaggctcacgactctcttctctagtctctcgattttccattaaagtcccaaactctcttctcttcaagcatcatttgagaatggaaaattgaaagcgtttcattacaagacagagacaagactagtattggtaagttctttttctttttcttcttcatcatctttttttttttttttttaattttcatctcagatctctatctctctttcaaatttaattttaaagttca

SEQ ID NO: 159334 - DNA, 519 bp, Cannabis sativa
cattgtattcaaataaaataagtcatattgacaaaaatatttttagttttattatttttaatattaaaatttaaattaaagtaacaaaaaaagacaaaagagattttctaacaatgtaatcatcatatattgatttcataatgtaatggggattgcaatacatactgtaatgaccattacaatataaaggcattacaaaactttaaaaatgaaagcaaacaatgtaatggtaataatgattccattacaattcccattacactaaattaaacatgctcatttagaatggtagtgtgcacttttattgcttaaaaatgttggtttagaaacatgactattatgtccttggatggggatatattatttatttttaacttgtcatttcttttataaataacttaaaatgaaactaagtatacataccttgcacattttttttaatttttgttacataatgtttgctttaaattttgcaaaacttatatctttgttccactaaatattctataagtaaataat

SEQ ID NO: 159335 - DNA, 555 bp, Cannabis sativa
  modified_base (53)..(65): a, c, t, g, unknown or other
  modified_base (211)..(221): a, c, t, g, unknown or other
ttaaaataacaaaataaaccaattataaaatagatatggttaggcaattattnnnnnnnnnnnnnaataataaataaataataattattctaattatatgtttaaatatgtcaaattaaatctttttcaaatttctacaaaaatatctaagttatttacatatttaaaatactatttataaatttttgataagtaaaatgatataaaatannnnnnnnnnnacttataatttataaacaattaaacattcctcaaaataatcaattttgaacttgaaaagggaatatactcatttagtaccttgtcttttcatgaaaaacatatttggtaccttgtgttttcaataatactttattggtacctcatatttttaaattgtacatatttggtaccctaaagtaaaatttaatcaattcagttttatcaatttaaccaaatagtttttagttatgtgtaaccaaataattaaatttgaattcagaattcataaaattttagactgttaattgtattgataaaattttatcaaaaaaaatttgaatttagggtaccaaa

SEQ ID NO: 159336 - DNA, 1299 bp, Cannabis sativa
  modified_base (97)..(102): a, c, t, g, unknown or other
  modified_base (1241)..(1264): a, c, t, g, unknown or other
tacaatatggtatcagagcaatacggtcctaaagaatgtggttagccctagcatgtaaagttcattgccacaagacgagctcgactcactgtactgnnnnnnttattacttacgattaagttgcctctaaattgttcatgtagtgttgttattttcttctcatatgaaggtgatggttaaaatgttgcttcttgatatttttgaggtttgtgaggtttaggagtttgaatatgcttcctagaaggtcagtcagattgggtcgaggttggggtcgaggccaaggccgagatagaggccaagaaaatggagggatcaatgaaccaccacaagcaccacagggatgggaagagcgtcttgccacactggaagaaactattagtagatagaatgaagaacttcgttagctgagacatcaatcggagcctccagttcaaataaggctatgagagctagaaaatttgagacccaccagctgcggtggtatttcctgctgcagaggctagacatgacatgttagcagagagatttcaaaaacaatacccacctgagtttaagggaggcatagacccagtgctggctgaagagtggatgagttgcatagaaagaattttacagatgctaagggtcgatgggaatgaccgtgtgaagtgtgcatcatacatgctgaggaaagatgcttgtatctggtgagaggtggtcaaacgaacaaaggatgtaaataccatgaactgtgatgatttcaaaagggtttttaatgagaaatattataactcagcagttctagcagcaaaggttgatgaatttactggattagcccaagggagccttactgttacagagtatgcacggaaatttgataaactagcaaaattcgctccagatttggtacctactgatagagtgcgagcacatcgatttgtggaaggcctgaaaccaataatttctcgagatgtagagattgtgtcaaggggtcaattcagttatgctcaagttgtcgaaatggctcttatggctgagggaagtgaaaaaaaaaattggaaggaatatgctgctaagagggaatctaagtaaggtggagccaattctaatgaccacaagaaaaggcgacaagatcagcccggatagtcaagtcaagacaagaggtacaagactgacaacgaccaccgatcaaataaaaacaatggacgcaaccttccagaatgtcctaaatgtaccaaacgtcatctcggagagtgtagggnnnnnnnnnnnnnnnnnnnnnnnnaagaaggtcatattaaacgtaattgtccattgtgg

SEQ ID NO: 159337 - DNA, 506 bp, Cannabis sativa
  modified_base (418)..(457): a, c, t, g, unknown or other
ttgggtctgtcccagttgatttgttacctgatttggtaactgaattcaatggttaataaaatgatgattttccattcaaaaaaaacttcagaccagctccaaaccatcaaggtttttgaagaaaaggaaagaattttttttttttgtttatggttagtttttcttgtggtgtgggtcgactaacctaagggaaaagacaagcatttagtcatataaaacttctaactaattctagtatatcacttgctatcaacaaaatgatagccaaaagactatgatgtctctaaataactaagtcttaaaataaaaactaaggatataattaccttttctataatatccaaaataaataaataatttctagttattcgcagctaatttccctatattgttaatgttgaaatttattttaccaggnnnnnnnnnnnnnnnnnnnnnnnnnnnnnnnnnnnnnnnnatatgaactttttaaaacgataaagtaaacacacataaagttaagaaaa

SEQ ID NO: 159338 - DNA, 701 bp, Cannabis sativa
cacctcgcggagatgctttgatgttacttaggcttccgggagcatagggggctccgtatgccttctccgggaggcacgtcccagatgctgtcttctttcacaaagtcttatcaaataattcaagtattaagatgttttgatccacgtgtccctgtccggttggtccacatgtattgggcaaaatcaggggcaacattatgtgttttttaaaaaaataattaatttaagatagatatttttatagaaaatctattaaaataatagtaaaatattaatttgtaaatttatgttttaataaaatattaaaaaattaagagaattaaggagaaaaaaaatagctttcgagagattttagaccgccacgtcaccgcctcatacttcttctttatatatatagatttaattttgaaatttatttttcattttatttatttaatcaaaatttgtagaatgtgacattaaaatataccaatgattatatatcactttttattttactcactttaaaattttgttggaaaaaataaagctaagcaaaatgtttgaaaaaaaaatttatatttgctatgaaaatttgtattgaatcatcactttgttgacttcgcttttagccaacgacaatgagtcttttttataagcgataaacgatatgtcgtaatgagaatatataataaagcaataacaagacacagaaattttat

SEQ ID NO: 159339 - DNA, 608 bp, Cannabis sativa
  modified_base (118)..(120): a, c, t, g, unknown or other
tttctatttaaaatttcatgattaaaataatcttattttaaatttcaaattaggtcaatttattaaaaaaaaataatttaaatatctgaacttaagtttaaaaataagataaaataannnaattttaaaaataagataattaattaagcaagaagatagatttttacctattatcaaattcaaattttataaatatcttaaattaatttaaaaaaatattaattaatttaattctgataattagatttgaaatttgaaaaagtaaaaatcaaaatacaaaaatacacaaaaaattcgaaattaatttcatgaaaaagcatgaaaaaaaaaatagaaaaaaatgcatttggcgcggatggtatgcataccatccgcgcgtgcacaaggaggatctggctgagaaaatatggccctggaggctgcacgcaatctttttgcgcgcggataggggaattcggacaaccccgtgcatgtttcttcggacacgcagtgtcagaagacgcatctgaccgagtgaaactcggtgtccgcacacgtgtgtggtgcacacgatttctgattttttttcaaattttcaaaaaatgataaataattcaaataaaatcgaa

SEQ ID NO: 159340 - DNA, 522 bp, Cannabis sativa
tctctttttttatatatatatatttctgacaattttaaaccgtcgggaagtccacattagcgggggtttttaacgttgcctattttgcttgttttgcgatggtcgtataggcgacggttatagaaaccaacgggaatactttcaatgactgtttaaaaatatcgggaaaaactatttttgtagtagtgagtagatgggttttggggtcttgttcaatttagaagaagaagaaagaaaaagaaaaggcaaaaggcaaaaggaaaaaggaaagaaaaataaactatttttttataatttatttatttttcttatttttaaattatttttataatattttaataaataaaattatgtggaccactaaaaaatgtcatatgttcatttgtgtacacgcagacagtccactgtggcacttaacagaaaatatttggacggaagtgtaatgatcaaaacaaattcagagtttagtaggttttaccgtcaaaattttaatttttgtggttaagtgttaaaaaatataaa

SEQ ID NO: 159341 - DNA, 585 bp, Cannabis sativa
  modified_base (291)..(295): a, c, t, g, unknown or other
aacacctcgatatacaaatcaagtgtagtagtagtaaactcctcgtaataggttctgaaaggttgaattaaccacaaccttttctccaccactactcttcctcaattacaaaatgcttgataatgtgaaattcctctctataaatcaaaatgtaattatgttactgcaaaactcagtcttgcagaaacaaactaaaatgatcagaacaataaactcagcagaattaaaaataacagcagaaaataaaatcacttgacccaagagatttgtacgcagtatcagtgttctttnnnnnactcctagtccacggggccacgcttaaagaaaaaaatccattagtaaactttcaaaaattacaaagacaattgacttatacaagtttagactccctctaaatctttgtcgcaatcctttgtaacacacttcacgaatgtaatttttgaaccaccatcaagcagcgaactcccttcgtcattgaggtgtgagtgcttacttcctcccaaagtaaggcttgaataagtcctctctcgaagacatttctcttgttcaatcaagttgttgaaactgaccctaagaccagtgtaa

SEQ ID NO: 159342 - DNA, 524 bp, Cannabis sativa
ttacttatgtcctttttcacaggagcaggttccttgtacagttttattgactgagtggccatgtagatggtctccagatcgtcagtcaggatagaaaaagaagtgaacttggaaggattctctctacaagtttgttcggcttttcctgtaaactttccctttttccattgccttgtcttttgttgttattagatcttttaccgcccgaatttacactactagggtattggggttttagacggtcattgcagccgaaggagcttgtggttcccccggtcttggctcaacatctgcccgcggaatggcttcatcaagcttgatgaaaccatctactcggtcgaggaaatcactcataaagtctataggaccgcacttcgtgatgtctttccacagctctccaagaatttcgatgccccccactatggcatctaacttcccttctttagttaaacacgctacttttgtggcctccgtcatgaatctacttatgtaagctcggagaggctctcctggtctttgcttca

SEQ ID NO: 159343 - DNA, 552 bp, Cannabis sativa
ttcttttgttattttttacaattctattcaataatggtgaatactattttggatcttgcaaaagttattgattagattttttattttgttaactgataaaataaatttgtattttttgaaattctaaagatagaactttgagttcgattttcataatttatttttttaatataatcaatttgaaaataatttttaaaatataattaattttgtcataatatattttgatcggataattattaaattttattttgattaaaaatagtttagggtcttatttatactatgggaaatacaattagtattttttgtaaaatacagaattttaaattggtaattatcttaaaataaacttttttttaaagaaaaacgtagatatattagagtcataaatagttagacctcatggtcattacaaaataattgttctgggatagaagtagtcgggatacaattgaaccttttgtgggtaaacgtccacttagccacattatgggtaggttacaatttctactaatattcgaaaagatacaactaacaaaataaggagag

SEQ ID NO: 159344 - DNA, 782 bp, Cannabis sativa
tcccacgtattacctccatatttcgttcgatctaatctttgaacattttgtttaccaatcttaggtaggtagccccagcgctctttagaccaaatggcatgaccttataacagtatagacccatatctgttcgaaaacttgtatgttcttggtctggtggatgccttttgatttgattataccccgaatatgcgtccctaaagcttaggatctcgtgcccggctgttgcatccatgagctgatctattgttggaagtggaaaacagtcttcggggcacgccttgttgaggtcggtgaaatcaatacgtactcattttttgttgggcttgggttttagtatagggttagctacccaggctgggtagaaagcctcaatgatgaagttgttattgcgtagcttttctacctcttcttttaatgcttgtgcccgttctttgtccaacaatcttcttttttgctgaacgggatggaagttcgaatcaatgtttagggcgtgtgaaattatagaaggatcgatactgaccatgtcttcatgcgaccaggcaaaaatgtctaggtttgcttttagaaattttatcaaaggtgattttacttcaagcagcaaacctttgccaattttgagtttcctggtcaggacatttgggtcgatttctatctcttccaattcttccactggcccaacatttgtatttggttccccaagtcggggatccacttcttagtcaccgccttgggcgactccctatttgacaatgcttttccccctgtcctaactctgtcca

SEQ ID NO: 159345 - DNA, 687 bp, Cannabis sativa
  modified_base (366)..(372): a, c, t, g, unknown or other
accaaagaagtgcaaagcttgattggtcggatcaccgcactcagcagatttatttcaaaatcaacagataagtatgtcccattcttcaatatcctatgaagaaagaagcagtttcagtggacggaggaatgtgaaaaagctttccaagagctaaaagcacaacttgcaaaacctcatgtactttcaaaacctctagacggagaagaacttggaatatacttagctgtcacggaacatgtcgtgagtgccatgctaatcagagaagagaacagcgtacaacacctggtttattacattagtaaaagactcattgaggccgaaggccgatatccgttgatagagaaactcgcttactgccttattctnnnnnnnagaaagttaaggccttattttcaagctcatcttgttcgggtatacactgaccaaccattacgccaaatactgcaaaagccagatgcctctggacggctactcaagtgggcgatagagttggaccaatacgaaattactttccagccccgaacagcaatcaaaggccaagccttagcagaatttgtggtagaatgcacaggcaagaaagaaagtgtaccagaacaaccccaagccagtacaaacacctcagccaagttacaatgaagataagccgacctggaaactacatgtagatgggtcagctacagatcagct

SEQ ID NO: 159346 - DNA, 571 bp, Cannabis sativa
aaatagagacaagatgtgttatatgggtcacagacggtacttgcctacaaatcatcctgatagacggaagaagaaagcatttgatggtactgaagagggagatatgtctcatttgccactatcaggggaataaattctccaacaagtagaacttgtagattttaagtatgaaaagacgtgaaaaaataagaaatcaaattgttgttttcaaagaaagccaatcttttttcatcttccatattggaaaagtttactggtttgacattgtttggatgtcatgcatattgaaaaaaaaaatgtgtgtgagagtattatcggtatcttacttgatattctcggtaaaactaaggatgatttaaatactcgtttagatctcgttgaaatgggtatacgacaatctctagcacttgagaagaaaggtggacgattatatttgcctcctgcttatttcactttgtccaaaaaagaaaaacaaatagtttgtaaatcattttcaaatatgaaagtgcctaatgattactcgtctaacatcaaaaacttggtaaatgaggctgaattgaaactaataggt

SEQ ID NO: 159347 - DNA, 538 bp, Cannabis sativa
aacattcacaacctgctaccctctactatgacaaccaagcttccatacacatctatgagaattttgtcttccatgaacgcaccaaacacattgacattgactgtcacattgtttgggaacaaatcatcaaactctcccaggtttcttctcggaacatcatagcagacatcatgacaaaagccctcttcacaacacaattcaacacattattgtccaagatgagtgtcaccaacctcaacacctcatcttgagggggagtgttagaaaccatgagtgagtatgtgagggtgcactctgtttcctctgcactctactgcagcatagtttaattccttgcagctgacaggttgttattattcaatcattgctgagggaatattctttcccttttcggttatgcattgttttctgtgtatgacacttgtcactattgtattggaaatgccaatttaatgcaaagttttgcctcagtctcaaattgagctgataaatccattgctgcattttctctaaaacttaacttggtatcagagccaat

SEQ ID NO: 159348 - DNA, 526 bp, Cannabis sativa
aaaggctttgttaagcttgtggataaacatatttatttgttgattgtcactgccagtgactatgatatcgtcgacgtacacaagcaccataagcactagcttcggttgttgaagcataaataggcaggtatcagctcttgagtttatgaatccccaattgacaagtgtttgcttcaacttatcataccaggacctaggtgtttgtctcagcccatatatagatcttttcaatttacaaacatagcaaggtttggacgggtcctcaaagcccggtggctgcaccatgtacacatcttcttcaagtgtaccattcaagaaggcgttattgatgtcgatttgccttatttcccagcctcttgttacggctaaagtcagaactactcgcactgtagaggcttttattactgggctgaacgtctctttaaaatccactcctggtctttggtggaagcctttccccactaatctatctttgaatttttgaaagctgccatctgcattatattttattttaaaaacccactta

SEQ ID NO: 159349 - DNA, 716 bp, Cannabis sativa
aatattatgataataacaatactacaaggtggtatgcttttttttttttttttaattgttgtaagagtattataatagcaattattgttattaagtattaataatatttatcattacaataaagtaatttttgtaaataaataataatattttataataatttaaattaaattatatattcaatatttaattctttaaggttttgattgagaaattttaaaatgagtacttaatattcttctaagttaagaattatcatggtgttatggtagaagcattcaagaagagaaagattgaatgtgttcaatccgaaattgttgagataataggcattaaagaagcattgatttggattgcaactcattcgtgaggatagagtcatgttagaaacagatagattgatgtgtatccaagcgatttagagtggtattttatatcttcacaatttgtgttttgtaaaatggtctgcaaataagttgactcattgcttggtaagaaatttttatttttctagtgcgaacgaatttattaattaataaattttatgaattttatttaaaaaaaattaaaaaaaataactacttataaaatgttgacctcatattgatatgggatattggcggctaaaccacctaaactttacggtttgtaacacttaaccaccaaaactgaatttttggcggctaaactacctaaactctggttccgttttgctc

SEQ ID NO: 159350 - DNA, 531 bp, Cannabis sativa
caaattcatcattatctgctttttggttttcttgttgttgatgtgttggtgttccccctgattgagttccatattcaagcatgtggacttcattttctttgtcaacctctgtaaaaaaaggaatttgtgatgttgttgttgtgttggggagtatatttatgcacaaaggatgttttgtcaggtctcgttctgttgatttcaactgcaagtaaaactccaggctttcatcatctgtgatctttaatgctggatatcaagactgtatctgaaactacatttgtagggtacttgaatttctattgcagttatgttttttcatcagtctgtccactagttctgtatacttgcaatttttttggatgcatattccaatagcttcaaaatcagtgtactggttgttctcatcccaatgtccattgctttgaactagtacaagtattgatgttattttgtctgcaattcaacagtatgtccattaaattctatttttaatgtaggataacagttaagcaacaataattaaacaataaa

SEQ ID NO: 159351 - DNA, 613 bp, Cannabis sativa
aatgagataattatcctcgcaccattaatatcccaaaaaaaattaaatactattttaatcttgatattacatcgccgcacaacgcatcagagaagtccagatgagctgtttgaatccaaaccaccttaccaagatggtctctagcaacaactgcagtgcacattttttttaaattaaacttaatacttattttgaggttgttagttgtacttactagatttaatgtaatttacttttaatttaacatgattttaggtggtgtttggttggatgtaatgaaatggaatggaatggaataccattccttactttcaatttactttcaatttaacaatttccattccattcctttgtctagttgcatttaaaactattggaataccattccgataaaattgtctttccatcattttggtagaatgactatttcattttaaaatagaagaaaaaaccattccaatgcaagatttgaaaaattttaataattttttttatacattttaattgtattccaattctcattcacatttgttgtgaaaattgtgtacgcaagtatacgcaatcgtaacaagtaataaagtgataaatcgagtatcgtctccacagggattga

SEQ ID NO: 159352 - DNA, 673 bp, Cannabis sativa
aaatttggaaaaatttaacacgtctaagataagattcaaaaagtgtgttgtacgcgtaactattttattttatacgagtgtgaaatagattgttttgaacacgactttgtatattgtaaattatttcgatttttttcaaaattttgtaggataacttaaataactataacgtaaacgaatataaaaaaaaaaactaaaaaattcttctggatgccgaaataggtaagggtgcatcagtacattcattttaagggggtgcattatagaatcaccttatttttttttgaatgcaaattggaattttattaatttgctaaatcagccaaaagacaagactgtaattcagtaggaacatccctcccactgaaaactccatctggaaaagaatatgacgctctagcaaagctgtgcgcagtcatattagcagatcgtttaataaaaaaacaaagaaatattgtttaaaatagatagaagcttttgacagtccatcatcactcccccaagaggcgaaaccatggtgatgttacttcgaatagcttggacaattgagagacaatcacactcgagttcaacattatgttattcatgatccttgatccaacttaacgcctctttaatggctaaagcttcagccatgtctggtgctattgtaccactgccaaagaaccaaaag

SEQ ID NO: 159353 - DNA, 644 bp, Cannabis sativa
  modified_base (443)..(445): a, c, t, g, unknown or other
attatatatatttaaaaataaaaattatgtacaaatttatataaataaatttagatttaaatttaaaatactaaaaatatagtaaatatttttatctatatttttaagtttattgaaataactttaaattaaaataagagaaaattctgcttaatcagacacattacgattcaccacgatattttacttggattttcttgttcatataaaatatgtatatatatataatcgcatctcaatggtgcaccaatgtaaccgcaatagctaaaaaaaatcttcaaagatctgaatcacaaaccctattttaaaaattaaaaaaaaatacattatctaattaaaaaaaattaaacatatatatatatatatatatatattacacttagaaatatcaacctagtatatgtgcattgcaagaaatatcaacctagtatatatatatatannnatatatatatatattaatattataaatttactattttagctaatgaacaacacatgttaacatattattggaccgccaattaaatatttaatttttttttatttaaaaagttttaaaaataaattttgttaattctatttttggcatatttaattgacaaaaatattttattatttcctattaatttcggctggtatgt

SEQ ID NO: 159354 - DNA, 603 bp, Cannabis sativa
ccccagccttcctggatttgacgatcatgtcatccacgtacacttccatatttcgtcccatctgttctttgaacattttatttaccaatctttggtatgttgctctggcaatcttgagaccaaatggcatgaccttataataatacagacccatatctgttcgtaaacttgtatgttcttggtctggtgggtgcatattgatttgattgtaccttaaataggcgtccattaagcttagtatctcgtgttctgctgttgcatccacatgttaatctattcttggaagtggaaagcagttctttgggcatgccttgttgaggtcggtgaattcaatacatactcaccactttctgttcagcttgggtactagtacgggattagtcacccaggctgggtagaaggcttcaattatgaaattgtttttgcgcagcttttcttcctcttcttttagtgttagggctcattccttgtccaacaatcttcttttttgttgaataggctagaaattaggatcaatattcaggacgtgtgagatcatagaaggataaatttcgatcatatcctcatgtgaccatgcaaaaatgtcaaggtttgctctcaaaa

SEQ ID NO: 159355 - DNA, 581 bp, Cannabis sativa
cgagatgggtccgagccacaattcccaaacgggtaccactatcagaaatttgagattttcactattttgattaaaatgattgttagttcatgaaaactactttatctctgaatgtgtcccatagaaaaatgatgcacaacggtcttggcttcatccttgtgaaattttatgattattcgagatgtgtagggtgagattttaacagaacactaacgagtgtaagagtaaagaaagaacttgttaaaatttaccctgtaaagaataatattttaaatttttgaattaaggggccattttcacaaaattttacgtgaaagcaatcttcatatttaccctaaccctaaaaccccaaaccctaaaacctaaacaccaaacccagacttaaaacctcataccccaaatacttggtccaatatcctaaaccctagaccctagtcataaaaccccaaaccctaaacctcaaacacaaaaaccccaaaatccaaagactctaaacaccaaaacccaaacccctaatccaaaaccccaaaaccctaaatccaaaacataaaaaccccaaaccccaaactcaaaaccccaaa

SEQ ID NO: 159356 - DNA, 884 bp, Cannabis sativa
caactgatgtggagtttgatcgtcaaaaggtgtttgggtatctcactagtaataatgatgtggaactctctgacacaatgcatatgtctcaacttacctatcaccatgccgctcttatgaggtttgccatatccaattggtttctttgttcaaatccggtaaatgttttaaacgaacatgccttctttttgcataaagtttctattggtgctaaaattgatttggctgacatgatttgggagaatattgtctctcttagaaagggcaagaaacctagactcaatcttatttttcctcacttgatttgtaagactttgtctaacaaagaggagttgattcttgagaatgaaaccatagaaatgcctgctgttggtaccactttcaaagttccaaaaaaacctcctcaaggaaaatctgctaagaaaaaagctcggtctgcttcccgcggtgctactaatgaacctgctgctgcatctgcctccacttctgcttctacaaaattggtagaattcaacttgcgtttgggaagaatggagacaaatcaagccttacttcttaggaggatggacatcatcatgaaattcttcctatccaatgatgatgaataagtggtccattttttatcttttgctttttatttttgtattttgaaccattatgactttgttcacgtttttttgttatctttgcctccttgatagacaaaaagggggagtagtatttatttttcggattgtttgttacaactctggaccgttattttacggggagttgttttatttgtggtttgtgtacttttccgtttaaaaagttgctttgtttgtggtttgtacacttttccattttaaaagttattttgtttttttgtgttagaatgctttcat

SEQ ID NO: 159357 - DNA, 639 bp, Cannabis sativa
  modified_base (53)..(58): a, c, t, g, unknown or other
taatcttttattgattacaaatcaaattgtattgaaatgggttttatttaggnnnnnnaatcccaacaaactcccacttgcaataacataaaacaaatagttcatttcaatcaatcaatgctgttgatatccagatcaagtgtaggatatttgactaaacctaaattactggaactgtaagtttgtggtaagctagtgctttctccaccattacttcctttgtgctcataaaacattatgcaacatcatttttaactatatgcattactgatctacagaaacttaattctttactacttgtgaagtgcatctgaatatacataatatatatctctaattctttccaaaagggaatagagataacacagtgtagaattttcttcggttgaataactttccagcgttttcgaaacaacaaagttatttatcttcactgatagagcttaaattattatagatgggtttttacatctttctagaataattcctccacccctagagtaaccaccgtctctaataggttatgagttggtgtagatataaggactctaagatacgcccctattatctaacatctaggtcactttcagaaatctttcttgactgtctcctaatgttccttgtttgattacatcttag

SEQ ID NO: 159358 - DNA, 687 bp, Cannabis sativa
tggtatagtcaattggcaagataagtgatcctttttgtgttcatgacttctactttaataacttttctacttttaacatataagtatttcaaattttttaagttcttatatttaatatggattgatttaccatcattcttttacattatctttttttattatattatgtggtaatagagttttatttttattttgtagattattttgtggagggcctacaattacagaaaatttacccataactttcattttaaatataatttgtttgacttgatgttttatatttagggtgcttgaatgtagttattagccaaagggttatacctttggctagtttttctaagaaattttgttgattttagtttcttattaatgttgagcaagtgatatgagcagtgtgttaatttctaagtttgtatattgattttattttgaaaattttaattctaatataactgtgttttttggtttggtgttgcaatactgtttcattttcggtagctctataaacaactattaaaatgggaaggtgttttttcaatgtgatgtagtgacgttttgaagacattatagctttattatctaaatttctgggactggagcagtgttgtcccatgtgactcgggataagaattatgtagcgcatgttagactatatatatagtgtatgtaatatagcatatacaa

SEQ ID NO: 159359 - DNA, 544 bp, Cannabis sativa
aaacctagttgaacactctaggttcttacaaaagaaacactcttctcacaaagaaagatatgaaaatatgagactagaagagataaaatcgtttggttactctgtaggccctatttatagaacatagcaaccctagagacagcatcaaaaatgatttcccaggtgtacaaaactttttaaaaaaatttcctaatttgcagcatcagaatcgggctctgcaacaatagatcaagactagaaagaaaactttctaaaatggaccaagatcacgaatttggacttcaaacttgccaaataaagtttatttgatctgttctaatcatagcaaaactgaaatcatcaatttgaaaaagggaaagtcaaatttttccaaagttagacaactttctataagagaattccttctcttacaagaagtttcctaaaccaaaagggactagttgacaaagaatctttcattagaagaaaagagtaattagagggataaaattaatgtaataaaaataatttaaatgctcaataaaaatgtacattaattaaaaaa

SEQ ID NO: 159360 - DNA, 525 bp, Cannabis sativa
tctccatatgtgtgtatattaaataaaaacataaaataataagttaagaacatatacctcttgaatactattaaggtatcctcaaaacttctcgtatgatgtatcctttaatcctgatgatgcggatgatacaattgaactcacactagcgtcttccaaattgatccaccatacacaaggaataattgggctattaggataaagtgtataatgttattcttgttgagttctcaataaatgagcaagaacaattaagagagaaaataattttctttttctccctaggtaattttgaaaatcactaatgaaaatcattctctcatttctcaaatcaggctgctatttataatagttcaatccctattaattaaattatatttaattatttaaataaataaatatctataactgaattcagttactaatatttatgaggaaatctctcaactacttgagagaatatctcagaacaatatttatctgattaaattaattaaataattaattaacccaaaacgataaact

SEQ ID NO: 159361 - DNA, 713 bp, Cannabis sativa
ttatccttgaaggatgtcttattttgcaaatccacaatgattttaggctcgcctgagtgagtgccaagataataaaagcctcatgcagcatttttgctcactggaacggctttaacagagtaaagatactctattttcacgggagtggggcacccccacttcaagattttgtacgaaaccctcagacttgcaaagattctgtaggagacgagatttagttggaatgggtcaagcccgaggtggtttgcaaagtccttgaaataatcacgaagggggattattgcccctgccctgatgtgctcaaggctccaagcgcctatgccagttgagccacttgccccctcagaggtctcgcatgtaagacacacaggtgggtaacaactaaatttgccagtttacactgacctaactcggcattcttgcccatactcgattccataggtcctcagtgaatcgcctacgtagtctgagatagtcgcaccctcgactcaattaactctgccttgaaggtgacgttagggtcatggggagtctttgatttacgtggcttgggagacattattttaaagtccatgtcacctggttcaaaagcaatagtaactttgggtaaaaacagacgtctagctaaaggaatagaggacacactgggaggttcaggacaagcagcatctcgcaagaaacgtagttttccttcagtaatttcttgcaagaag

SEQ ID NO: 159362 - DNA, 619 bp, Cannabis sativa
aggagaaggcataccccacttctaggaagcgtagaggacgaagagggcagacagatatttaatgctcttaggagtgatctgggctgggcaaaggccaaaaaagtccgccacattcttaaaatattgatgcaaaggtatcaatgccccttgttgggcatgggcacccgaccaggcgtgcatcgccctttcagggtttgtggcacgattgttgtggccaggaatgttgcagtctaatttgtcgaggtatctgccctggtcgagagtcttaaggcgagcctcagtaacccttgacgaaggggttacccacctggcgcctaaggcaccttgccttctatgaggaaccgcaacagtaagctcctcactaacatagtccacgccctcaactaggacgtctccgtcagcatcgactggctccccagcctcattgtactccccgtagtttgggggttcaattcctgttcggcgctgggcaaagtcgcgtgccgagccacggggggatgagacgcgtcacccaaacgcgttgtgtacgagccatcattctatggctgggtataagatttggagaatgtccttcactagaagaaggtgggctaggacgaagacgaggatgatcctcgtg

SEQ ID NO: 159363 - DNA, 690 bp, Cannabis sativa
acactggccttgattgtacatatcttgacggtcttcagtggacaacctggtggctctgataccaaactgtaatacctgcattttaaatttactagactcaaaagataactttaatatattatatctttataactatatggatcgggatcccatgtatcaaaatacaattacaaagcattttactaatatgtacatataatatgtttttttttgactcgctagcatgcaacatcaaaatacagactccaaaatagtagaagaccgaaaccctccaggttgcactgccgcgatatgtacaatcactaccgagctctatctcactgttcctccagctttgcttttcctttacctacataaggtagcaaactgatgagtcaatagactcagtaagatatgcaagatatataaataaaaataatgcgatgccggctttatgattaagccgccctaagctcaataattaagctcaccaaatggataagaacattcttaagggaagtatgaccactgtaccaaatgcactaaagtaccaaccttgtactcgtgttggtaggaccataactgtactcccggaagctactaagtgttgcactacatgcacgatgtacccctggtactcgtgttggtaacaccgtaaccacatttataaacaacactatactaacactctataaatcacatttaaactag

SEQ ID NO: 159364 - DNA, 542 bp, Cannabis sativa
agatatgtgtgggtgcccatatgcctgatgcatggggcgcattattttgtactcacttctcttctcttctcattaccctcattatgtctaaaatacccttttcttttttctctcttgctatgtaaaaaaactaggaaagatttggctactatttttttttaatatcatattaacattgaatcaaaataaaattagggtaattttatagtgtgcaattttaaaagaattcattcaatatattttagtattttttttaatttattttttatgatcacgaatgttgtaattttttaggactatttataaaatttttaaataattttgaatagtttatattgttaaaaataaaatttaaatattgtattgcatgtgtgtattttttttatacaagtggtaaacagcttgttatagctgaaattcggctagcactttagaggatgacacgtgtcaaactgggagaacacgaaccaacaaatataatgatatttatattataaaatggaacaactcattaaatgtaaaattaatagagtatatttata

SEQ ID NO: 159365 - DNA, 503 bp, Cannabis sativa
taacatgtactaaattatgctctctgaatttttgtcgttaaaaattcttgttgaactattgagattgttagatttagggatttttgttcaattttaataaaaaaagtataacatggataaaagtttaggaggtatgatttgacacatgtcaaagttcgaagagcgtgatttggtagaaattaaaatttggagagcatgatttagtacataaacaatcactaaattagtacaattgaatgaaattggacaaaagtccttaaatttgataatctcattggttcagggaaatttttaacgattagaaaagttgggtgatacatagtagaaaactccatactagtagctttttaacgtgtagattaatgatattaatattttaaagtggaattatttcatagggtgattctacaatgcactcccttaaaagagatgtactgatgcactcttgacttgtttcggcatccaaaaaaatattttagtttaatttttttcatattcgtgta

SEQ ID NO: 159366 - DNA, 547 bp, Cannabis sativa
tgttgacaccatatggcagatcaaaaacgataaggtacataataactgtctgcttgatgtgattaagtgtattgatagtattcgctcttcttttgaagtttaccatgcttctttgttcccttgctcacctccgagcttggtggttgcctgacgccctccccctcaagactggataaagctgaactgtgatgttaaagtgttgttggacactatgtgtactgctgttgttgcaagggatcatcttggcaaggtgatatgggttcatacttctagattggagtttgctgatgcgttatgtggagaagtggcgacttgctgcactgcgctggatgttgcaaagaatcatggctttaagcttattatagttgagagtgattttgaaggtagttatcaatgctcttaagaggattgagttcaggtgggagcttgagaactatgttactttttgtattagatcctctccctcttttattagctgtattttctatagggaaattatagtaaatggccccaaatcataggactatgttagtttatgtcctcattt

SEQ ID NO: 159367 - DNA, 558 bp, Cannabis sativa
tataaccatctcagatcagaagaagaaccaaagcaatacccttttgtctctctggtaattttggtagttgtgctttcctagtgtatctttaattatatattaaaacacaataattaaaaagaaaagaggccttgattgtcccatccccaaaacgtgcttaggattctattggctcttctctatcctttctcttattattttgaaatctctggtgttcatctctcttttacactctatctcaagattctcgaaagaaaaaaacctatgtcttcttagaggtttttttttgctatattattagttttcaattttaaaaattgtgttttcaaaaatgagaaaagaaaatatttttttgtcatgttaaaaatttaatggtgtttagcttatttttttaaaactatttttagacttttttaagaataaattttttttaataatactataccacgacatgaacccatcccacctcgttacggactttcgactcggactcggacctagagtcacgcctcacactagagacctggaccccgaatctgaacctgaacctgaactcaa

SEQ ID NO: 159368 - DNA, 553 bp, Cannabis sativa
tttacagaattctttgttttgaattttaataaacatgtttattattaataatttttaaaacattaatataataaacataatgataaaatattacaaaataatactagaagcattaattacagttttctatttatggtaatattagtttaattattaatgatttatattatttaatgattaaaatgtatgattttatgtaataaattttcaaaatgtataagtttttcaaatattttttttttgcatattttttgtaattatttcatttttgttgtacatttatgaaaaaagcccaaaatttaatggtgtttggttcacgtttttcaaaactatttgtagatttttttactaaaaaaaattaatattctacactatactatgtcggggttggggtccgggtttgggtctgggtcgggttcggaatcggggtccgggttcaggtacaaaatacgaggtctagggttcgggtcaggtccggggtctgggtcaggtcagattggggtttgagttcggattcgagttcgggtttgggtttggggtccgagttcgggtt

SEQ ID NO: 159369 - DNA, 508 bp, Cannabis sativa
  modified_base (463)..(466): a, c, t, g, unknown or other
aaaagtgaattggagttgaaagggtttgcggacgctaactatgcttcaaatacatatacgagaaaatcacactttttacgttttcatgacaaacttgaactgtatatgctggaaggcacagttacagttggttgccctttccaccgcgtaagtagaatttgggaaattctatttgaattgaaacaaataaaaggtggagtgattgtgtactcgaatagccagtcatccattcatctttgcgagaattcgatttatcatgaaaagagcaaacacataaaaataagactttattgaattagagggaagatagagaaagaattggttgaattagaaaagatcataactgaaattttgtattttaatattccagttttattatttaattaaatgcaagataatgaaactgataatgaaacagtttttctatagctacagaaaacaactctgtaactccagaagaaannnnaaaaacaaacagtacataaaagtaaaaacacacaagattttt

SEQ ID NO: 159370 - DNA, 510 bp, Cannabis sativa
  modified_base (409)..(422): a, c, t, g, unknown or other
agacctatttgttattgtaatgtgatttacaagcttgcaacaaagatgataagctcgcgtgagaactaacttgcctaatctaattgatcagatcaaggaagatttgtacataggagattcttagcctataacatcatggtatatcaagatttaatacaacaccatgagaggaagaactcaaaggcaaattgtatgcttaatactgaatttgaagaaggcataatgacaccaatgaatgagattttttggaggagatgatgatacccttttatttttcaaaagatttcatctaattcattatggtatgcattagaactctaaaatctagtttgctttttaatgttcactttatagtttcttttaatctaagaagggccttcaaaaatgttgttggatatattttaccagnnnnnnnnnnnnnnaacaagtatgtttcattaacatctgaatatgaattctaaaacaatgaaataaacacgtataaagttaagtaaaccttacattgggtgc

SEQ ID NO: 159371 - DNA, 567 bp, Cannabis sativa
ctcgagcgtgttgtttgcgtactaggaccaacgtcaggttgggtcctccgagaacgtgtgttccgtgtgctggggccaccctcaagttgagtcaacctggaacgggtggtccgtctggaccgcaggttagtagaccttttggagcccatgggctctttccaagaacgatgattagtttcgtcatgtgggatattaacatcttctggattttcaataatgatcgaggtggtttttcttcaaaagaagggagggtttttctgagcttttttacagaggctctcaatgaaagtaccaaactgttaacgcagattttcgttaccaaatttgagcctaacaataatgatttcacatagaaaaagtaaaagctataaaagtaaaagtatgaacacatggtttttttacgtggttttgcagttaaaattttgcatagtccacgagtaaatcttattcagatttctgattatttttagggcttcttttgtatgagtttttccgtcccttttttgatcttgtttgctactatttataattacatagtgaccagttaattacaaagttgaccgtaat

SEQ ID NO: 159372 - DNA, 509 bp, Cannabis sativa
caaggcattttacataccacacagtagggaattggttcgactgctgagaattattttcaaaatatattctctactgctggttttgatgttgaagcagtacaacacgtttttcacacagtgttgtgcaccatatcagctgatattaacagttcattactggcgccatacactcgtgaggatgtttttaatgctttatcttctatgggcgatgatagcagccctgggctagacggtatgtcggtcatgttttacactaattattggcatattgtgggtgatttggtgtctcaaactgtccttgaagtgctgaacaatggtgcggatccttcttgcttcaatcaaactctaattactttgatcctaaagtcaagaagccgaattcaatgtctcaactacgccccatcagcctatgtaatgtgctgtacaaattagtttctaaagcaattgtgattcgaataaaaccttatctgtcaatggttatatccgaatctcaaagtgctttcctccaa

SEQ ID NO: 159373 - DNA, 634 bp, Cannabis sativa
tgatgctttgataattaagaggtgaatgacctctttttttgggatgccatttaatttgttatggctttgaattttagtgcactatttaatttttttaggtaagattaccatttttgagatttttttgaggttaatgacctctttgaaattttgtgaggtgaatgacctctttaatattctaagattaattttgatgagctcatttgaaattttgtagcattttgtatggatttagaattttaccattttttgtgatgaatttgtatcttgaaattcttttattattatttaaaaaaaataataaataaaataaaagaattattgactgatatattaattaatcattccacaatttaggagggataattttttttatcaatctataatatctccaatttggttgaattttggattcaaattttatcgtgtatttgaattggagcatcatgaaatatcatatgatatatcatattttagagaggtatataaaaattagcgcacaactgaaagtaaacactttttcaaaaatacctctttgtttttggattaaaactataaacatagtatagctttatttataccttcatttatttgtcacattcccaatataccctctctaataaccttcctcacc

SEQ ID NO: 159374 - DNA, 620 bp, Cannabis sativa
cataccaaacaccatcgtacgatacaacaagaaacacagtcaatcttgcaatttcaaacaaacaaaaggtaagttagagaaaaataccaaaaaatactaaaaaacagcaaccatttaacatattcaaaaaatatcaacattccatcgatattccatcgaaaaatatcgaaatttcgggtggtagtaccattgatagaatgtcgacatatcatcgataccatatccacaaaattaagttgtggaattttgtagtcctatcgatatactatcgacacactaccgatataaactcgacaatacacattgcatgtcagacacgtgtacaattagacatttaaggctaattaatttttcccacctttccaatttccactctatctgttgagactatcgacaagctatcgacataatatcgatatcgtatcgataatgtgtagactaaatttcttttgttcgagttttattgacaaactatcgacattgtatcgacattctatcgataaatacacattgcatgcgttacacgtgtacaattacacatttaatgttaattaatttttcttacattctcaacaagtattctactctataaaagcaaatccctttctaattcataagtg

SEQ ID NO: 159375 - DNA, 645 bp, Cannabis sativa
  modified_base (41)..(43): a, c, t, g, unknown or other
accacatgatctaaaatcaatggtcaaaaaagcttccctannngtagggaacttttgctaggtcctaccatagtcttgcccaatatatatttaacgaaattgcccactttactttatttgtttttatttttacctctatttttacattctttaagatataaccacttttaaagatgatatcctcattaaatcccttaaattaatgcaaattatatgctagacttaagtagagaatgaggatatattggctaacccactcaaaaaagtgggtatatttttttaaaaaaatataatatgaaggtatttttaattaatggaaaaaaaagtattttttaacttatccctatatatatatactagtaaaaagctacgtgcggggcacatatactaaattttatgctagttttttttaatgttatttgaaagtgatacaattaaaaattaaagataaaatattattagttattaggtgaaattattattatgtgtataggaagaaatcacaaattaattactcttataattataacttcaatcaaatagggttccagatatatgaacaataaataatcacgtaaaaataaaaaataattatttgaataaagaattcaatatacacagttatatatatatgaatctcattaa

SEQ ID NO: 159376 - DNA, 501 bp, Cannabis sativa
ttttctttgtgtttcaagtggattttcaaggtgttagtaaactcaaattcttggtaagatttatggtaacttgttcttggtgttttcttgagtttttaagaaaagatgatgatttgtatgcttagttttggattgttgttgctgctgtaattatgtgttgatttcagaagtttaatcatgtttaattgagtagaatagagctggttgtgatgcatcttagttgcttttgttcaagtttgaaatttttactcaaaatcttgattttaatggtgaaatgatgaaatctgttgctgtgcttgttgtagatgattactgttattttcagaggttatattatgcatgtttgagtagattcaagcaggtctggatgcatgtcagtggggtttagccaagcttgagttttgaactcaaagcttggagctttaatggcatttttcgtatttgtgattactgggttgttttgatgctttggaaatgtttattggagtatttagaacaggt

SEQ ID NO: 159377 - DNA, 825 bp, Cannabis sativa
tttctacaatttgttttgtttatgctaagctaaagatcagactagatcaatataatagctccaatgtaagttattatggtaacaaacatattctcgaccaacaaatgaataaagatgtttctttcaattcaaattgagtcaagtttattagcaagttatacatttaccattaaatgcgtacaaaaggtgtgctcgtgaaaaacatacttgtgaaaaacaagtgaccaagagtcaaaagcatacttgtgaaaaacaagtgaccaagagtcaaaagtctgctcggtcactttggggcacctatacctatacaaagcatttggtaaaaaaataaaacaaacacggttgcataacgatcatagatagggaacaaaactcattaaggacaacaaagcatttaaacccgagattaaaggctgcctgatcagtcagttattaaaaaaaaaagaataatattccaagtttaaagaacgcctggtcggtcactttgtctcaaaagaaggcctactggccgaacagatacatacaaaaaaaatgatggtaggtaaagagaaggcaatcagtcagacacagcaggagtcctaggctcttggtaaggatcaactgggtctgaaggggtcggaggatcaactgggccttaaggggtcggagatcggtctgggcagaaggagcctcaacactctggacaataggagaagtggacgtggttgcctcagggttctcatttgccgcctgagccatgtagtagtcgagaaacatgtctgtaaagaccgcttagtttaatttggaaattagcagttaattatgcttaattatgaaaattattta

SEQ ID NO: 159378 - DNA, 654 bp, Cannabis sativa
ggactgaccgattcatgtagtgggtgagcatatctttgcctctcttagtctctggatgtagtgatggaggtggggtaggagcccagatctgcttagatatgctcttcaccagttcgaatccgccctttgactgtccgagcttcctcctcgagagtctttaaacttagcaacttttggggtagaagggtccacgacggttagctcctcggaaaagatcgataactgcttcggccgatgccttttccctggacggggtcgtctcgccgcccctagacttcttggccagaggggataagcctgggcttcctcccactctcttcctcaaagctttgagcatcttttgagacatgtctgcacgaaataaaggcaacatggttagagaaaagcactaaaattatgaaagcataataattaaggaagttaaaggcaagatggagtatcttgctctttgaaagaagtgtttgcccgagcaagacctgattgctcatcatcacctgacaagtctcttatctcctctgagacgactttcccctttcctattacaggagtggctggccgagtaggcagactgggctccctgatctgaattgcatgttcaacaggcatgtacttggttagaagtttcttcttcctcttgagtggagtcacctgctc

SEQ ID NO: 159379 - DNA, 581 bp, Cannabis sativa
  modified_base (128)..(130): a, c, t, g, unknown or other
  modified_base (254)..(256): a, c, t, g, unknown or other
tataagaaaaataaaattatatatatattgcattataaataagaatcaatattattattttattttaatttttattattatgaatattttttaattttataatgaactttatgtaaaatatttttttnnnagaattaagattggaataaaaaaaaaaagtaataattaagctttgcttgctacaattctaaattttatattaatgcgtttataaagttttttttattaattttcgtgaaaattttatgaagttnnnggattgtaggacttttacaacacaaaaaaaaaaaaattcaaaatatgtacacaagtgatcaacatgccttttaatacaagtgagaaatcttttaatatagtgtatactgtaaatgcacttgattaatattgtcctcacaattcgattgatcataatgtattaaaacccttgacatatatatatgtgcctatgtgagagaaaacattatttatcctgtaattttttttaaaatttattataattagatatcaatcatgtatgttaaaaatattaatttatataagttaatagtgtatttttttattaccttttttagatgacaatg

SEQ ID NO: 159380 - DNA, 548 bp, Cannabis sativa
  modified_base (164)..(165): a, c, t, g, unknown or other
atttaggacataaaacccaacagcaataactcaaagagattacaattaaaaataaagaggaaatcattttcttaaaacactaaaacataacttaaaaacaaaactagtttcacaaaaaaatatctcataacatataatacttcataaaaccggttataattttnntttttttaaaaaaaaaaagtggggatcaattctaaaaaatattaaggcataaatatgaaaagaacttgttccataacaatataaaaaacacaaataataacacacaataactcaaatataatataaagaaactgattatatctatgaactagttaaaaatttgagacaacaaaaacattggttgcgtaaagcaactaagataaaactcacgtacaaaaatagttaaataaaattacttaaataaaaacattcattcaacatgctccaacccaccaaataatacacataccacatctaccctaaaaatactcattcattatgttatataataggttctattttaattataaatggtttgagttatttcgtgttatttattttta

SEQ ID NO: 159381 - DNA, 523 bp, Cannabis sativa
aatatttatggtatatatgcgccacgtgaagtttggagtgatttggataagttttggtagtgttttagtgagtgcggaaaattgagatttttgtatttcataggttttttttttaattcataagagatcagaaatcgtatttttgtcataactttttacccgagtgtccgttttggacgttctatataccgtttcgaagcttgtgacgagttctatgatatagtatatttttagagccaaattgtatgttttattttagtgtatttataccacgaggttcgatagaaaatcctaaattgtgttacgcgagtgttaagtagtgttttgggataaacaactattgatttattattgttatgacataggacccgagactattgatcgttctccaagtaggtcggccaacatacctgatctggaacttgaagtaagacaagtataatgtaccacatggcatgacaggttctgaaattatcgattgtctgattaggcaattataatactatagacacaatatatgggc

SEQ ID NO: 159382 - DNA, 546 bp, Cannabis sativa
cactacaagaaatataacttttgccagcacacttttgcattgggaaaagtttggtattgtgctggcaaaataaaatttacttttgatgtcttggaaaataaacattggtattagaacttttgtcagtgcaaaatgaaaagcgctggaaaaaaatgacatttcccagcacataaatgcactggtaaaagttaaacttttgccactgtaaatgtgcgctggtaaaagttacttttactagcacaatagcaaactgtgctggcaaaagtaatatttctggcaatgactatttctgacgaccaaacagaacttccaaatggccataaaggggagccagtgcctaggttgacacctggcactaggcccaacgcccaggttgacattacaatcaaattaacaaaatagtgttctaggcatttttttcattataaaaaataataaagattcaagcaaactcagtgagaaaaccacaaacccgagaccctgaaaacagggtccactgcctaggttgacctagtgctgggcccagcgcctaggttgacaatcaac

SEQ ID NO: 159383 - DNA, 670 bp, Cannabis sativa
gagtcacaagtactcagcaagaaaagaaataataataataataatcatatagtttattattcgaatattatcatttatatacaataaaaattaaaccatcacacattactcataagatatgaaatcaatatcactactggcatctgccacaaataaacatcagtatatagatatttggtaatataaaatcattataccaataatagaattcatattcatttaattatataaattatatatatatatcacctcataaagtaaccatcttcattacatcacgttgcctaatcaggcaaacccgtgccatagcctgacacccatatatcgtataactacatcacctaatcaagtgagcccgtgccaaaaacctgcacccatatatcacataattgcatcacctaatcaagtgagcccgtcccacgacatggcaccaatatgttgcatcgcctaattagacgagctcgtacctacgcccgatacataaatacatcacctaatcaggtgagcctatgcaacaactttgcaccaatatatcgcatcttctaataagatgagcctgtacctatacttgatactcatatatgattaccgcctgtacttcataaggtacgacgcctgacatattgaatcacctaatcaagtgagcctgtacctgttggaaattatttta

SEQ ID NO: 159384 - DNA, 596 bp, Cannabis sativa
aatcagacaatcgataatttcagaacctgtcatgccatgtggtacattatacttttcttacctcaagtttcggattaggtatgttggtcgacctgcttcgagaacgatcgataatctcgggccctatgtcataacaataataaatcaataagtatttatcccaaaacaccacttaacacttgcgtaagacaatttaggattttctaccaaactccgtggtataaatacactaaaataaaacttatactttggctcttaaacatacaccatataatagggcttgtcccaagcttcgaaacggtatatacaacgtccaaaacagatacccgagtgaaaagttatgataaaaatattatttctgatctcctatgaatttctaaaaactatgaaacacgaaaatctcaattttttcactcaccgaaatactacgaaaacttatccaaatcactaaaaacttcacagggcacatatataccatgaatactaccattattacataacataaattaaaattgagcccttcaatggaaaacgccattaacgctcgtactaagctttaaaaagttgcaaactcgatttctaacccaaaatcacct

SEQ ID NO: 159385 - DNA, 713 bp, Cannabis sativa
tgaacacattcaactacacagaaaaatagaataacaatccttttaggtagctacccaagcaatagtgtgcaacaatatgacagtggctggaagtgaacttcacttagaacactgaactgtgcagcaacctgacaacaacacaataacaacaactaaacaacttttatctgctccaaagaggggatcagtttcgaaagatattatttttgttgatgctagtactttgaaaatagaatcaaccataaaacaactagaaaataaccaaaatcaaacccccaaagaagctgaatattgaagaatttataattatttgttcatcaattgatattatttttattgaaaataacaaaaacaaaattatataatatctacaaaagaataattaagttgttttcatgttataataagaaccgtataataactaaattaaaagtaaaaaataactaattaaaaacagaaaaagtgagagacataaaccatttaaggttgaatagttcttcttactaaatacataaaaaaaatacataaacataacaaaacaagtctttgaaactaaacaaagacaacaaaaactatacattaatcttttaagttgcaaccttgacatcattatctcgtcttttacccttatagacccctcaattaatgacttggtgaaacaacatcaacaaaatgaactaaaagatgaaacaactataaaacaacttataaac

SEQ ID NO: 159386 - DNA, 555 bp, Cannabis sativa
taatatataatttaatttttatattttctattaattatgaaaataacaccaactaaactgaaataatatacccaattgaatggttgaggccctcgaaaaattgaggaatacattttttttataaatacattaattaaatttgtatttaaataaaatttaatttaaatatactttattttttgagtattatacccaaattattctcacactctcatataaccaagtgacaattttaaatataatagattgtgttctctgagatggatgtgtagatttgtggaaaagttaggataaaattttggttagagaagaatgaagattatagggaaataatatggacaaaattaatagaatgattaaaaaaaaaaaaaaagtaaatataatagattttaaaagaaagattaaaaattaaagtcatcaatttaaaggaggtatatagtatattttgataagggatattttcaaaaatatgggaaaaataaaccattttatgataaatatggcaagaaaactaaatgccacaaaatatggcattaactaaccaaccaaactaca

SEQ ID NO: 159387 - DNA, 636 bp, Cannabis sativa
  modified_base (344)..(356): a, c, t, g, unknown or other
ccacaacaccaaaaattacactaaaaaaatattccttattattatattatttttttaataaaattaaaaaaattaatatcatattaattaactaaaattagaacaatgtacccctctaaatgaaaaagtgatgcatacaacagactgtttaaattttattttcggcgtgttaaatttctctgatttttcgaaattttgcaggctatatttaataaccataatgtacacgactataaaataataatagaataaaaaagtctcttgaatgctaaaataggtaggagtatatcaatgcactacttttaaaaagatacattatttttagcgtgttaaatttttcaaannnnnnnnnnnnntcttaaataattataatatgcacgactataaaaatgttagactgaaaaagtttgtgaggtgtcgaaacaatacattacatttaaaaatgtgtattgtagaatttcttaaaattaaatttttaatttaataaataaatcaaataatataaatatatataaatattattttttttaaaaaaaaaaacatatgccgtgttgtaatatcaagattaaaatagtatttaatttttttttgtgatattaatggtgtgaggataattatctcatttatttgtgttgt

SEQ ID NO: 159388 - DNA, 672 bp, Cannabis sativa
ggggagaatgaagcactaagtgatgaaaatcaggcaataatcattctgaattcattgcctaattcatacagagaagtaaagacagctatcaaatatggaaggacttctataacccttgatgaagtcatatctgccctaaaatctaaggatctagagatgaagagtgagaaatctaactctggacatggtgaaatgaacctaagtaggggaaggccatctcacaagaaaccctatcagaacagaggaaggagtaatagtgcaaatcatcacaaaggctctaacaaagggaaaactagatcaccatcaagagactctggtgattctacaggttgtttctattgtggcaaaactggccactataaaagagattgatatttctacaacaacaaatacaaaagcaagaaagggggcaggttttcagagagatcagatcaaaacaaacagcaaagtaacaaacaacaagaagcaaaccattcatatggctatgatagtggtgaagtctatgttgcatccacatctttcaaagatgattggatacttgactctgggtgtacttttcatatgacaaactctaggaccatcctaacagattacagagattctaaaggaggcaaagtaattctgggaaataacaacacttgcaatatagaaggatcaggtaatgtcagtttt

SEQ ID NO: 159389 - DNA, 939 bp, Cannabis sativa
tcactggcttaggaatgaaatccttcgggtagagcccgtacttcataaagttgtcctcggaggtcaactgaatgatattccggtcatcgctcggcagctgagcaagctcttgagctctatctctaagagcaagagtgaggggagggcagtgatatgtggagatctgttggaaattagtgtgggtggtgcccatgccatccaccatgaagtacacatcaacaatacgcccgattttactgatggccgaatccccggtgcccgtcaaccacttgaagtccggttgagagaaatagaagtaccccgacctgccttgcttaggggtggatttcaaatcaaaaaaccagctaactttgtggggagaaggcatatcccactttgggaggcataaagaacgaagagggcagacatatatttaatgcccttgggagtaaatcgggtcgggcagaggcggaagaagtgtgccacattcttaaagtatgggtgaaaaggcaacaatgccccttgctgggcatgagcccccgaccaggcgcacattcccttttcagggtttgtagctcgattattgtgggcgggaatgtaacagtccaattcgcccaggtagccatcctggtcgagaacccgcaggcattcctcagtaaccttggacggagggctcacccacctggcacccaaggtaccttgccttctatgaggaaccgcggcagtaagttcctcaatgctgtagtccatgccctcaactaggatgttgccatcagcatcgactggctccccagcctcattgtatcccccattgtttgggggtgcaacctcctcctcttcctctgcctcggagggactgctaggacggaaatcgtcctgctcttcgatctcctggacctcggcgtccccctcacggtcctcctccattgggaccgccgaatcctgttcggcatcgggcag

SEQ ID NO: 159390 - DNA, 553 bp, Cannabis sativa
aatatctcttaaaaattattatataaaattcgataattgtaccaataacaatattaaatattataaattgggatgcgaggcatttctcataaaaataagtgaaagagtgatggaggtagatagtgaaattaatgaactcaaaataaattaatagtgttattatattatttataattatattcattttcatattattatagataattaattaatgcattttatcttaattaaatattatttcactaattaacattattttataaaaaaatatacattacaaaaaattttacttttagtcacaacaaaacttgtgaataaaagtaaaacaattgtggttaattataaatcattattcttatgttgtgattaaaaggtacttttagtcacaattcttgttgtgactaaaattaaattaatgacaacttatatttaaatactatgtttttgtcataaaaaaaaaaattttgttacgattataagtaatatttgataaaaaaaaattatgttgtgactaaaaaattattattaaatgtaattattttttttaatgata

SEQ ID NO: 159391 - DNA, 527 bp, Cannabis sativa
gatagtgttagcttgtctgttttttcatttcttttattgatcaatatcgataggatatcgacattttgtcgatgtttgtcgataaagttgcttgtgctttatattttctagataattttgaattgtcgataggatatcgacatattgttgatattttctagactgttaccaatgatttatcgattatttctagtttgcctatggtttgtttttttactatcatgtcaatgaattatcgatatgatatcaataggatatcgataaaatatcaattgagaaattgatagtgttagcttatctattttttcatttcctttattgaatattgataggatatcaacattttgttgatgtttgtcgataaagttgcttgtactttatattttccggataattatcaaattatcgattttttatatgtattttgatttttaaggaataataattttgtcgatagttttttgatatttttttaattatgtggctgacctttttcccttttgcagatgcctccgaagcttatagtt

SEQ ID NO: 159392 - DNA, 549 bp, Cannabis sativa
atcaagaatcttctagaaaaatcaatatgggttatggatatttctagacccctattgtattaacataacatacattagcataatctaatgaagagatataaatatgttgtatttttttagtacatatggctaaaaattgaggtaatgtaaaatatatgaacaactagtaaataattcgcgttttgttattaatatttgaaaaaaaataattatatataaaataaatgataatttttatttaataacaattaagtaataaattgtattaaattttaatttaatttttatataattttgtatgaaaaattaagtgtgtacaaacggatgaatcccacccgtatttaccaaatctcgttattataatagaaatcagacatgattttacaaatcaaataatgagttaactactcacttttataaataagtaatctgcataattttcttttataaaaataggataaataccatcttagactctttgtttcgtaaaagttaccaattagaccttttattttgttaaatgataaaatagaccctgtattttctaaa

SEQ ID NO: 159393 - DNA, 532 bp, Cannabis sativa
cacaatagtcgactattaccaactgacgcaaaatggaaaaacaagtttttaaatttttactttatttcgtcggtttcttttttatcatcatttaatcaaacgatgcaaatagtatattattagtgactttttaaatagacgggtccaattatttggacactattcacgtcggtcaaccctatgaatagtagcgttgaccgatgtgaatagtgtaatttgtagtagtgctcggtcccagacctggacccgaacacaaacacgaacatagacacggactgggacccaagatctgaattagaacgagaccgggacctaagattaggatccagatcttgacccacgacccacagcttggacctaacccgtagtcggtgtttggattatcgaatcgtaccaagaccccaacctggaaccatttctagaccaggatccaaaacaaaactcggacccgggacccaaaatcagaacaagaaccgaaatcaggaccttggaacaggaattggacctcaacccagaacaagatctagacgca

SEQ ID NO: 159394 - DNA, 513 bp, Cannabis sativa
aagctacggttttccgttgcttgtacactcggtgtgtgcatgggcacctctgcacacatgggtgcctgcacacgatgcagaagatttttttttaccacatttggcttagttttatttttttcttattttcttgagttaaaattttaattttcatccgaacaaattctatgtggccatgcaagccacgtttttccgttgcatgtgcattgtgtcgatactacgaccctgtgcacacatgggcgcctccagaccatgtagaagatttttttttaccaagcttgtattgttttattttcttgttttcttgagtttaacttttggtttttatccaaacatatcttatgtggccttacaagccacggtttttcgttgcttatgcactcgatctgtgcgtgggcacctgtgcactatgggcgcctgaggagcttacaaaagattttttttgaccaagttttgcttttttttatcttcttattttcttgagtttaacttttgagtttcatccgaaaaaaa

SEQ ID NO: 159395 - DNA, 540 bp, Cannabis sativa
  modified_base (35)..(47): a, c, t, g, unknown or other
tgaaaagtacaaggcattatgtgttagtctacaannnnnnnnnnnnnaatcccgtaggctataccgacttagatttccaagcttgtcttcatgataggaagtctacatcttggatggtatttagtcgtaggggtggagaaattgtttagagaagttccaagcaaaccgcaacatcaaactctaccgtggaggccaaatacatagttgccgctgagactgctaaggaactgatctggctaagaaagctcttcacagaacttggtgttgttcctagaatggaaaaaccactggttttactttatgacaacatttgtactatagccaatagtaaagagcctcgaagccacaagagaacaaatacattgagaggaagtaccacatcatcagagattatgtggcgcgaggggacgtactggtggagaaagttgatactaaagacaacttagctgatccattcactaaattttcgatagtcactacatttgaaaagcacagagcgaatctagaattacttataatgtactgattgttttatgttag

SEQ ID NO: 159396 - DNA, 574 bp, Cannabis sativa
  modified_base (453)..(475): a, c, t, g, unknown or other
  modified_base (525)..(526): a, c, t, g, unknown or other
gtaaatctgattatagtgaaatgagttttatttagggcataaaacccaacagtttactagacaccaatcaaatgttttttttagcattactcatttatgtcgatgatattatagttgttactaaaaatgttgtagcattaccaaattttatctccactcttgatgcacaattcaagttaaaagatcttggcaacttacacttctttcttggtctaaaaatagctcgttgcaacaaaggtattatagtaacttaaagaccattcacactgtaggtcctacaagactcaggacatcttgattctaaacctgtcaccactctaatggaaccaaacatcgaattaaataaataacgaatgtggagatctactgcaaaatccaacttagtatcgaagcttaattgggaaactcatctacttcaccattacaagactattggaatatgttttaccaggnnnnnnnnnnnnnnnnnnnnnnnttgtttaacatcctaaatatgaatctcttaaacaatgtaaataaacacanntaaagtttcagaaaccttacagtgggtgcagcgaaataataatggctc

SEQ ID NO: 159397 - DNA, 557 bp, Cannabis sativa
ccgacaaatatattatgtaatgatagtgagatttagccaattttatctattagagtatgcttttttttcaaaaaaaaaatataataaataagaaattttataggataaaaataattttggattgtattttgtaaaagttatcgattagactatctgttttggtaaatgataaaatagaccatgtattgtccaaaatggtaaaaataagaacctgagtttaatttttggcaactattttttttttaatataactaacttaaagacaattcttaatacgaacagataggggtgcacaaaatatgggtcaaaccattcaacccagccaacccaacctattttttttgtagtaaaaggttatgttaatagtaagtcatgtcattgggaaaagtgataggccatataattatagattggttatgggttggacacatttgaactctatataacccaaaccagctcatttcttgaaagatgtttcaaatttaagacaactttcatgcataaaatatatttgacattcacaaaatatatagaaatatatattttacgttttcata

SEQ ID NO: 159398 - DNA, 503 bp, Cannabis sativa
  modified_base (32)..(37): a, c, t, g, unknown or other
gtctgagtttgggtttgggtccggatttcagnnnnnntccagatcaggctccgggtgtggcttcgcctcctgggtcgtgttctaggtttggtctgagtcccaagttccaatcccgatccgagtctggattcagttcttggtctaagtcgttgattctgatcctggtttggtttcgagtttgggtccgggtccgagtctatctttgggtctgattctaggtgtgggtgtttaagttcgggtccgagtctgtgtccgggttttggtgcaggtcttaaccctgatcagggtcaaggttccggtctacgtacaggttcgggtcccgagtgcggttccaagttttggtctgtgtcaggatctccttcgagatctaggtcctgcatttcgatcccagtcttggtcttggtccgagtccaggtttgtttccggatccatatcaaggtccaagtctgtgtttgggatcaggtccaaaattttggtcaaggtccgcgtctcagttccggtct

SEQ ID NO: 159399 - DNA, 534 bp, Cannabis sativa
atatttaggatgttaaaaacatacatggtagtaaatttagatcctggtaaataattccaacaataattatttatttcgcgttatattataagctcttatttatttattatatttttatatttaaatgtttagctagaactcctatacattttggcgattctgctggggaagcaggattttggtttattgtttatcttccccgaccacagttatgacttcgagatgatccgaaatctttatcttggtcattcgtttcatatcgccttgatcgtgtattggctagaaatttggatttgatcaacatgttcctcatgattctactccaatatcccaaaactggaaaaaaaaacccagtaaatttctcccacaaaaatcctcatctataatatcttgaaaattaaagaatttaggtgactcaaattgggatgcaatacaaaaaaaatacctagaatccttctcttctacactgcttaaacagtctgcccagaaacatcatcgtcgtcctcttgtgcgattgcaaccccaacactcaag

SEQ ID NO: 159400 - DNA, 563 bp, Cannabis sativa
  modified_base (47)..(56): a, c, t, g, unknown or other
gatttacactgacatgataaccaacgataaagtttacttacaccttnnnnnnnnnntatgtcctttccaaggtattggcaaagtatgctaggatcggatgcatgtagtatacatcaaactggaccgatattgacaattagataagatatcataaacgtattgttatatctttcttagtcaatatcacttagccgatcttaggtcaatagattttaatactgaaatggttaggttctggcttaaatgtattatttatgttctttgagttgttcggtaaagatggccaattgaatcgacccaatacttacatcttaggaacatggtagtgcaattgagtgagagcgataatcatatatatggaatctatagcttctacaacttttagaagtgaaacaatgatttcctttgagcttggcttaacgcgataaatgattgaggcctcatttcattgaagggtagaacaataaatttatgggaaatttgattttctatacttaaaaaatttattttttttataaaaccaatacattttacactacaaaaaatatgacacttttttcaaa

SEQ ID NO: 159401 - DNA, 887 bp, Cannabis sativa
tgttattgttgctaaatttacaacaaaatcagagttgcaggttcaagatccaataaagggaagtaaagaatcaagattcaatcaagaatcatctgcaaccaatcatgacaggagcaacaagattcgaacttgagaagttcaatgggacaggggattttggcctgtggagagaaagcttaaaaggaatacttgttcatcaaaaagttgccaaagctttgaaacccaaggaagaactgactgacaagttgaagaaggaagagcttgaagacatggaagaatcggcatactacactatcataatgtacttgtcaaacattgtaagaaggaaggttcagaacatgaagacagctcgagaattgtggagcaaacttgaagaaatcaacatgaaaccctctctaactaataagatcaatctgttagaatctttatatggttttaaaatgtcttctcatttgtctctagatgataatcttgatgcttttaatcaaattattataggattggctaacttgaagtacaatgttgatgaagaaagccaagctgtcattcttctcagatcattgccagctgcataccaagaattgaaggttgtgatcaaatatggaagagatactctcacccttgatgatgttcttggagccttgaaatccaaagaacaagaaatggctaaagaaaaagacaatgtcaaggatgaagcttacctagccagaggaagagacaacaacatgggtagagatcactacaagaatgatcatttcaaaggccaacacagatcgcaatcaagatcaaagtccaggggaaaatatcacaaggacataaaatgttatttttgtaggaaagtacgccacatcaagaggttctgcattgagtttaagaataaactcaaa

SEQ ID NO: 159402 - DNA, 566 bp, Cannabis sativa
ctctcaatttgggctcgaattgtctcgaaccgtggttgacgtctcaaaggattttcagggaattcaataccccggtcttcaatgtaagccctaattttcaacctcataaaacgattccaggcctcctcattgacaaatcgggttctatcgaaacccgtagttggtgggtttgatgacgaaccctcctcaacatgcctagttctcttaggtgccatttttttcttcctagcaataataaaatatatattttttcttttctatttctttttttttcttctttttttcagattttttttttctttttatttctgattttttttttcaaaataatgctaagaaaaaaattggccagcacctccccttaatttttctacttcccaaaaattcacaatcactcaaataatatttcgaaatactcaacaccacaatacaatattaaaaaacccaatatcaacaataacttttcacaacacacactattaccacccaaaatctataacaagtaaatcaaattccttaaaaattgtaggaagtgatacttacaaactgttgtcgagtgaatttcg

SEQ ID NO: 159403 - DNA, 539 bp, Cannabis sativa
  modified_base (178)..(183): a, c, t, g, unknown or other
  modified_base (372)..(377): a, c, t, g, unknown or other
gttgactgcttcaacttgaccattcgcttgaggatgtgccactgcaaagaaagttttgatgataccatggttcgcaaaaaagtaagtgaaggatttgttgttgaactgctttccattgtctgaaactatcttgtacggcagttcgaaccggctgattatgttcttcacaataaagtcnnnnnntttctttgatgtaatggttgggagtggttcgacttctatccactttgtgaagtaatcaaccactacaactgcatattgcactcttcctttgcctttgggtaattgtccgattaggtaaattccccaaatggcaaagggccacggactttgcatctgagtcaactcgttaggtggagctcgaggtatctnnnnnnatctctagcatttgtcacatttcttaacataggcttttgaatcttcaatcttcgttggtgagaagtaaccttgccttagaattttcttagataaactttgcccggcggcatgatttccacaaaatctgtcgtgcacttcagataggagtcgtgcagcttctt

SEQ ID NO: 159404 - DNA, 743 bp, Cannabis sativa
  modified_base (42)..(55): a, c, t, g, unknown or other
tatttctgatctatattaaaaagtaaatctgattatattgannnnnnnnnnnnnnagggcataaaacccaacagagagggattaaggaagcgtggggcataaattcactggaaggtgttataaattacttgggtctgccccttttcagatcaaaacagaaggacgctgactttaactttattttggatgatctcacctctaaactgcagagttggaaggctaaaactttgtcaaaggcaggtcgagctactcttataaagtctgtgggtttgtcgatgcctatctatgccatgcagaccaccaaacttttgcgtcgtgtggtcatgagggtagatggtttagtcaggaatttttggtggggttttgaaagaggaaatcatggtcttcatctaaaggcgtgggataagctgtgccttcctaaatctttgggcggactaggatttaggaagacaaagaaaatgaatctggcttttcttgccaagtggggttggaatttgttaaagggctctcaatctttatgttgcaaaattttggaagccaagtatcttaaagggaaggattttctcaattgtagctacaaggactccgattcctggttctagaaaaatgttgtgaaagccaaatctattttaaggaagggggctagtaaagttgtaacaaatgtgttgcgatatttttgcacacgcaagtgtacgtatcgtttaaagtagtagactcactaggagtgaggtcgatcccacagg

SEQ ID NO: 159405 - DNA, 505 bp, Cannabis sativa
aagtgacatttcttgtagtgcacccatctcaatagattgcaccatccgatttgaagctgacacccactcaggaaattttttgctaatctcatcatgttgttgtttcagtcgacctaaggaaagaaacttcccccccaatcgatcgttctcgacatccatgaccacctctgctctgaatccctcgattgattccatcgacctagcaaggaaagaccttgccaatagttcaccgtcatcctcttttgaatcagcaatatccagttctacaatgcccaataactcctccatcgttgccatcttcactgcttgatccgatgatgaaggccctttcttcctcgcattaccagtcaccctcaatctcccctcactataaaaatctcacttttaatcacaacaaaacttgtgactaaaaaagtgaaaagtttgtggaaaattataaataataattcttaagttgtgactaaaaagtttgtggctaaagatatattagtcacaaaaatcacaa

SEQ ID NO: 159406 - DNA, 591 bp, Cannabis sativa
aattacaaaaaggctctctaataatatttgtctatagaaaactcatcccttaaagcaacatccaatcaaaccctagtaccatgtctaaaatatttataaccatttgtacgaatcaatgaaaattcaaaagttgtttctcaaatctcgccactcaaaaaaaaaaatatgaacacttaaacttggcaaaatttctaagcaaatatgtgctaacaaccatcttaccacaaagtttgacatgtgcattctatagctctagaaaaattctaagcaataaagatagtaaaaattggcttgaaaataatattttacaagaataaatgaataatttttgaaaattttgaccatgaaaatattaataggacaaaaaattaagaaaaacgcttaaatatgctcaccacccccaactaaaatcagacaatatcctcattgtttaaatatatatatatatatataaaatgcaagaaatgagaacacctagagagtgagccaatacaaaatgacatgatattgattcttagaaaaataaaaataaatgaagaaataaattaacaaaacaaaagttaaaagataccaaaaataaaagaaagcaag

SEQ ID NO: 159407 - DNA, 547 bp, Cannabis sativa
gcctccatagctttttgcatggccagcatcacctcttgcatcttttggttttgctctttttgggctgcgatttcagcctcgtgatcgacagctttttttcttaagaataccagctctgagtagctgccttcgtcgtaggcgtcgtactcgtcgaagtttccttcatactcgttatcaggggttccttcttcttcctcagaacccacatttgctcttgaggccatgtcctcatcatttggatcttgagcatcttgaagagggcgaggttgacgtgtgcttcgagtctccaccatttttattttgtaatgtagtgtctactttcagacgcttccttcagctctcaatgaaagcaccaaaatcttgaccgaggttttcggcaactaatataataataataattaagaaagctttaaggaattaagagagagatttttacgtggttggggccttactgagtcttagtccacgagtctatgtatttatgatagtatttattacagagaatgttcttggtggatttttcctcctctagttcttatgaaaccca

SEQ ID NO: 159408 - DNA, 704 bp, Cannabis sativa
tttggagggttttcctaccaaaatttgaggttggagggttaagtgcaagtaaaatgataattgggagggtttagccgcaaattactcatttttttaatgccttacaaaaagaataaaaataaaaataaaaataactttttcttctctttctccattacatcatcttcttctttttctcttaatacaaagacacaacttcactaaagagcttcttcttcctctcaaatacacaaatccaacccttaagatctttctcctcaattcccagacctaaccctcaagatgactcccattgttcacaagtttggacaaactagtatatagttattgtttctatacactttagtgcgacaaacaaatgggtgaattgggttaaatggttgacaggcgagtcgacgaacgaatgtgcgcctaacccactactcaacgagacaaattaatttactgttttatttttagattttcaaagttattttgttttggcataaatctattgatgtcgttgtgcttttaaaattgtagattttaaacgtacattcatcttcttctatatgattatttcgtttaagattggaatttttttattttcatattgattgacgtgttttggtatttatttagtattttatttatttatttatttttttgaataaaatcataagatctattaattaataaatttattcaaaataatagaacgcact

SEQ ID NO: 159409 - DNA, 860 bp, Cannabis sativa
aaatttaaaatgcataaaaaagttgataaaaatcattaaattttttctcatgttacatgataattgttgtttcttccattatgaaatagaattcattctaccaaattggtggaacgggcattctattgggatgagtttctaatactttaaaaagaaactaaacaaaagaatagaatgaaaattatttcttttccattctatttcatcacctgtaacaaaatgtgatctaagggtctgtgttcaggggttagggttcagggtgttggggttagggtttagtgtatgggttttagcgtttaggatttagggtttagtgttttacggtttaagtgtttgagggtttaggggttttgggtttaggtttcacgattcagggaatgggaataggaatgaaaataatataaaatttaaaattcataaattattgataaaaatcattaaattttttttcatattggaatggaatggtattccttctattatacctgaaatccggctggcactgtagaggatgacgcgtgttaaccttagagaatacgtatcaatgaatgtaatggcaaatattaatttgtactttaagacttgaatatgaagattggtgtcgcgttaaattttgttaaaatagccccctaattaaaaaaattgaaaatattcttctttacagggtaaatttcaacaagttctttctttactcttactctcattagtgttctgttaaaatctcaccctacacatctcaaaaattgtgaaattttatgaggatcgaaagaagccaagaatgttgtgcatcaattttctgatggacacgttgcgatataaactagttttcatgcactaacaataattttaatcgaaatagt

SEQ ID NO: 159410 - DNA, 855 bp, Cannabis sativa
  modified_base (175)..(181): a, c, t, g, unknown or other
  modified_base (232)..(250): a, c, t, g, unknown or other
tttgaaaataatttttaataaaaaaataaacaatatgaataaatttattattaattgcaacactttaggtggattaattatatgtagatttaactaaggacatgcatgctgactctttacgtgacaaatctaataatttattatttctttatttaaaaaaaaatcacccaataannnnnnntaaaccaagaattctgttatatagtcacatctatctatctatctatctatnnnnnnnnnnnnnnnnnnntatataaaggagaagtatgaagcgcagccttaaatcactctaaatagttttttctattatctccttaattctctcatttttataattttaaattttattttattatttttcctaatattttattaaaaaaatttaaaataaatgtaccaaaatttattttccttaataaaaaaaatcatctttcaatttttcattaaaaaaaatctgcatacatatagtttattaatttttatattcaaatattattattttttttttaaattaatcactcaatcgcacacaacaaacaacaagagtatttatttatatttgttttttcaaaaaaaaaatgcttataataattcaacttactattacttttttcttaaaaaaaatatctcatattattctctttttaactcaagtgcacataattcaagtgctatattattattttaggatttcttattttaattcataagtgagaaggcttcttcttgatagactcaatataaaagggaaatttaaattttcatgcttaataaactcataaattggtcaacctaaacttatactatgcataatttgtaaaatgggataactttttcctaaaccccaaaataccc

SEQ ID NO: 159411 - DNA, 642 bp, Cannabis sativa
ggagagaagattatgtttcgacacgtggcaattgatagactttgttggctaattttgagccattgtttggattgcaaaaataccattcccagttaataattttttccaactgtgtcatagatagaaagatatttatcttgcactattaatttaataatataatatttttaaaatatattagactaattttgcaatcacttttttgatatttagaaatatatttgagtccattttttttttttgtaatttaatgttgtagttatattaaattacttttaaatttttaaaaaattctaaatagtttatcaattatttaccacgcataaaaaaaataattatacatgtaataaaatatataaatcttattttcggcattttaagttatttagaattttttgaaaaatttacaggtgaataagtaatcttaaataactataacgtatacgatcatgaaaaatattgcactaaaaaacttttctatatgctgaaatagataaaaaaatttaccaaaacactgctttaaggaagtgtattatagacttatccaattttattatgtattttacattaatgtttaacttggttatatatataacaaaatagaaatatttatttacggttaactactgtataaattattct

SEQ ID NO: 159412 - DNA, 569 bp, Cannabis sativa
  modified_base (67)..(78): a, c, t, g, unknown or other
cggaactaagacccggacctagacgtaaatctgggacccgatcccaaacacaaacttggacctagannnnnnnnnnnntacgaaccttgactcggaccaagacataaactagcatcgaaatgctggaactagattctgaccgagatcctgaccaagacccaaacttggacccgcactcgggaacccaacttggacctggacccaaacctagacacagatcggggtcaagacttgggcacaaacccggacacaaactcgaacccgaactcaaacccacacctagaatcagaccaaaagcgagactccgaccaagaccaaaactcgaacccagaccaggatcagaaccaaggacttcgacccagaactaaatgcagactcagattgggatttgaacttgggactcggacatcacgtagaccaagacccaagacgcgaacccacacctggagcctcatctagacctagactgaaatccgaacccgaattcaatctcagaccatgactcgaactccgacctgaactcaaacccaaactcgacctcagaatcgaaaatggaactagaaccgaac

SEQ ID NO: 159413 - DNA, 518 bp, Cannabis sativa
ttccagggcaggtaaaatttggaaacgctcctctttttatcaattttatattaaaaacaaacattgtgatattaaagagtttatgttaagaggttttgaaagttttgataaagatcaactttgctcttttttgggtttaatttgggccatttggaataacagaaacagagccatttttaattctaatcatgtcactgatttctgtgtggagagctatgtcagttattatttgcaggaatatagggatgcacaagatcggatatccatatcatctcacacatcccatcatccttcaccgcgagttcaagtttccgatgacacatatcggctttctgtggatgctgctctttctcaatcaactaaccaacatgggtacggggcggtagtaactgattccaaaggaacagccattgcaacttttacggctccttcgcacacagctcttgcccctatttttgctgaagccgaagccctccatcgagctctcctttggtgtcaagcagtccgtttcccaattg

SEQ ID NO: 159414 - DNA, 717 bp, Cannabis sativa
cttggcccgacactcacccgaatggtgtttcttgaatttaggacactcgggacatgatcgtaatgaagacccgcaactctgacgaccacctctatttcctcagaacattctattaccccctgatgcttcggaagcctcagccttccgtttgtgattagagttgccactgtcgttccccttactgacattaccactagaaggagggttcaatgccatgacgacatcctttgcagtcagctcttttgctacatgttgctcagcctcctcagtaatcaaggctagctctaccactttcttgaacaaagtgtcatgtgaagtggtaattttcaagttccaactgatcgtggcatttggtcctctcacatatttctgtttcctggtgaaatctgtgggcaccagatcaccagcaaacttagatagccgatcaaactccagagtgtattcagccacaaacatcttcccctgagtaagcttcacaaagtcctccatgtgtgaagtcctcacagcaattcaaacatatttttaaattcttcccaagtcattacactgacatcccgggtctgacccgtaatgtcccaccagatgcgggcatgatcttgcaacataaaagcggcacagttcactctcttagttcccgtcacccccatattattgaggatacatgtaataatactcatccactgctcagcctttattatgtcagtacctcccagaaaa

SEQ ID NO: 159415 - DNA, 603 bp, Cannabis sativa
actgtcatgaatagttgtttatacgttgttctcatgtattaaaatagttgcttaacaatattgaaaaattgatacactagtttcaggtatgtaacaattgcaaaatttgatatagagcaatggtcattgggataacaacaagtactatgttgcttacgaatcaattggataaataatatcaagagattgcacctttgctaaactagtgtggataatgatgaaaaaactacaatgcaatcgtgaaataattcaaaaacaactgaaatatcaactaaaggaaggctgtcaactactctaaatcaaggatgacaaaagtctattattttacataaagttattaactaagaaaattgattttaaacaatatctattgtgtgtgaacacattcaacaacacagaaacacaatccttttttgcagctacccaaacaatagtgagcaacaatgtgataatgacagaatgtgacaatcactcagtacagtcagatgtgaagcaacttgaaaacaacacaacaatagcaagtaaacacttttatctgttgcattgtattatgttgttttgaatcatagattttttttttggaatatcaaagtcttcaaactt

SEQ ID NO: 159416 - DNA, 604 bp, Cannabis sativa
taccatataataaatgaatttatttggtgtatataattaaattgagacaatatttatctataatctataactgcaataaaattattaataattttagagttctatttacacctgtatacttcattatttaaaaaatataaacttaataaaaattttatgtattatttattttataaaattaattaggtattttatgtattgattatttttattttaaaaaaaatctaaaatattttattttacaaaaataaaatgtgtgtaaaatatcctaaatatttttaagagtcacaaaattaataaataattttagcccttgttaatttacaaaaaacaatgaagactaagaacatctcaaatggagatgcaaatataaaatatagcttattttgtcaaaagtctactccaatggtgtgtcaaattgtgatccaaatatctcccataacaaaaagtgatttaaatttgaatcacaatatagtataatgtaaaatttgcattactataaatgctataattttataattactattatgctatttttaatattttattataaaagtttaattaacatgtttgcattattattttatatttttaataaattgtt

SEQ ID NO: 159417 - DNA, 669 bp, Cannabis sativa
agattggatattattccagacttaaccaataaccatttggaagagtttaaggagtatgatcaacgaggccttcatttgggactgggccatgtgaacccagttgtaaaccgagatactcgatggatgccacctcctcctgaatcctttgctctagcgatggatgcttcggtgattctaaggaggggctttgttggatcggggggagtgatacgggatgcagaaggtgtggtttggttggcgtggtcatcaggtgtgctaggttatttctctactaatgcggcgtagctgcttgccattcgtctgggcttggatcttgcgcatcagtttggtttcaatatctgcattattaatagtgattccactgtgacaattggttggattaataagctttatattaattttagttttcagtctattttattatatatctattctttattagctgttgttggtgatggttcttgcggtgccatttcgcgatcaggtaatggtgttgcccatacactggcaacctcttttactagtttaggagattatgtttggagagatgcttgtcctcagtttttgaattcttctgtaacaacagatttttcttaatacattttgcatttctttcgaaaaaaaatagtagtaattgttcaatcaaaaaaattaaacagtacattaaat

SEQ ID NO: 159418 - DNA, 536 bp, Cannabis sativa
tcatgaatagggtattcaaggatttcctcaataattacgtcatattgtttatcgacgacatccttgtatactctcagtcagaaaaggaggatgagcaacatcttcgaatggtattgcagcgacttagggatcataagttgtatgtgaaattcgaaaagtgtgaattctagttgtctaaggtatcttttctggggcatattgtcgggaagaatggaattatggtagatctaagcaagatcgaggcagtgaagaactggcgaaggccaaaataagtgacagatgttcgaagttttctcagtttagcagggtattatcgacatttcgtcgagggattctctaaaatctctatgccactgaccgagttgactaagaaaatcaacgattcttgtggtcaaacaaatatgaagtaagttttctggagttgaaacaacgattgataatagcgttagctttgccatcagatcaacagaaatttgtttttattgtgacccatccaaagagggtttgggatgtgttctgatgcaagctgacagagt

SEQ ID NO: 159419 - DNA, 769 bp, Cannabis sativa
aaccagaccaccaagcaagtttggttatgctgatttcatagcatatgcattactcactgcagaggaattagaatcttcagaacctactacataccttgaagctactacaggcagaaacagagtaaaatggctaaaagctattgatgaagaaatgacttcactcaagaagaacaaaacatggatagtggttaagaaacctgaaggaacgaaactagtaggctacaaatggatttttaaggagaaagaaggtattcctggtgttgaaccagtcaagttcaaagcaagactagttgcaaaagggttcactcagcaagaaggagtggacttcaatgaaattttttctccagttgttaagcaaacctctataagagtcatgatggctaaagctgctagagaagaactacatattgaccaaatggatgtaagaactgccttcttacatggaaaccttgatgaagaaatatacatgcaacttcctgaagggtataaatgcaaggatcctaatcaggtttgtctacttaagaaatctctctatggtttaaaacaagcacctaggcaatggaatttaagatttgatgaatatatgaagaaaatagggtatgtgaaaagcaactatgatccatgcatctatcacaataatcaaatttacctactgttatatgttgataatattttgatttttggtaaagaaaaatcagacataaacaagctcaagatgcaactcagtcaagaatttgaaatgaaggatctagaaaatgctaagaaaata

SEQ ID NO: 159420 - DNA, 518 bp, Cannabis sativa
  modified_base (197)..(201): a, c, t, g, unknown or other
atgtcatagtttttttagggtttaaagttttggtttaataataatttttttttaattttttaagtatataaaatcaaaattcccattttaaattacttacttgtaacatcttataaattttgtttttacaccacatacttaaattttcaacttttttatttttttttactgtggggcagaatttttttcaaaaatannnnntaagttttatactgtgtactgtggtaagttttcacggttgttctacggttattttttagttgttctactgtcattttaattgttcaattttattatttcacagttgttttataaaaagatagtatctttgtaaaaaaaaatccatatgaaagtaaaattgtaaacttttactcaaaatttaatatttttataaaaactcctataataaattatttaatatagttattttgagtaaattacactgcatacctcttttaacttggcaaaacattttcacggaatacggtttttttcacaaatacacaaaaacaacaaaa

SEQ ID NO: 159421 - DNA, 635 bp, Cannabis sativa
atatttggtcatccctgaataatacgatcattagaagaacaataataattaattcatatatatatatatatatatgtaattaatgatacgacaattattaactaaattaattattaattaccaatttttttccctgtcgacttgatcgaactcaagacctctatcaaggattcgattgttgcctttggcattaatgtatcgagacaatgaaatccaaatctggttgtgaatcattctccaaaccagaaatggaaacactagaaatgtggacaagtctctttcatctggagtatcttttgtcagaaagtaatatgtgctcctaattgcccatggaagcaacagtatatgctgtcgattatattatcaaaaattaataatcaataaaatatataaaccaatattacttactaaaattagttatatcggattcgttatagattgtattttaaattactaaatttatttaaccgttcaccacatcaaataataattaagatcactaactctactgcattaaatcaatatgaacctaattgctaagagcatctccaacgacacactaaatttagtgttgcactattaccaaatttagtgtcaaaaaatatttttactccaaccacaataccaaaaattac

SEQ ID NO: 159422 - DNA, 601 bp, Cannabis sativa
taaacaattaattaattttatattttctctactaaaatttcggcagcataacggcttaaaaattgtaaacccaaaatttccaaaacctataaacaacactaacaaatatttcatgacaatatataaacacaaaaataatccacccatccaacaacagtcaatttaatcacagaacctacttcactaacatgcatatacatattaactaatataaaaaactactacggactaagcgaaagcaaaaaaatatacctgaatcgagtgcaaaaataacaactgtaggcagctggcggtaatccggagcggtcgaacacggacctaattccataaaaaagtaaaaccaaattaaatatttaatacctaaatacatatccatacatacacacatatatatatatatatacactcacatatacatacacatacacttacacatacacatacacatacaaccacaactacatacactcacatacatttatacccacacatacacacatatatacagatatatttacatacatatatatatatacatacacatatatatacatacatatttacatacatacacacattcatatatacatacatacacata

SEQ ID NO: 159423 - DNA, 553 bp, Cannabis sativa
agtagctcggtctaatgaatcccagattcagtaactcttacaattgtatcttcaattctttcaattctgctggagccattcgatacggtgcttttgatacaaaatccactcccggaaccaactcaattgcaaattcaatcaatagggtaggtggcaatcccggcaagtcttttggaaagacatcaaggaaatcgcataccaatcttgtattctcaggccctaatgtcacaggttggctggtatccatagcagtgactatgaatcccagacaacctctgcttattaggtccttaactttcaacaatgttattcttggtatgcgtgccccctgaaacttacccacgaacaccgctgggttagcactatcgggctcaaacaccaccgtcttccatttacagtcgatcgttgccccatacttagacagaatatccattcccaagattatgtaaaaattagacaattgcaattcaattagattggcggtcaatttacaaccgtcaatccagaaggacaaagaccgaatccatctagtggatacaacaaggtctcccga

SEQ ID NO: 159424 - DNA, 841 bp, Cannabis sativa
  modified_base (56)..(78): a, c, t, g, unknown or other
tacacatataatttcataattaaaattttataattaaatagtttaattgttaaaannnnnnnnnnnnnnnnnnnnnnngatcctgtcaaagacataaggatcctttctcctttttcaaaaaaaaaaaaaattaagctaagggatttatatataaataaaaaaaaattatttataaattttaattgctaaaaaagatcttcttaaatatttatttaattacttaaaaaatagttaattataattaatcaattctaaaaatagaatttttacttattggtaacctgctattacaggtaaaaaaaaaatgtaaccatatggttacaataaaaatgtacccatattataaaatacataattatttatctatataaaaaaaatattaattataataaattatttagcctatattgtaataacatatttttcttataattttttagtttaaattttagaaattaaagtttctataataatattataattaattttgttttataagatacgaaaataatttttttttcttattcttatttttataattaagtaattcttgtattaaatgaaaattttaagagtttgtaatttttgtggtggttagtcttacatcattatttgttaatctatattaattattacattaggtaaactatagaaaagagaatttatatataaaaaaaagtacaaaagagaggaataaaataaaattcgtagtgctataaaatttgggtcatcgtatattggatattgtaatagcaacaaatgtcttttacttttttatttaacttttcttatttggtttcatagagtttgacattagtagatcttgattatactctactac

SEQ ID NO: 159425 - DNA, 507 bp, Cannabis sativa
tgtatgcaacctctgtattttaaataaaactgagtgccttaaaaactaagttttcatgccactcaggggggtactaaggcataccacacgaacagacgaaaagcaagcctaaagtgaaatatcctgacccaaagggcaagtccaaaaaaaagaaattatgcatcaaaaaagatcatatgtataaatatcctgaccctaagggcaagtccaaaagaaagaatatgcatcgaaaaaaagagatcatatatataaaaatcatgcccccaaggacatgtcaaaaaaaaaatatatacaaagggcccggggacaggccttaataatcgtctccccttagaaaataaaacacctattaaaataaagattgtcttaaacaaaagcaaaatagctaaaaaaaaaaaataagaaaaatcttagttgaaatgagctagattcagaacggcctaatcaatgcgaggaggaaggcgaggaccaatgcgcgcctcaagcatggcgtcaagattcttcttc

SEQ ID NO: 159426 - DNA, 599 bp, Cannabis sativa
  modified_base (56)..(62): a, c, t, g, unknown or other
  modified_base (539)..(540): a, c, t, g, unknown or other
ccgatttgagtttggattcaattctgggtctaagtccttggttctgatcttggtcnnnnnnngagtttgggtccgggtccgggtctagtattgggtcttattcttgatgtgggcttaagttcgggtccgagtctgtgtctgggttcttgtccaggtgtggaccctgatctgggtctaggttcgggtcaaggtccaagttcgggtcccgagtacgggtccaagtttgggtcttgctcaggatctcggcccagatctaggtccagcatattgatcccagtttggctttttgtccgagtccaggttcgtatgcggatccctatcttgatacaagtctgtttttgggatccggtccacgatttaggtccacgtctgggtctcatatccagtctgtgtacacgaccgtgtccggatccgagttccagtctcagtttgggtcaaagggtaggactgtgcttggttctaggtttgggtcccggtcctggtcacggtgctagtcttgttatagggttatggttcggcgattcttgttcaagttctanntttgggtcccaggtctaggtctgggttcgggtttagttcttcgtctgtgttctggtcct

SEQ ID NO: 159427 - DNA, 524 bp, Cannabis sativa
gttagtgagatttgaatttttaccctttaacatatttatatttactttaattattacaccaaacttattattatgtctataaatattatttttaattaatacaaatatatgttgtaactaattaaaatacatatacatttttttcccatttttttttcaaggggacgactgtcttccctcgctacaatgtgggtccgcccctgttttttatctatctatagatttcatacaattattatactgtgtacactatatctctcataatattgtgtataatattgtgtatgtagatgtagtaatatagtttaaaataatactatattagatatggatgatatggggtacaagaaaatctaccgcttaaatttgagatgaccactcaaagataagtattgaatgtcacatgtaatttttaggaataatattctctttcattcatatgaataattaaggttgcgtttggtaacacttttgctttttaattttaaaaacagaaaaataaaagtagattttttgtttttaaa

SEQ ID NO: 159428 - DNA, 509 bp, Cannabis sativa
attattattattattttttattaacgttatatgtatggtacattcttaatgagtattatctaagtttaattttttttttatctaattagtttaacctctcatttttatattatatgggttagggttattccatcggctcaaaaaaaaaaaattaataaaaaaaaatttaagcaaaaaaaaaattgaattttacttaaatattttgtatgtaaatattttttttttgatgtaagtataaaaagagatatttttcttttttaattaagtagctaaactataagcataaatattaaaaattttcttctgttattctttatattggattagtatctaataatttaatatatttatagttaaatttatttaataaccatcaacaaaagtatttcttacatatatatatatactagtaaaaagctacgtgcgaggcacgtatactaaattttatgttaggtattttctattttatttaaaagtgatacacctaaaaattaaagaaaaaaatatta

SEQ ID NO: 159429 - DNA, 546 bp, Cannabis sativa
gtcctaaaatacattctttagggcttccagtccagagagcattcttcatatctgaatctccctgaaggactgtacgttcatctatccaaattttctcatacaatgatcccacttggttatctgccatactatgctctgctggtaataccgaattgagaatgactggcatacgaggtaaaggtagtacatgaaacctttgttgtttcaacctctgaatctcctcatcgtgttgttgaatcatagcttccatttctgcgaatctttgctccaactcccacggagcctgtgacggacgaccatcactcccatcagaagccctctaaaatctttcaccttggttgcggggagaacttagactccattctctccaaccgttactagccctgaccacactatcctgactccccatattgcactaggtgtccatactataggacaaacctggcaattagtaagtcagtcttgtcaggcaacgaccccattacaaactttctaccgcacttatggattctaaggcaacacactttaaaataattaattaaaatc

SEQ ID NO: 159430 - DNA, 620 bp, Cannabis sativa
  modified_base (501)..(506): a, c, t, g, unknown or other
ggtcactcggacaagaccacttccgcacgcgcatgatagggacaatcccctgtctgaagcgcacgcatgcatggcattcaaacacgacaatgcccaagaccctccgtgtctcgtgtgctgaggttgttggcgccgaggagtgttgcacatctgaggctgcaagcctgtcgtgcgtgcacgcgtatgggcaattttcagcctattttgactgcacgtgcagccttgctgacaaccacacccctaacccgaattttgtgggattttttcaaattttttgaatttttccaatttcaaaccttaaaaattcaaaataaatattatttttaatacatttaaacttaaatattaattgtaaattaataatatttatttttttaatagattattattaatttttgatattttgagatttaaatttaaaaattgattattttattttttttttaattatggttatattttaaaattttgttaatgtctttaatatttatatattatttnnnnnnaagatcagatattttaatattagctatattttaaattaaaagataactttattcttttaatttgaaatattatattaaaattatcatataagatgaattagataattaataaat

SEQ ID NO: 159431 - DNA, 501 bp, Cannabis sativa
ttttttttcttaatcaattttttaaattacgaccatacccggacccaaatcccctccccacagccctggcgctgaacccggcttctgacctgaacccgaatctgaccccggacgtagacccgagttaaataaaatcaaaaaataaaaataaaaataaattttacataacacacttttgttttctgtttttaaaattaaaaaataaaagtggttacagaacgtatttttattttttaaaacaaaaattttactttcattttgtaattaaaaaaataaaaaacaaaagtgttaccaaacgacacctttacaatttgctcaaagaaagcatatccgctaactctaatattttactaacttttacaactcttctacaagtgagatttatcaaatattgtattggtataggactctaacaatttacaaaggaagcttaccaaatttctaccaagaatatagtatggttgcatgatcgtcttgaaaaatgggtgttcagatgtgaaa

SEQ ID NO: 159432 - DNA, 505 bp, Cannabis sativa
gcattaaaaatgaaatttcccttatataattatattataaaattataatttgtgtgttttgattttattgtttttgatctaacattgattatagatatcccattatcaattgtttatcaatgttcttacacaatttatttcgtgtttcaatcgagaattgatatcacaatcaatttttttttaagttcttaattttcggattggttttgccatgaaatctagaaatttaatctttaatacccgaaattagtagcgtagatcaattagaaattcaatccttagcaaaacccatcaaaaatcgcgtgttttcgtcgattttttggccgaaaaacgggactggcccgactagggccgaaccgggtcacgtgacccgcatccgacccgcttgaggttgaagaagactgtccaccatcaacgcccactcgcgcaggcggcgcgtgggggcgcgtgaagcctcgtgcgacgtcattttttgacgttcttttttccagcgtccttaaaattt

SEQ ID NO: 159433 - DNA, 613 bp, Cannabis sativa
ttccacctatgggccaagcggtagtcagctagaccttatctagtaactcgttaggaggggttatacctagtaactccacccagactaatggttctggccaagtgatcggccaaaccaaccagtcactaagacaacctaatgcatctgtatttaatagattgggaacaactcatgatctcagggatgacctgaacaaaaggagagggttagacgaatagtatgtctcgccaaccactcagcccgggactcgtgctcaaaattcatctaaaaaagatcctgacgtgaccctggttggcctcttggccaaacaagttcatccatccatgcaagcacagttggatgaactaaaaaacatgttccaaggtctggttggtcagaagaacaatgatctcgagttggatcgagcacgtggatccccttttactccaaagattaatgtgctagagttgcctcataagttcaagatgccgacctagaagatgtataccgagaaagaagatcccttatcacatcttaaatattttgaaatgcaaatggacttgcaaggagtacgaggagatatttgttgcagagtttttcctaccactctctcggaagctgcccaacaatggta

SEQ ID NO: 159434 - DNA, 576 bp, Cannabis sativa
  modified_base (152)..(152): a, c, t, g, unknown or other
tattaatttaagtttttagtattttttttttaattttgtacgatatatctttattatgtgctatgatatattaataaataaaaattaaataaatagagtggtacattgtttttatttgctatggtatatcatgaaagaaagagaaaaaaaanttggggaagtttatttaagttttttttttatatatttatttgactatagaattgttgtagtatattcatattactctaaggtataatatttttatgttatattatatatcttgaatgaaagaaataaaaataaaattaaaagaatacatatcagcaaaagtaaaaaaaggatataatactcatattactctaatatatagtatttgtatgttatattcatattactctaaggtatttttataataccttttatataatgaatggtattttaggtattgaaaagtaaaaaaaatgatatttgctttattattttaaaaaaaatgacattaactattagtaaagttataaatagaactatttacttgtatttctcttttttttttttttttttcaaatccctaatttctttacctctttttctctc

SEQ ID NO: 159435 - DNA, 591 bp, Cannabis sativa
  modified_base (536)..(541): a, c, t, g, unknown or other
attcaatacattttcacacatttttcttaaaaaaagtgcatgatgtcaaataatttattacaaaaataattttaataaaaatgatattattataacttttttttattaaatattgtaaatgactaccttattagtaatataataaatacaattcaatggtgtaaataatgtaaaatataatgataataagaaaatagtggatactcgaaaattgattaaagcaatgattggtggtggcaaccacgggtatatatagattaaaatatttagaagttgtgacattataatctttatgtttttatttttggtaaatgagagtgatataattaaatactataaatagcaatcaatatcaatatatataagaaagattaaaaaaaaaggcatgtagaactctaaatgaactatcttcaatcttttttcaattctctatttttttatttatttaataattttattaatttatcataactattaattaattgtacccgtgcttataagttataaaaaaaaatcaaaagacatatatataattnnnnnncactctatatgagttatcttcaatcttttttcttttcttatttatttaat

SEQ ID NO: 159436 - DNA, 525 bp, Cannabis sativa
atatatggataaattttaattttaagtaagttatggtattttttttattttaaattattatgtgggtgtttttctccattttttttaactttttttttatattttcccagaaaaccattttctctcttacctctttgtcttctcctccaccattgttcctcttcacctctctgtcttctcctccatcttcacccctttcattctcaggcgaaggttcttctaaaactcattttcccttctctgaatatcattaatttcacacctgtatagcattgatgtgggtcattggtagcaagtaacgcaccacctttgttatttgtagcaagtaacgaatgacccatgtccaaataaactcgccccacttagagagagagagagagagaggaggcattgatttacgccgccgaagcgaaaagaggagcctttaatacatcgtgaggtccccgtcgtccttgtatgtcctctgaccccttttcttccgacagccacctctgccctctcctctggttagttttcttgcttcta

SEQ ID NO: 159437 - DNA, 602 bp, Cannabis sativa
  modified_base (42)..(48): a, c, t, g, unknown or other
  modified_base (546)..(552): a, c, t, g, unknown or other
atattttttaaaaaaataatatgtagtaaatgtatttttatnnnnnnnattagctaatttattatatttggccaatttcttaattttttataaaaaaaatagaaatttactaacttagttttcaaatttatggccattttgaatctcaccgttttatacaaggcattttttcgtaaatatgaaaaaaaaaatatagaagagtttactttttatatcataaataaataatgcaaaaaaaatatggaattgaaaaataattaaagtttaaaatatggaaaaaaaataatagtttttttttaaaaaaaaaacttgtaataataagattcgctggaaaagtcactggcgctggaaaagtcatcggtgctggaatatttttataattaattcaagaaatcaaatcaggtaataaatattgaaatctgaccatatataaaatattacgtaattaattttgtccagattcaatcaatataaaatattcatttatcacaaaatctattatttattttataccttaattagaaattgttatagtgagatttctcnnnnnnngaaactcgagaccagacccctacttagaggacacgtatactcagattttc

SEQ ID NO: 159438 - DNA, 585 bp, Cannabis sativa
taatgaataactagtctgttgagtaaactgtgaaggtctctcccccacttcatctgttggcgtcctcgacaacatgcccacacgcaaatgcctgaccgcccaaactcttcatccacaccatctaaaagtgcatcccggaggatgtgactcatgagtcaattatctcatattgcacccctgttgatttctatctccatgcaatgtccgctcaaccatccaacggattcacacttgcatcacgcccttctggctcccacaatgtactaagttctaatgatgcagccctctggccatcaagcaaactctagcaccgttcttgaccttcgcaggaaaacatgactactaagtcttgctggcacagccctctggcttccacacaaactctagcgccatctcacagcttacgctctgtcatctagccctgctggcttctttgatgcatccattccacaattctgcatctctctcgatgcctttgtgtgacttacgccctctggcgatttgacaagccaacacattccactcaactgcctcggcgcttcgatatggatcaaataaaaatcacatgcgaacacctccaagtac

SEQ ID NO: 159439 - DNA, 588 bp, Cannabis sativa
tatttttagcctattatttatgttatttttaaagttaattttcttctttattatcatttttttggaatagaattatgctggttttctttaatttgaggtttcaacacttgaatgtatataaattggtcaattttttttttttaaaaaagataatctaatagagaaaattgtgcaaaaaaataaaggtgaaacttcaagcctgaatttgactatgttttgattagattctgaaaaaagtcaaaacataaaagctttagatctcttttgtatctttcctgaacatcttgaatcgtccaatttcgagaaatatcgagagagagttatggccaaaatacgatcagtcgatgcagtagaaaacttactgcccaactaaaggggagtcatgcctaggcatggaaatcccatgccacagcctgccccttctaattctaagcagaataggtttttttcagcattttttttaatctttttttctcatattttggctataatggtgtgtttggaaagccacaatgtaattgaatttgtgtgtaattggaggtaattacacaatttagcatgtttgtctgaccatgtaattacactgca

SEQ ID NO: 159440 - DNA, 647 bp, Cannabis sativa
aaaagaaatacgacactgaggagactataactaagaagtattctgtcagccgctacctcaaattctagatgactggctataagtcagtgaaggctcagtctcatgaacttcaaaaaattgctcacgaaataatttctgaaggtatgtctttagatgaacaattccaaattggtgttattattgataaatttcctctaggttggaaagattttaaaaatattctcaggcacaaaacaaaagaattttctttggaaagtctgatcactcgtcttcgcattgaggaggaggctcgtaaataggaccagaaagaagaagtgcttgttgtgtcaaacaacaacactaaaaaatctagtgcgattttgaaacccactaggaaaaatttcaagaatcagaatcgcaagcatgctccaaaccgtaacaataattctcagaataataatcagaattggtttccaaggaactaaaacaaacaacaacaaccccctaataagaatgacccgacaccatttttgtgctttctctgtaacaaaccaagtcatatggcacacaagtgtcggaacaggtctagttctgctccgcaggctaacctgactgaagagctgccttatacagctatgattttagagatcaacctaattggtggatca

SEQ ID NO: 159441 - DNA, 769 bp, Cannabis sativa
  modified_base (742)..(743): a, c, t, g, unknown or other
actaaattgtacctcctgaacttttatccacgttcgatttccattagtaaaattgaacaaaagtccttgagtccaacgatctcaataattcaaagggaattcttaacgacttgaaaagtttaagggttataatttggtacatgtcaaagttcgggagtaaaaatcataaatagcctattattatttatgtgataattaaaaaatcataaaaaaaaatagttatatattttgttgataagataaaaaatttatattaagtattaatcattaattttatcttttatttattttctacttacattttgttataggacattgttattgggcactagtggtgtttatcattatctagaggtgtagccctatgattgattagtgatactctttaaaagttattaatcaaattatacgagacttgatacttaattgtactaataaaattatgacacctaggaagatactaaacactaatagtgccttttttcattactctattttttttattaaaatgtatattatattaataaaaaattatcagtaatatgtttattttcttaaaataaataataattaataaatattttaatataaaaaatcaaaaaataaacaaaattatacattatttatctatgaaattagaaaaaagattaacgatttaatatataaatttaattagtatataaatattttttttctaaggataaatacattactgtgttctaaatatatatatatatatatnnatatatatatatattactagaaaaaa

SEQ ID NO: 159442 - DNA, 607 bp, Cannabis sativa
gcccaactcgctactttttccggtgacatttttgtagctccacccctttccggtaatatcgtgtactgttttgacaaatagttggcatgggtgtgatctactcgtcgttgtgatcgttttaatatatgctagccatattttttgtaacatttctggtacaccaacttttaccgccaccgatatttcactgcttaggtgaggtttcataactctaaactttaaatacagtgatattatatgtcgttggacttgattttgaatgtagaatgcaatgatgataattatttaaccatttgatggtacaggtgaaagtaatatataagattagactaaataattggagctcgggacttgagagcttaagatcgtcttttagacaaagtttaacgacttgggagaggtagggactcagcctgattattggacttgatttttctatgtgttgtataacatgagacatattctaatttttatgatttgtaaattgtttgaaaaactgaaaactgaatctgcatattttttgggttgttctggggcaccaagtgccaaatatatttttgaataaatatttatgcatgttatgatttttgggtttactcaaaataca

SEQ ID NO: 159443 - DNA, 768 bp, Cannabis sativa
ggattggattgaatcgtgcggattcgattggatcagatcaaatattttatgaagacccctactactcacaggtaagaaacattaatcatacaatttatttctttgataacattgtcgatagtgaagccgtgattgatggagaagtcgttgggtccgtagttgtcattgagtctgtgggtctttgtgtgggttgtgggtcgattgtagagagagggagagggagaggaagagagagagagagattctaccaatattgaatagtttaggtttaaaaaaattttagtttaataaatgcataattaatcaaacttccctatataaattagggattttgtcaaaaaatatatgtaaaatataaaataattataaaaataacttaacaacactcaattacaataatatcttgctacattattaaaaaaatacttcaattctaaaataatatgcttgaaattaatctcgattttttttttttaaaattttcttgcgtttcaaaagtaaccttttggttgcttatgatgttgataataaaccaacaagtagctttttcatttttatattacactttaataattaattaattatttaggttatattaataaattttgagtaactttcaagtttatttttgaaaataatgagttgtcatccagtaagctaccattttagtgaattgtattttaagaaaatatatatcataaatatttaagtcatctgtattttttaaatataaattaatatatgcattatgattagttaaataaagaa

SEQ ID NO: 159444 - DNA, 504 bp, Cannabis sativa
gtattgggctctacctaaaagtaatttcgttattaacataatttacaatcactgagattagtacgtgatatgcatttgatttccacatgatttatatttttcgtatttagctgcaagtattttttaaataaacaaaaaaaaaaaaattaattactttatcgatacctagtacttaatcatttttgtttcacatttttttgggatttcaataaaattattttcttatgttaatttttgataaaagaatatcctaggaaatatatgtaattaatctaaaattaataactttctaagattaatcttgcataattttaccaaaatctgatacttattattttttaagtttttttttgggggggtttcgtaaaataattaaaaaatatataattttattgtggaagtttatagatattaaaagatcataataaaaaattgtagttatgaatatagtatgataaaacaccctgctattacacaatcaacatatcacatataaatagaata

SEQ ID NO: 159445 - DNA, 597 bp, Cannabis sativa
gataccatattgctctccactgttgaacatcgctgcatctacattcagcttgacgctattaccatgaggagcggtccatcgctcaacaacgtctctagcccgaagtaaaggccatgacgattccatatcggaactttgagcgcatctccattggtcaagataacgatttgcaaatgcaacaatatcaatcgggttgaaacttttccttttccaaactaactcatttctagcaccccaaatagcccaacaaaccgtagcaactttgcagcacaggtccgctgctgctacactgaagacagccgtgcaccagtcgaaaaaattggtccctgctggtgtgaccgtgcctatccccactctgtcccagcatttccttgtgacccgacatgtgaccaaaatgtgcaagatagactcatcttgttcttggcacaacggacaaagagtactgacagccacatgtttagttcttaattgaaccaaagtagggaggcagctcgtgcaagctcgccaaaccaggttctgaattttcgaaggaattttcatgctccacagttgatgccagaagcttgcatcttcttccccataccattgacccttcaa

SEQ ID NO: 159446 - DNA, 528 bp, Cannabis sativa
  modified_base (50)..(50): a, c, t, g, unknown or other
  modified_base (473)..(476): a, c, t, g, unknown or other
tatattccattgagcaatgttcaagagaccaagcccaccttcttttttcnggtagcacaacttttcccaaccaacagctccagctccttccattaagcccttccctgtccacaagaatgatctacaaattccttctatttctttaatgacttttttaggaagaaccatgatttgactccaatacatatgaattgtactaaggacagaattaaccaacaccaatctcccagcatatgacagatttcgggttgcccatacctgtattcttttagttattttttgagcaagagttacacaatcagaagctgcaattctccttgcacaaatgggaactcccaaatacttgaaaggagcttcctgcctcaagaatcctgtcatgtccagcacccttttaatctcgttttcatccattccactgaaaaagacagcagacttacccttgtttggtgttaaaccagaagtgtttgtgaatnnnntgagcccttgcatcaacaaatagacacttttaaagtctcctctacaaaacaa

SEQ ID NO: 159447 - DNA, 524 bp, Cannabis sativa
  modified_base (169)..(170): a, c, t, g, unknown or other
  modified_base (265)..(265): a, c, t, g, unknown or other
aaagaggctctatggttaaaagggcttatggaggagctgaagttaatggaaaaggtgcctataatctactccgatagtcagagcagcatctatttgtgcaaaaaccttgtttttcatgacagaacaaaacacattgagataaaatatcactttattagggataaagttnnacaaggacagatcgggatagacaaaatacctactgaagtgaatccagcatacatgggcacaaaggttgtgtccctcaataagtttaagctttgcntaagcttattggggattgacacaggtttgtaaaacctttaatgggttcgagctaagaccctcagttacactcaaacaacatcaatacagtgcatatggggatttaggtggaaattgttgaaagtaaatccccacattcactgtaaaaccagaacagttacgataagattacaagcagtaaaaacttatgtggcctttggcctctaaacaacctagacaggttattaagttagttataaagtttgttagaactttataac

SEQ ID NO: 159448 - DNA, 734 bp, Cannabis sativa
cttggagtgttattaatctcaatgcttgaggagagttctccagagttatgttctccaagagtttactcctcaagtgagtttttagaatctgagagtgggagctcaagtgtatgatttcgtgagtatcaagtttaggatccctttacaagtgatttcacccccttatataaattttcatctaggatttaaaatcccttattcataggtgcaccttcccgtaactatagttgggttaggttcaagatacaaaataataataataaattaattatttaaaaaataaatatctcttcacttatcattttttgattatattttcgaaataactttaagagcacgtgtctctcgcatttagcggatccagatggtcatgggtacatgaggggagccaattgggtcggttcgtgcccatcaggtccttgagataatttgacagttgaggagctctttgcgccttagcacctgatggagccaagagcttagtgcgcccaaaatgctcctctttggccaaagtgctcctccttggccaatgagctcctctttggtcaatgtgctcctccttggccaatgaactcctctttggccaatgtgctcctccttggccaatgtgctcctctttggcccatgtgttcctccttggccaatgagctcctccttggccaatgagctcctctttggccaatgtgctcctcatttggccaatgtgctcctccttggctaatgagctcctattt

SEQ ID NO: 159449 - DNA, 527 bp, Cannabis sativa
  modified_base (483)..(486): a, c, t, g, unknown or other
tggaggcttgaagcgtggacgttacagattgcgactcatccctaggacaatgtagtgttaaaaacagatagtttggtgtgtgtccaagcagtccaaagtcaagtttttatgtcgtcacaattcggtcttattgttcaagatgttaggaatttacttttggctttatcttttgttgaattatgtttcgttaaacgatctgcaaacaagttggcttattacttggcaagagactcttgttttttttacatgttgtgtgcttcagttggaggattgttcgtctaaagtgcgttctattattttgaacgagtttattaattaataaacctcctaatttatacaaaatatatatatttatgccatatatatagggacatgattttgtcccgtgattgtactttcacggaatgtattccatgatgtatgtcaaccgttagatgggagagttatttgatctgacgactgagattgatctaggggtaattnnnnttaaaaaatagtaacgtaccctgacactcgtctaatgtacc

SEQ ID NO: 159450 - DNA, 733 bp, Cannabis sativa
gacgtaagcgatgcataatgactgaaaacatttagcgtataatatacaaactaagtataacagtcgggtgaactaaaacaactaatagcgaggcgcttatctcgctataggaaggcatactcttaatactttcatcaataagcttcagatatcttttagtgaggttattagtcttggcgaatcagtcctctcgagtagaagctgacattcgaatgatgactgctgaagtactctttattattaagaactgtgattgtcaaaatgaagcgttatgccttcaagcgaagaagcaacgaggcgtacatcatcaacctcggaaagataggggaaaagctccaactcgctatcaaggtcattggtactgagttcctatcgagacatcgtagaacgttatgatttaaaacgtgtttaatacacgattatcttgacctaataaaagcggattaatcacagctgtgtgatattcaaatagaggcaaactccacgattttaggggaaaattgtagtaaagattacagtcaactttgaaattaactgcctgactatgtaattatatttagaggcaagttatactgaaaaggggacgaaagattgataagaaaaaaagcccttagcaaccatcaaaaatctaataagatggactcgtggactatgcagaattttaactgcaaatccacgtaaaaaaccctgtgttcatactttatttttctatagcttttattattcatgtgtt

SEQ ID NO: 159451 - DNA, 817 bp, Cannabis sativa
  modified_base (736)..(741): a, c, t, g, unknown or other
gatcagctatctggtgcaggaattccccttgtcacgcctgagggcaacacctacacgctggagtcaagttcggattcaaagcatctaacaagaaagttgagtacaagctctaattgctaggttaaggctagcccaggagatgaaggcctaacacattgaaatctgcagtgatttacagctggtggtaaatcttgtattcggagaatacgaggctcgggggagaaaagataatagcatatctgagcaaaatacatgatctgctcacacaattcaaaagctacggtctcagaaaaattccaagggaagaaaatacaactgcagacgcattagctcaattggcaagcagcaatgtaagtgacaaggcgaatttggttcctatccagttccttgaagagcctagcatcactggcatggaagaaatcgaaatgattgatacttccccaaactggatcacaccaatagaagcctacctcgactctgggaaactcccagataatcggaatgaagcttgaaaaatgagaaggaaagctgcacgatatatcatagtagagggaattatgtacagaagaggattctcaatgccattgctatgctgcccgtagaactcgatccaccttcccacagaagattgatgtacaatcaagataccaataacatactccaggccgaatcacttgatgaaatcaaagagaaatgagccacttcaaactcaaagttgatggcccatcaacaaaannnnnntcgatatttcaacaaacaagtgaaggctcggaaattttcgtgggagatatggttctgagaagggtattcctaaaca

SEQ ID NO: 159452 - DNA, 691 bp, Cannabis sativa
gtgatgtgtgatgttttgttgagtatgtgttatgatgttgaatttcgtaatgtctctgtttctgtaacttggaagaatcttcttctctcatctaacattggatttattgttgaagacatcaaaagtataacatttttttggtaaatagtccatttctattagttctgcaatttgtttgtatcatttattaaagagaaatgctaaaaagtatcatttctagtacatttttacatgttaatattgctattggtctattggttcaattaagtattgagtttaatataatttaatataatgacttttagagagtatcgtaaggggacatgtcaagagatgctagacaccacttatttttaatattaatttaaaaacatgaagaaaattcatataaactaaatatcatccatttattttagttaaatactaatggaaaatgcttaagtagagtcataaaaaacgtctatacatacagatattttttttttcagtcactcttacatttaataccaatattttattaattccttttaaattattttttttaataattttttgatatcaatataaggaaagttgcttgttttaaaaaaaaataaatagataaagaaatttattaattaaatatatgatacacccctattaactttaaaagggatttaaaaaaaatacaaaataataataactgccaaaa

SEQ ID NO: 159453 - DNA, 714 bp, Cannabis sativa
  modified_base (392)..(392): a, c, t, g, unknown or other
ttttttaaaaaaaaaatctttgtcacgttattttgtattaaattctataagagtaatttgcggcataaattcctaagtttaactcttagttgcaagtaaatacctaagtttaatttttagcggtaataatacctaagttatatttctggaactctgttggtacctaatcgttaaatattaacccattatatccacgtgtcattatcttattggtatatttgattttttttttaaataataaaaatttattgactttgaccaatcaacgattgccacgtggcaatttatttaatcaggtacctacagaagtttcaaaattataacttaggtattactaccgccaaaaattaaacttaggtatttatttgcaactgggagttaaacttaggtanttatgccgcaaattactcaattcaataattagtttaattttattttcaattttttttttgtaaaaaaatatttataattatttttaatttttttaataaaatttcaaataactttttattttaattattttatcttcaaagtacatttttaatatgaccaaaacaccctttgttgtaaaagagttataccattgtgaattatatattttgattcattaccgtttagaccttatattttttttgggataattgcggcaaaagtccccaaaaacttaaagttgatgccgattagtcctcaacctcaaaaattggcggtgaaaat

SEQ ID NO: 159454 - DNA, 500 bp, Cannabis sativa
ataaccaagttgttgcatcaatggttatgcatatctcgtagccgatcaatctagttctttcgcatattgtgatcaatctttcatgctttgataacgtgagcatgaacacatgatgttgcgttcaacaactattaacaccttaacgattcttatatcaaaacaagtgtgtgttaaggatagttttcttccagtagctagtagggccggcaaattcctaaagaaccttccatgtctattcggacaatgaaagcccctacagtgcatacttttgcatattctgatcaatcctccatatttccgtgtccactccattattccatataaccaagtagttgaatcaatggttatggtaatctcgtagccgatcaatctagttctttcgcatattgtgatcaatcttccatacttcgttaaggtgagcatgaacaccttatgttgcgctcaacaactaccaacacctaaatgatttttaaatgcaaaaccagtgggtgttaaggata

SEQ ID NO: 159455 - DNA, 693 bp, Cannabis sativa
ctaacttactaccttgtctcctctcttactacacacataaaaattaaacacataactcttccttgtcccaccaatcatccaacttatcaacttatcaatatcatcatactaaactacctaatatccaacctatacaggtataaaccaatataaatttattctcaaaccatcagcagtatcagagctccgttcgatcatatatccctgggcctaatcttttccactcatcaacatgagtttggagtccaatcgctcttctctacctcttctaattttccaatcactcagttgtaaatgaatcaatcccaataaaagtaactgtcaacctatattcttataaatagagacagaatccatggaaaaatgaggaaaaaagatagagagaaattctattatttcaaataatgagatatataatctgtattctaaaaaatatccctaataataaggactcgtggagtatgtagattttaactataaaaccacataaaatatctggtgttatttattatcattaaattctatagtgtatttattgcaaaaaaggctatttatttagttaacaaaaatataacgtccccacttcaagccttcattgggctcttacacctaccaaattatggttcttatacatgagtacgtcactctagctgcttcatggaataacgactaaccctacaaaccaacacgagt

SEQ ID NO: 159456 - DNA, 732 bp, Cannabis sativa
aggcgcccatactagttgaactactagtactagtctcaccactagttcctgggttactgctggcaaagcgtgcagggggtagcaactaaattcactgtctcgtactgacctaacctggcatgattgcccaagtgcaattccacaggtcttcaacatatcgcctatatagcctgagatagatcgcaccttcgattctatcaactcagcctcaaaggtgacgttgggatcctgaggagttttagacgtacgtggcttaggaggcataatttcgaaatccaagtcacctggttcaaaagcaattgtgacgttgggcaaaaaaaaggctttgccacaggaataaaggacacgctgggtgattcttgctaggctgcttctcgcaagaatcggcgtctaccttcgaatatttcttgtaagaagcacctgtagcgactagaaatatcattttatcgggttctcactgtgtgttccctagccctagcatcatttagctctaatttggaagtgggttttggtgggttgggtttatatgggatggcccgattctgtaggaaactcaaactctaaaacttctggatgacaaattccaaaactagagtggaacattgctgccatcaaaaaatagtcccaaaccctggagagaatttaatcaaaccagaaggtaatgagttggagatcttaaaacaacctacacattgcctaaatcctagtacgaacagttttaaccctaaaaaa

SEQ ID NO: 159457 - DNA, 563 bp, Cannabis sativa
  modified_base (41)..(43): a, c, t, g, unknown or other
aacttaaaagacccactatggagcaatggtaccatcttcannnatggagaacatcacatcgtcaatgccactcccgccagaaacagagtatgagcatcgacacctgtaataccctaaaattatgagaatggattagcaaaaccctaattagataattatgtattattgtgaaattatattattatataatttaatatatgtgaatttatatgatttatgacatattaagaccctgttggtgagctagggacattttagtaattttgactcgagaagggtaaaactgtgaatttaaattatttatatgcttatggactatattattatatagtatacctactacgtcctttttcaggtgtgttctgacaagttggcgcgatatagtcacaactgggtattttgggccgaactaggttcgggcccgaaatacatatttgggattaataattggcatcttatttatatatgagaaatctgaaaaattatttaaataggtgttttgtgttggatatgacttaaatgcccttgaatgttattttgcatgttatatggccctaggggca

SEQ ID NO: 159458 - DNA, 732 bp, Cannabis sativa
aggattttcatcttgcatatgattctgaggttcatcatgagcttctattggaatttgttcaatcataggatcattagtacgagcggaagcagaagcaacaggaacataaatacgttcttccctggatacaatttctcttgacccttgacttgaaccaaattcatcttcaaaatagacagctctatctgattctatcaacttggtggtgtgtgaaggacaatagaacctagaacccctcgaaccaatagtgtagtctacaaaatagccactaatagtcttcagatcaagcttcttagattgtgggttataaggccttacttcagctttacatccccaaacatgaaaatgacccagactcagtttctcgcctgaccacaactcgtatggtgtctttgggacagactttctaggcacttgatttaagatataagcagaagtccttaatgccttaccccataaaaattttggccagctagaatgaattaacatacaacgcaccatgtcaagaagtgtacgattcctcgtttcagcaattccattttgctagggtgtccctggcattgtatatcttgcatcaatactacattctagtaagtatttggtcaaaggcctggggttccttctaatttcatcataacacccataatactctccacctctatcggaattgacagatttaatcttctttcccttttgaagctcaacattcgtcttgaaattttaaaagcatct

SEQ ID NO: 159459 - DNA, 663 bp, Cannabis sativa
atcaatgaagcatataattcatttgacctaggttctattcttcattagtagattaaagtaaaacctaatttagtggtcatctaaacaagattaaagcaataaccctgacattgaacatagaagaatagaagtaatttgatatatgatggaaactagaaattagcattcaataataaaattaagaattcatgtctcgagttttgaaataatccttaactaaaagaaaactactcagaactagacattataacaaaaatcataataattagtaatagtagaaagagaagaaaagaactagaatgaagaacacttcaaagtcgcaatctccgtctcttccttgctctctctctaatttgtagcttttgaattaataaattcgtagcctaagatgccctatttatagcttgaaaagatagatcaatccccttagaattaggattctatttatagtgcttgaaaagatagataaattcctttagaattaagattctattttagtattaggaaatatcttactaaaagaaaagataactcataaaaaaaaaataaaaaaaatctcaactctacttaaaaaaactacctttttttccgctatctttttttttttttagaaatttcctactgcgatgactgatagtattttagccataactctctcgatat

SEQ ID NO: 159460 - DNA, 550 bp, Cannabis sativa
  modified_base (404)..(407): a, c, t, g, unknown or other
cgacagggtctcgatggcctgacttggagaggcagtagcgggggtcgcctcaggatgaggggcatcggcattgggaacagctagaggaggaatttgctcttggatctcattgtccgaaacctcgagatcgatagtctcggccagtgatttcttcttatgggcagtggttttcctttgcttctttggaggaaccactttggcagtagtagggactccagggttggatgtccttttcttccccttacggtccaggatgtcttcataacccatgtttgcaaaacaagacgacgcgttacaatcattataaaagctcattaaaaaggggaggagtataattttctacctaagggatttaccaaaatcactagaaggcaagctatcactagatgaaggggtagaaggannnnaatattcgctaaaatccctacaacctgtaatttttaatatataaaaaggcttgataggttctaaatcccagctcgcatctatatgacctgccctatcttccatagtatcatattgctcggctataccataaaatgactcgtga

SEQ ID NO: 159461 - DNA, 801 bp, Cannabis sativa
  modified_base (310)..(311): a, c, t, g, unknown or other
  modified_base (369)..(379): a, c, t, g, unknown or other
  modified_base (565)..(566): a, c, t, g, unknown or other
  modified_base (594)..(599): a, c, t, g, unknown or other
  modified_base (686)..(698): a, c, t, g, unknown or other
aaataaatcaaccctaaccctagtagaattaatataaaagaagagaaaggtctcataatccaactaatgaatcttgacttagttttcattatatttgacaactagagagtttgaaacttcttcttcttttctcttctctaattcgaaattcttagttttctacactatcaaaattcgagcctatagtgatagtgtacatgcccacgcaagcaagttggtactcaatcatagtgtataagactgtgaagaattcaatcaactgaaggagaaccgggctcagatcttagtgatactctgctacagaaagganncaagggttagaaatctgagcggaatgagtcatttatttccgctgcaaccaatgtaagnnnnnnnnnnntttatatgtgtttaaattccattgttttaaaattcatatttaggatattaaataacatacatggtagtaaatctagatcctggtaaaataatcaccaacagaatctatagcttctatccagacatagaagtgaaatgatgatttccttcgaacttggctatatagagataaatgatagagcgctcnntttagtgattatattagttcactgaaannnnnnttataggttgctaagtgttttaatgataaaatacattgaaaggtgtaacgataattttgtctttactcaatgtaaatcatctatagnnnnnnnnnnnnnattaggattataacaaatggatagctcatagcgtatctattgttaggaatattttaccaggatttagatttactaacaaatatgttgaattaacatcctaaat

SEQ ID NO: 159462 - DNA, 878 bp, Cannabis sativa
  modified_base (743)..(752): a, c, t, g, unknown or other
gttctgtgtccctagtctggttccatgtttcgatttgagttaaggttcgggttcgggtcccgagtctaggatggggttgggatctgggtgtggctcccaattcgcgtgtaggtctgatttggagtctgcgtcctggtccggttacggttctggatctaggtccaaattcaattatgattccaagtccaaatcctagttccagtcctgatcaatttccggttttggttccaatttttgttcatatggtacgggttcgagtccacttttgggtttgggacttggttcaggaggcggtgtgggttcgcgtcctaggtcttgcgttaggttgggtccaagacccaatttcctatcacgatctgagtctggattcagttctgggtctaagtcctttgttttgatcttggtctgggttcgagtttgtgtccgagtccgggtctagctttgggtctgattctaggtgtcagtgtttgagttcgggttcgagtcggtgtccgagtttgtgtccaggtctggaccccgatgtgggtctaggtttgtgtccaggtccaagttcgggtcccgagtgcaggtccaagttttggtctgggtcaggatctcggtcaagatctaggtcaagcattttgatcccagtctggctcttggtcaaagtccaggtttgtatctggatccctatctaggtccaactctatgtttgggattgggtcccggatttaggtccaggtccgggtctcagttccggtctnnnnnnnnnnccgtgtccgggcacgagttccagtttaattttgggtctgaggttcggtctgtgttcggttctagctctgggtccgggtccttgtcacggtcctagtcttgttctaggttcctggttcggcgattct

SEQ ID NO: 159463 - DNA, 603 bp, Cannabis sativa
aaaaagaaatctgaataaatctgaatttatctgaatttaaaataatttaaaatttataaaaatttataaatttataaaaaataaaaacttaattaaattaccataaaaaatattaaaattcccttcatatttatttctttaaaaaaatataatcaataaaactatagtgatcgccggagttgtcactcgtgccggaaaagtcattggagtttgctgccagcaccgaaaaaagtcgtcgaagtagctgctggtgccagaaaagtcgacggagttgctgccggcgcagaaaaagtcttcagaattagcattgtcgctagaaaaatcaccaagaaactggtttcttgatgaaaaaatcactttctaagaaacccgcgtcttggtaattttgtaggtaattttaccggtgacaatgccaattccaacgactattctggagtttgatgtcggtaccagaaaagtcgctggagtagttgccggtgtcggaaaaatcaccggaggtatttccggcatcaaaaaagtcgtcctaattagcaaaagattagaaaaatcaccaagaaagtggttttttcgtcaagaaactgatttcttcaccaagaaagtggt

SEQ ID NO: 159464 - DNA, 574 bp, Cannabis sativa
actcgctcaaccaccatcaagacgggatgtatcgaaggggaaacctcccatgccttctccacgaggcggtcatgatgaagaagatgaattattctccccataggtcatgactttaatcctaagttgctaaaatggatggttgaggaatttctaagactcaaagataaacgtgatataatcacaattccagtgccctgaggattatcagcaccgcgtacccagatcacgttatctagagaggatttgtagcaggttgcattatgtgacttcatcggcaaccagggaatgctgtttgaaatgatgtatattcttctttaatctaattaactttatatatcaaattctagtgaaattattataagacaataatatttaagaatttaatgtaggcatatctaggagagcatcaacgatttgagaaaaaatttcaagttttatgacccagagcttctcgcagagaatggtatcaacgatgaaaagaagagtcagtcttttgacaatgcggcaagacgattggctgcttggttatcatcgatgaataacaactacaaaatgttctttattccttggaata

SEQ ID NO: 159465 - DNA, 564 bp, Cannabis sativa
  modified_base (28)..(33): a, c, t, g, unknown or other
tcactttgtttgtagtgactcatattcnnnnnntgtatatctttgactagacaattagcttgttgattggaaattcttctgcatcgacaattatcatagtgtgatttagatcactctcaatatatatatatatatataatataaacaatgtaataaatttaaagagacaataatattttttccttttgttttcatttaccatattttgaaatttaaaagctgtaacagataaataagagatttgattacttttttttgtgtgaggaaatgaatgccttttgaccagttacatggagaagaagaccgagaatggtgatatgcatagttggagagagattttgaataagattatggaagaagaggaagatgaaaatggagtagatgatgattatgtgtataacaaatctaaaaaataaaatagaaaaaataaatccgtacctcaaaaataggggcagttatggtcgccgacacaaccaccaccatcagcagtggtggatggtgtaaccagtggtggaggccgatgatggtaaatacggtttttttttttttttttttttacaaaaa

SEQ ID NO: 159466 - DNA, 813 bp, Cannabis sativa
atggcaactgaatttcgggtataataattaccccttaaaagttattttttagtaaaaagaggtttttaataattacatagggcattttcgtcaagatcccgtcttggaaaaaatgcgtcctttgattctggcagttatacggttccaatggtcaatatgaatcgtctcttcatattctatccgactccttaccgttagatttcccaatatttagctttcttgtcactggaatttgtgtataaaatggcggctcaagcttgtcctttctcataaacctctttagtgagatccattttcaaaatggatcaccctctttcttgctagaatgtcccttctgagttcagaagttcaccctcccaaattcataataccaggatgcaccaaccattttccatttgttccaaaggactttaaccctcaattggagccgaaaacgattgattccaaggctgatgagcttccgaccaatccaaaccaggggaacctcatatcccgccatgggagatcctcataagtgatccttgagggcacaaatcttgtgaaggctgataaagaattctagaggaatgttggtgtggtttcatatgaattcgggaaggaagttggcgtggtttctatcagagaatccagccaacccaagatctaaacctgcgccagaagacctttgagccaaactctttctggtaacaaggaatttcttgaggctggggaagagatctcggcttcaggaaatgggatcttttgatgttgaggataatgaggtatgtgcagagatcaaggctctctacatgtagccgatctttctcaagctat

SEQ ID NO: 159467 - DNA, 817 bp, Cannabis sativa
aaagctttggcgcaaatcaaatgggaggaagacgaatccaatagacaatcaacaacatcctactcttactctcacgacagtagagtacagaagagggtagagcgatggcagccctaccgttattcagaagcttatccgaccaaaagatcacggtcatacagagatagcaagaactctacccaatcacacagaccaagggattacattgtcaagataacactacctcgacggatgagggaatcagacaagggaccgattcctgaatacaacctgaacattagccctgttgaagtagctgcagtaatgaagggaatgggaaaccaagtcaagttgcctgaaaagattaaaaaaccagcagcaatgcgcgacacaacaaaggggtgtgaatgtcataatgaccacatacataccactccagaatgcataacattaaggtatgaagtggctggagtcttgcacaaaggttaattgcgagattttttatcaaacaagggaaagacgaccgtgagggaatcagacaagaggccaacaacaccaccagagccacctcagcacacccgaacatgtaatgtcatctttggagggtcagagttcagcggcgtaacaaacttagccgctaagaggaatgcacgtgaaatagtcgggatagagggtagaccaaagaaacaaccagcagcctacaacgaccagaccatcagcttcgtggacaataaagcttcagatttgcttaatcctcaccatgatgctttagtcatttctttatttatttcgaattgttttactaaacatatattgattgataacggtagctctgcta

SEQ ID NO: 159468 - DNA, 509 bp, Cannabis sativa
atttaagtttaaatattttaaaaaataatattttacttttattttagggtttgaaaattgcaaaaaaattgaatttggggaaaagtcccacaaaaatcggatttggtggctggcttcccaacagggttgcacgtgcagcccaaataggctgcaagcagccctatgcgcgcgcggaggtgggagcctgtagcctccctgaccgagattactcggtctgctgtagggtcagtgggcgagagatgcagcatgcatcatgtctgagcgagggacgtgcgtgcgcttcagacaagattttgtctgaagcacgcgagcgaacatccaccttgtccgagcacctgcgcgcacatggtgtcattcgatgacacccaatggactcgatttttctaactaccataactctctcatttttttaatcggaattgagtttcgctaaaatgaaagttgcttaatttttcacaagaaatctaaataaaatattttcagataaaaaataaaattattttcatgaa

SEQ ID NO: 159469 - DNA, 593 bp, Cannabis sativa
gaaagattcgattactttaaaattgaacaaattccgagagaacaaaactccaacgccgactccttagcaaaactggcctcgcaggatgacatggatgaattgaatctagttctggtagagatgctgagcgagccaagtatatgtgaaactgaagacgttgagatgatagatagaactccaacatggatgacacctattatcaattatttactcgacggaaaacttccaaatgacaaaaacgaggtgcgaaaactgttgtactcagtgcctcgctacataatgatcgaaggaaaactatatagaagagggtactcaatgcccctacttcgatgtgttcttctcgcacaagcaagtgaaatcatcagagaaattcatgaaggcttttatggggatcatgtgggttggcaaagtctgtctaaaaagatcattagacagggatattactggccaacgatcaataaggataaacacgagtttgtcaagaaacgtgataagtgtcaaatgttttcacatatacctcgcgtaccgccaacaaaacttagaatgatgaccttgccctacccatttgctatatgggggattgacttaattgg

SEQ ID NO: 159470 - DNA, 509 bp, Cannabis sativa
tatgatatataatccaattcaatataatacaatacaacctaatacggcgttctaaacgaggccttagagtttagagtttacagtaacaagtaacaaatacctattagttaactgtttttctcatatttattctttataatttaagataattagatttttaacaagtttctcatatttttatataataaaatttttaataaagaaaaaaaaatcatatttttgcatacattaaataaaaactcataaaatttgtaatttccactatcctatttgggactaaataattgttattatcctatcttctactatctctctttaactaaacagcctagatggttacaagttttaactgaagttgctcaattgatacaataattgtaattgacaaatcaaatctcattactacactaaaagaaaaaatataggcactaaactaatgatggtggttctaatcaggcttgttggataaattcccatactattgtcccataaataaagttacaaggaaa

SEQ ID NO: 159471 - DNA, 506 bp, Cannabis sativa
atgtaatcgaacaaacattcaaaaacatgcatgctaaaaatgtaatcacatatacgtatcattatattaagcttacctcgattccaaattaaggtgtgatggttaatgtgaatggaactacagctcgacagtttacaggcccctaagtcacaacatacacaaaactgataagtgatacactaaaccactttctagggacttaaacgtgaaactaaaagttttcctatcgacaaataccatgactaaaatctaaatatcgagagaatgttgaaaaatggggttttggaaaaaagtacccaaaaaaattgcaggtccccactgtaaaaacggtaggccatttttttgggtttttctgccttaaaaaaacgaaggtcattttcccagaaacagcatgccgtttttacagcaaaaaaaaacccaaacctcaaaactcaaccaatctgattccaaacattacaaaaagctctaaagcacctagttgagttataacaaacataatccaagtg

SEQ ID NO: 159472 - DNA, 549 bp, Cannabis sativa
aaaaaaagcttgtgtccttctcttcttttgcacttgggtcccccttctcttttcttcctctctatactttctgtatttactcttcttcaaaaaatggcagttgctttcttcatcatgatggaggtgtacttcatctattttcttctttgttgggtctttagggtacaaaatgatacgctaaaaatagaagcccaatctttttccatcttggcctaataggtttagtctttttacttccacagcagccagctggcgtactttgagtgactgggacgaaattgctgatgtgaataagtgaaagtcatttttttagactttttccacgttacttccgaaactgcccagaatgctatagcatttcttcaacatttctgtccagttttcaacttttgttccaacttttcctttgcatcacttcctttttcctagcaagttaattcttctttccacaacaacaagcaacatttaattaaaaaaaaaatacaattaacacaataagttttacaagactcaaaagttagcttactaaatagaaattaaactaaaact

SEQ ID NO: 159473 - DNA, 655 bp, Cannabis sativa
  modified_base (402)..(405): a, c, t, g, unknown or other
tgaagggtagaacaataaatttgttcctattcgatgtagattatctatagaggatctttgattatttagattagaataatggataattcatagcgaatctatatcttgatacgtatagagcgttctatataattaagagtgtaattttgaatctatagtggcacaaagaggaattaataagttggagaatttatttaataaattctagttatacttattggaagcttgattatataggcccatggtcctcacactagttgagataatactatttgcacactcagttaattgattttaattaattaattataattctaaaattagattatgtcttatttatgaattttcactaagctagggcttaatggtgaagaaaaaagattttggggtttatttgttaannnngagactttgttaagtctaattaacaaataaaataaatgacaatttttttttgataattaattataattattaaataaattgttttaacatttataaaattaaaattggaaaatatgacattattaaaagaaaagatacatgcactactacaaaaatggctttttgcttcagttggggtaaccgacgttatagccgtagacacaaatagtgatattttttgcttcgattatgaaccgatgctaattgattt

SEQ ID NO: 159474 - DNA, 668 bp, Cannabis sativa
  modified_base (622)..(635): a, c, t, g, unknown or other
aatttacatgaggaaatatatctactatctttttgaattaatcaggaaatttattaattaattaacttaatcaaaacaatagaacccatttcagaggaacaattttccaactgaagcacacaacacgtagagaaacaagagtctcttgtcaagcaatgagccaacttgtttgcagatcgtttaacaaaatataactcaataaaagataaagtcaaaagtaaattcttaacatcttgaacaataagaccaaaatgtgaggacataaagactttactttggactgcttgaacacacaccaaattatccgtttctaacactacactgtcccagggatgaattgcaatctaactcaacgcttctttgatgcctatgatctcagcaatttcgggttggacatatccaacctttcccttcttgaaagcttctaccatggttccatgatgatctcgagctacacagcccactccaaaccgaccctcttgttcaaataaagccccatcaacattaactttaatcttgtttaacataggtgcaatctaacgctcatagttccgcccctatcattcaaagaagataacgaaaggcccttcctttcctgagcaaatttgtattgatcaagcannnnnnnnnnnnnngttacaatatttgaagcaagccaactctttttt

SEQ ID NO: 159475 - DNA, 542 bp, Cannabis sativa
tagagtgtcatgtcaccgcttcatacatctcctttatatatatagaagtagatgataagctaatagatgtcaattaatttatatatattttagtttatttgttttttttttaaaatgatgtaatgctcgtatttaaaaattgactatttcaaaaaaaaaaacttattttattatatttataaacctcgtaggtcgggatcccgagtctaaaatcgctcttcaaaatacatatatcatatacatagttacataatatatttttttacaccacagggtaataacaaaatataacctaaaatgcagtaagatcgaaaccctttaggttgcactgccgcgatatgtaaaatccttgccaagcttatctcactgctcctcaagcttagctttatccatacctacacaaggtagcaaactgatgagtcgaccgactcagtaagataagcataaaacatacatagacaatgccatatcgattttatgcttaagccgtcctgagcccaattgctaagctcaccaaatggttacgtgttgggattttatgc

SEQ ID NO: 159476 - DNA, 524 bp, Cannabis sativa
actgtcacgggtctcggtctggttctggttaaggtcccagatcccttttctgagttttggttcaggatcgagattggggtgcggttctatgtcccgacccttttatcgtgtccctagtctggttcaatgttttggtctgagttcaggttcgagtttcggtcccgagtctaggtttgggttgggatccgttttcggctcccaattcgggtctaggtctgatttggagtctaggtcctagtcccgttacgattctggatctaggtccaatttcagttatggttcgggcatgggttcgggtccttgtcagggttcgggtccaggatgggtcccaaacaccaaatacgggttttgtccaagccatgggtctagatccgaatccctatctggggtcctagtctggttccatttctagtgccgcgtcatgacctgggtcctagttctgtttcccaggtccctatcctgatttttggtccaggtgctgattattttgtgggtttggatcccagtctaggttcgggttcgag

SEQ ID NO: 159477 - DNA, 580 bp, Cannabis sativa
  modified_base (244)..(246): a, c, t, g, unknown or other
  modified_base (438)..(448): a, c, t, g, unknown or other
ctaacaatcaggaataaatatcctttacctagaattgatgatctttcttatcaacttcaggggaagacggtcttttcaaagattgatctctgattgtgctatcatgagttgagaatccgggaggaggacattccaaagatggctttctgtactaggtctggacataatgaatttctagttatgttgtttgcactaaccaatgttcccgcagctttcattgatttgatgaatagggtattcaagnnnttcctcgatatctgtgttattgtgcttatcgaggacatccttgtgtattctcaatcagaagaagagcatgaacaacatctccgaaaggttctgcaacgacttcgagaacacaagctttatgccaagttcaaaaagtgtgaactttggctatctcaggtgtccttccttgggcacattgttagcaaagatggnnnnnnnnnnnatccaggaaagatagaatccgtcagggattggcaccgaaaatagtaacaggagttagaagtttcttgggtctggctagttattatcgtcggtttgtggaagggttctctaaaatttcaacacccttaaccga

SEQ ID NO: 159478 - DNA, 523 bp, Cannabis sativa
caaaagataaaatgttaattagaggggaagtttagattagaagaaaaagaagtaagtagtgtacatgtttcaattgcctaatttaaattttttacaattgaatatatagtgaaggctgattgtgtaattcaattagtgaaagcccaaaaaactattctcacttttatataggttatagattacacatatgactttaattaaaaaaagtggtaatactttattttacgaatttgttgctcgtagctttttttagttgttaagtgtcaattaagcccgctaagtgatagctcaaaaatgcgtagcgacatattactttagcttatttaatacattgtctaataatatatcgtcatgtgtttttgaattgacacttaatggtcaaaaaaggatacgacttcaacaaaattataagataaagtatttttattgccaatttttttttgattagggtcatatgtgtaataattataaatattaagtaaattattccacaaatatgcttatatattttttgaacaacaca

SEQ ID NO: 159479 - DNA, 539 bp, Cannabis sativa
ttttttaaaaaactattaagagtaatttttaataaatatttaagtttatatattttttttaataatctggtgtatttataattttatggggtgcaaatagaactattaaaattgataaaaaaggcttaacattttgacattaccgcatcttagtagaattatgagcggggtatttttgaaaattaggcaaaaattgggtcatttttgagagaggggagttttatttgtatccaccagtataattttattttattttttctaataagatttatatatatttttttatttttttttctaataaattatattttaaatattataacaaaaaattaacataagaatatacattttatataaaatagaaaatattggaaagggatatatttataagtttttcgggtgcaaataaaactcctttttgagagtcaaaatattgtcattttttaagggaaatttgactaaatatgcttacataaccttaaattttttcccctaaatttataattaccaatatttgtaatctaggtcaactttaatgt

SEQ ID NO: 159480 - DNA, 517 bp, Cannabis sativa
ggattttgtagaattattattcagctattatttgtaaaaagagattgattatttgactattagagttggctagaagataaagaacatttagaatcaaaaccacatttcttgacctctctctttctctctttcgactaaggcaaaaccaggggaaacacttagggttttcatcttatttttgtgttttcatcaaggatttgaggaagttctaaccaagggcatctatctagcatgagactttctgttcaggtcggccaactcacttgaattcgaaaacgaggtaagaatagtgtagaacatatgatatatatgcgaatgcatgtatgtgtgaaatatatatgcatgcttattgtgattcatacactaccaacacttgtacagtagtggtacaaagtgcattggtgaagtgtacaatatctgaagagtacattacggtgttaccaacactagtatgagtaggtacatggtgtatgtggtacaacacttaacagtagtcggggtacggttcataccctac

SEQ ID NO: 159481 - DNA, 501 bp, Cannabis sativa
  modified_base (32)..(60): a, c, t, g, unknown or other
tttagaaagttcttatttaggatgttaataannnnnnnnnnnnnnnnnnnnnnnnnnnnngtaaaataatttccaacagagatggccaggaagcctttaatcccagacttatatcgtgctatattatcttttaatgagtattatcccttgttttagtaatcgagcttgttatttacctatgcgttgtacaagtatagttgccccccaagtgatcaatcagacttatgactcttggtcacttgcatttcacaagttcaagttttgtcttttcggctttcaagcaaaccctttgtacacattttaacggtaaaattcataacttgctataaaaaattatttacacaattagaatgataattaatatctttactcatttattggttggataaatttgttaccgtagtaacttacatttattgaattatgaaagctattacatgatctaactgagctttagttaattaaagcataaagatcggaagagcggttcagcaggaatgc

SEQ ID NO: 159482 - DNA, 529 bp, Cannabis sativa
tcgtcctcgagtaaaacactaaataaacattaaacaagtcaatatccaaaacatgagtaattttcaagtagcttcaataacatgattatgaaaattttcacttttgcatataatcttgaatttcagttcaattacacccttgacatacttcaatttattttcaattagcatgaaactatagaatacaattaactaacaattaaaccactttttgcatgccaatggcaatcatcaatccactaaccataaaacttcttatgcttgcaatagttactattctccactaatatagattaatgcacaacaactaagaatcaaaaggtctttctaggcttgtagtgttaggcttaggtaagggtagttgaaatgatcatttaggctttcttataccgtaagcttttccaatcatgtctctccaaaatatttttcacacaattctaataccttatttttttttttctaattacatgagagacttttttttttcaacaagattgcaataactatatatttatctcttttttttttt

SEQ ID NO: 159483 - DNA, 667 bp, Cannabis sativa
aatactctattcatcaagtccatatatgtaggagcattggttagtccaaacgacataaccaggaattcataatgtccatacctagtacagaaagccgtcttcgggataacctcgtctcacattctcaattgatgatagcccgatcggagatcaatctttaagaagaccgtcttcccctgaagctgatcaaaaagatcatcgatcctaggtaatggatatttattcttatctgttagcttatttaactcccgatagttgatgcacattctcagagacccatccttcttcttaacaaacaataccggagctccccagggtgacacacttggtcgaataaaccctatggcaagtaacccctggagctgaatttttaattccttaagttcagctggagccattctataaggagccttggagaccagttctgctccaggtgctaaatcgattatgaaatcaatttcttgctggtgtggtaaacccggaagttcctcaggaaaaatatctagaaattcccgaaccaccttgatgtcttctggccgaatagagtctggccgagtggtgtctaatgacatggccagaaactctaggcatccatcacacaacaattctttagctgacaaagccgaaatcactaggatccgagatccctgaaccgaaccgacaaaaa

SEQ ID NO: 159484 - DNA, 516 bp, Cannabis sativa
  modified_base (27)..(37): a, c, t, g, unknown or other
  modified_base (186)..(188): a, c, t, g, unknown or other
ttcgccattactcaggctgatgcagannnnnnnnnnncagtggtgacaggtcagctctcagttaacaactccttttactcagtattattttattttgggaccacacattcttatgtagtagctagaatctttagtaaattggatagaacgcatgatagatacgaatcagggtttggaaccctattnnnggcagagagttagttatctccaaaaggtggattaggcctatgccgatcagaattgacagtagggagttaagtgctgacttcatagaaatgagcctagtagattttcatattagtctaggaagggatttcctatctaaatactcaggcagtattgactgcaagaggaagatggtaatcttccaaccggaaagtgaagaaccatttgtaattgttggttcggttcagggatctcagatcccggtgatttcggccatgtcagctagggagttactgcatgtcagctagggagtttctggccgtggtgatggacaccactcggccagatacc

SEQ ID NO: 159485 - DNA, 571 bp, Cannabis sativa
tgattggcccataactctagtgcacaataaataatagccctaataatgataatccctctctctatttctgtctctcttcatcttcttcactccaagccgccgacgattcctctccccttctccctcagttctggcaccaccgacgactcccttagtccctttccctcaaccccagagtccagcgggagattccctctccaacactcagtccctcaaataaaagtatacattcaaagatgaaaactcaatcttgaatcaggatttcaacaaagaaagaccactgctgccatttgactctcttttgatcccatgaatccacttataaataacaattactattattttattaaacttcaatattttaataaatcagtgttctaataaatattcatatatatatatatattgtaaataaataaacaaataatttttaaaaaataaatgaataaatattgtatgtaagataatccactaaaatgctatgtgtctcaatattataatcaatcactattcaagattttaagggtgtatgggtgtgaccaaaattagggtgtctattgtagaactaccc

SEQ ID NO: 159486 - DNA, 671 bp, Cannabis sativa
atgtcaaagttcgggagaaaaattgctaatttgataacaataatcttatgaggtatattatcaccaaaataattgtacatcgtatgtgcatgagcgggagtcatattcatgttgcactctttttctcttagtttaggtttttatcccactggattttcctgacagggtttttaatgaggcaacttgcaaatagttatgaatatgaattatatattgaactattttttccttagctcaggtttcgtcccactagattttcctaacaaggtttttaacgagaaaactttaaatcatgctaacatacttgcactttatgaagcaagtagagaatgtgtgggagtgagatcattgacataacatatttaaaaaaatatatggattacactcaataaagaagtataaacaccaaaagttctttatgaagataatatgcttgcatcactcaactaaaaggagggtacattaaatgagataattaaaacatattttaccaaattcttctttatacttttcaagagaatgcatattggtgtccaacatattcaatgaagtgtcaatcttgcagacttatgttggaattattttaccaggatcttagatttacgaacaagtatattatttaacatcctaaatatgaacttctaaaacaatatgaaataaacacatataaa

SEQ ID NO: 159487 - DNA, 559 bp, Cannabis sativa
  modified_base (358)..(362): a, c, t, g, unknown or other
tcacaactcaataataatttctagggagtttaccaagttttacgttaattcattaaaaaccaaaaaagaattagcaataacaaacatacaatatacactcattcaactactccaagattcattcttcattcaataacctaaaatatttagggaaatttacaaaaatactagcatttttcttaatttttacaaaaaaactgccacatggtagaaatttcttttatactgtccaggctcatttttttttcttttatacttcccatgtccattttttttcttttgtattgtgaacagtaacaagggacaaacgacgcctccttcctcgttgggaacgaacagagcaacaacacaacacctnnnnnaatcccaaatatcacatccacaaccacatcatatcaagaaaatgtggcaatgcttgaaaacaacacaacaatgcttgaaaacaacacaacaacaatagaatcatacacactcgaacaccaatcagaagaatgaggagactcagaaacaagagaatttgagaacgtcaaattcaacatagttgactatacgaatctgg

SEQ ID NO: 159488 - DNA, 617 bp, Cannabis sativa
  modified_base (297)..(297): a, c, t, g, unknown or other
  modified_base (375)..(379): a, c, t, g, unknown or other
  modified_base (569)..(592): a, c, t, g, unknown or other
ttaaaagtgatttttataaatattctaagcttaatttttttaaatatgaatgtgtacttattattttatgtggtgcaaatagaacttttgtaaattaaatcttaggaaaattttatttatactccaaaaatttctaaagacacctcattttaataatttattttatataaaatttatatctttaattatactaagttttttttaacttttttcttccaatttatattcttgaaaaaatataactatcaaacaaaattaaattacattttaaatattataacaaaaaaattaaaatanaaaattatatgaaatttttttagaaaaaataatatatatatatatacatgagtttgaaaaaattatgaaaataaaatnnnnntaagtattgaaattaacataaatatagtgaagaaaaaaaattttaaaaatatattaaaattaatttataaaaattatttaagtttatattttttttaataattgaatgtatttataatttcatagagtgcaaatagaattctccttttaaaatataggctaattaggatttttgctccctgaactttgannnnnnnnnnnnnnnnnnnnnnnnacttttaaggtcattgaaaatgccc

SEQ ID NO: 159489 - DNA, 595 bp, Cannabis sativa
attttaggggtattttaggaatctttttaaattagtggaataaatttgcacaaaaaataaaggggtctaaattttgatatggggtattttattaggggcgaaatatgaaatttctcctttatagaaaaagttacaaaaaaatatggtatttatagatttgctactcttttatgatattttttcacatttaagattttttatggtatttgctatattttaataaacctaatatcgaaactcatatttgatgtttttgtttctagcttaatgagttttctttttttttttagtttattttatattacatttacattttagagtttctttctatttacacaaaatactaacttttttttttttcaaatattacatttataatttgacaataatatttttacatttatattttttttttaatttttttttcttttttacttattattatttttttaaaacccgagaaatgttttttacttattaaaactttaaaaaaaaacctttttttttgcccttttttttatgtattttttagtcaactttagctctcttttttcttttcatttttttaagtctaacttctctctctctctctctc

SEQ ID NO: 159490 - DNA, 610 bp, Cannabis sativa
  modified_base (476)..(480): a, c, t, g, unknown or other
tcaggagcacccggggattcaaaatcgcaatatttgcgggacatcaggtaagacaatagttagcacttagagatatgtacaatggcgcttatatggaatgtgatatatatgagaaattagaaacccggattagagttattactctaaagtgagcggatttataggcttagggttattacccaagtaaattgttaatatgtgattgttatgccatgatatatataaatgtatattgaagtaaagggttatgtgttcaagacataatcgggttggactcggtaactagaatcgagatgaaccgttctaaggccttaatgtaaatagacgtgtgagcgtaacacgtaggtcagtgccacatagacataaataggtgtgtgagcgtaacacgcgggtctatgtcatacagacaaaaatgaaatggcattaatatttatgtgtagtgtatttgtaattattgatatattttactgtcttgnnnnncttggctcatgggtgctctattgtgcaggaaagggtaaatttgtttctaattagccatgcgtgtggatgggcgatgaatgaacatgttcgggccacactagaccaagcaggttggggtctaccagtgttg

SEQ ID NO: 159491 - DNA, 531 bp, Cannabis sativa
ttccacttgtccatttgcctaaggcctggatactgacgagaagctcttgataattttgttcctctcgcaaaactcagtgaacaagtccccatcaaattgagtaccattatcggatactatcttcattggaattccaaagctaaaaacaatgttcttgacgaaaaagtcaaggactttcttgcaggttatggagacgagaggttcagcctctgtccattttgtgaagaaatcgactgttactaccgcatacttagctcctcctcgcccaatgggtaatgccccaattaaatcaattctccatatagaaaatgggtagggcgaggtcatcattcttggctctgttggcggcacgcaaggtatatgtgaaaatctctgacacttatcacatttcctgacaaactcatgggtgtccttgttgatcgttgggcagtaatatccttgtataatgatctttttggatagactttaccaacctgcatgatccccacaaaagccttcatgaatttttttgatgatttcgttcgcttctgt

SEQ ID NO: 159492 - DNA, 840 bp, Cannabis sativa
tcgattccgatgaaaattgaaaaatatatgaaggtttgaaaatcggggttgaatggtgtcgagatggtgctcatgcgcaccaggcatctcggacacacgcacgccggcttcaaacaatcttgtgtctgaatgccctcaatgatcggacatgggcctcgcccaggaggctgcgattttgactcctcgaggctgctggcgccgtgtttccttgcccaagcccctgtcttacgcgcgcgtaagacttttttgcagcctctcgaggctgcacatgcagccatcacccaaaaatcctatttttgtggaattttttctaaatttcggatttttcaaattttaaactctaaaattgaaataaaatattatttttaatatatttaaactttgatatcattttttaaattaacaatatttatttttaatagattattattaattccttgatattttgaagtttaaatttaaaaatgaattattttatttttaaattatggtcagatttaaaaatttgttaatttttttaatatttatatattatttatttataagatcagatattttaatatttgacatattttaaattaaaagatagtattatcttttttgtttgagatattatattaaaattatcttgtatgataaattaaataattaataaatttgaaattaacctagataattttatagatattctaaccataatatttttaaattcaaaaatttgttattttgttcaatatttcatttttataaattataagtttaaaaaatgatattttactattttatatcatttctttacttattagatatttataaattatctttaaatatttaaataac

SEQ ID NO: 159493 - DNA, 557 bp, Cannabis sativa
  modified_base (300)..(303): a, c, t, g, unknown or other
ttttgtcctttagtggattttgtgttaattgattatttgattaattttgatttatgttggctgaagtaagttaattattatgttgttatatgcatgaattagaggctgtttgaagggttagtcaagttttgagtttttgaactcaatcttgaagctttaatggtgaaatttgtttttgtgaatggatgattcacttggaatatgttcattatggtctaaatagtaggtctggagagtttggtttgaattggggttgaattgcaggagctatgaattttttagtgattcctgcactgaacnnnnattccggttcagagaggcctgtaggaaccaaaattccggttagcttccaagaatttttccagaaccaaaattccggttggggcaaatttgggaaccctagtttttcccatttttctattatttagcgtattgccatgttatttatcgatagggaaacttttagtttcaagtttaagtccccgggaagtaatttagcgtgtcgcttatcactgttgtgattgatgtgaataaaaagcctgtaattcgccgagcag

SEQ ID NO: 159494 - DNA, 546 bp, Cannabis sativa
tatgttagatgataagggtgtatttagaatccttaaatctacatcaactcaaaactttatttgagatggtggttaatctggggtggaagacttactctggaagattgtaaaagcccatctataataatttagttccaccagtgaagctaaataacttagttgctttttaaaagacactagaaagttttcaaattgaagaaagttcttaactgttttttttttatctctattctattttggatagaatcagagttgtgtcttctgtacattcagatgcactttttaaggagtttgtatccctagaggagtggtacatatagaaaaataatattacataatgttttatgaacacaaaaggaaataataatggagaaagctattgcttactataaccttacaattcctgttattcgggtagtcaaatacactacacttgatatggatatcaagataatggattgattgaaatttacttctagttttatgtttgtacaagtgggagtttgttgggattttataccctaaaaaaactcatttcaatataat

SEQ ID NO: 159495 - DNA, 629 bp, Cannabis sativa
aaaataatatatatacgaaaaaaaatagatttttaataaaaatatatataaaaaaaataatgttaaaacacaaaattttaaagctgaaaaaaaaaattctaggaagccctacggagtcggttattaactgactccatagggtccctacatcgtcggttgtttttaacccctatagtgtcacctagaatagcatcggtagcgaatttcaccaaaactgacattgaaagaccttaaaaacggcctctaaagcccaattttatagtagtgattcacgaatgaccctcggaggtgtttcgatacccttttggagtattataaactttaatgacgaatgataacataaccgttgtctctaagaaagctcatgaatctatagcattacttggaatatggctacgagactcagattacttttataagggaaaacactattttataagtcttccaagtgataggcctaaccactttagtcctaggcttggtgccaagttccttctatcaaaaaaaaaaagtccaagatgtaaaatgaccgtaaatctaacaattaagttaataaatgtccgtttttataaaaaaaattaataaaatgtccattcagttgaaaatttgatgataaaattacaattata

SEQ ID NO: 159496 - DNA, 530 bp, Cannabis sativa
aattataagattagaaaaatgttaattttgacattttatcttattagatatttattttaattttttatatattcgtcaaaatgacatggaattttgaaaagtttttaattttggtttgaataggaattttagcgtttcataactataaaatttttaaacttatgatattttatttgatttattttttaaataaaattgaaaatatcttaaccttcaaaatatcttatttttaattgtgtttgtttttcttaaattcattttattaaattaaaagtgtaacaccctaactatttttaacttacaatgcaactcgttgctaatcaacgaggttatcaaaaatcatgattaattaaaattttgctcatttaattaaaaacataaaatagcatacatataaaatttcaggataaaaagcatttacaaaagtttcattgtacaaatacaaaagtctgtcgcctagcaactatacaaaataagccctgatgtcccaaagatcgtacgctccaagcctaaccgccctgacatgtaca

SEQ ID NO: 159497 - DNA, 588 bp, Cannabis sativa
  modified_base (141)..(161): a, c, t, g, unknown or other
cgtggtaaaaaacaattgaaatatttttcaagtatcacgtacaaccgattcttttttttaattattattattatcctatttttttttttaagaaaaaaccaaaaacgtacacattagagttatcatttttatattattatnnnnnnnnnnnnnnnnnnnnntattattattatattttttaaaaaaaatccaaaaacattaagattatatattgtattattattactataatttgagttttatggagttattttttgtatttttttatagaattaaaattaaaaaagtgagagaattaaggagaaaagagaaaaatagttttagaacaattttatatgaattaaaaattaaaaaatgagaaaattaaatagagaaaagaaacatagctttaaagcaattttagagtatcatgtcaccgttttatgtctctgctttatatagatttagattatatatattgattaatattttatgtatgtacataaacgtaatttacgattaattatatatgatttaagttttaatatttttttagaatttattttttattttctaatttttttaaattattttatatttttatagaaa

SEQ ID NO: 159498 - DNA, 645 bp, Cannabis sativa
agatctgaatggaaggagacactaaatttcactgcaacgactataaggtttatgaaactttatatgtgtttaattcatatcgtttgagaagttcatgtttaggatgttaaaaacctacttgttagtaaatctagatcctggtaaaataatccaacagcttgtcctcaaaaatctcttgtagaaatcgcctataatgactgccaacttcttcctggtttgacttaatcaaatggtctctaattctggcatcatttatctccaatttggaccgaggttggaaatttctgggtttgaatggtagggctaattggttaggatattctgtttctaaggtctctggagaataaacttctgaacttgattggaacatctctacaaaaaagaacaatctcaattcctggatgaaatttattaaaccagaggctcaaagaatatgataaacctaaatttatatcatgcctagaccctaaaaattacccaaaaaacttataccagaatcactaaaaccaaatggagtgacaagatgcaaaaaaaaaaaaaaacgatcataacccataaaaataaataaaaaatgagaagaacagggaagactgggtcacttactgtttgaagtcggatagtcgtgtgatgaaaagtcctgcaacc

SEQ ID NO: 159499 - DNA, 525 bp, Cannabis sativa
gtcaggtgaccaccatttaaagtatagtttcttatttctgcaatttgttttatctcatgttaagctataagatcagattggatcaaatagctctgatgtaagttacactggtaacaaatacacttttcgatcaataactaaataaagatagttgttgtcgagcaaaattcgcaacaccaaatatatatataataatattaatgacaagaagagattatttgaagaacagctgcgagtattcaacctatactggcgagtactcgaactagtaatgtgaatgcttaacagaaaactggaaacaacaagaagacagaggattatagtggttcagtccgatcacggtctgcttagtccactgtagcaagagtttcgtaggtctcatttcacggtggatcactcctttatctacaaagcaagtgtccattttgttatacaaagattgcattcattgtcaatccgcttacacattgaattacaataactaaactaaataacgtaaacatcaataaatgaatagcagttact

SEQ ID NO: 159500 - DNA, 528 bp, Cannabis sativa
atgtcatagtgattcacaactgatagtaaatcaggatctcagggaaattttggaagaacttggaaaagtttgattatttcaaaatcgagcaaatcctaagagaacaaaactctaatgtcaaaattaacccataaatttaatatagcctcattatttacaattaggcttatcgggatattacaaccatcccctccttatagaaatttcgtcctcgaaatttatttaaataattcgggatattacccccatatttatgattctaactcccaaattattatttctatcttgctgtttttctataacactatctcaactagtggaattgtctcatttcataatactttctttttatagcccaaaacctggacaagatgtttttcccataccataaatttgagtgaagtttaacatcatcacaactcagaatattggtagagtctgatgcatattttctcagcatggagacatgaaacagattgtatactccggacaacgtaggagttcaggctagctaataggctacctggc

SEQ ID NO: 159501 - DNA, 616 bp, Cannabis sativa
  modified_base (304)..(308): a, c, t, g, unknown or other
ctctcattctttttatcactactataaatatcagaattacggttctaaaaataatttttttcgtagaccgtcgttaaaaaaattaagtaactatttaaaacagtcggaaaaaatttagtattcccgacggtttaaaattgtagtaaacaaaataagcgacgttttttaataaaatgcgatttttaatggacccttatacccgacggtttaaaaccgtcgcctataaggatccattaaaaaatcatcacctacttctcgccacatttcccacgtgcccacctatttttttttctatttcccacannnnnacctatttcttctccattttccacaccttaaaatgaaaatcttaactctccaaaaccccacccacgcctcggcactatcgccctcctctctcgccatcttcctccctctctcgatctccttttcttctcgtctctcttgtccattgatctccacccacttttcctctcgtcggtctccatctactctctgtcgcatacatcggaccacaccacctcccgtcagtatccctctcatcttcgtctcatacgtcggaccaccaccacctcccgtgtgtctccctctctctctgagctcggtataaatatat

SEQ ID NO: 159502 - DNA, 705 bp, Cannabis sativa
cgcttaggcgagagttaaagatatcatctattggatagagtcgtcaactcatctaaaatgaataacattctagcaaccttttattcgatcgaaaagaaaatctaacgttgtctcgttcaggcgagagtcaaggtcattcttatttcatgagcttctaccattgtttcataccttataagtcttactcttagcagcaactattgggatggacgttactaagagtaaaacacttacaaataatacttatctttcaagattctatggtattaaattgttaatgaacgttcatcccttagggatgattactcactaaaacaagaacaatgtaaaaccaacaatggagatcgaatatctctttgattaaagctcattatttaaaatgtatttttatctaattacttattttagtctatatattttaataatgaaaaatacttaatttaagttgatcaaaaatcaattaaaaaattaatttttaactttaatttaatttccaaaaattaattttcgaaaatccatttataaataattacaaaattttgaaaatataataaaataatttgaaaaaatatctaatttaaggttttctaatataattaaatttttaacataaataattttccaaaatttaattaaacaacaaattaagtatcttgaactaatcaccttaatttgaaaaagatatccttatttaagttgatctaa

SEQ ID NO: 159503 - DNA, 558 bp, Cannabis sativa
cagtgaatccacaaagattcaccatacaaggccttagattggccttttcgagccccattttctttagagtctctttataaatgatatttcccgagctcccattgtctattaacaccctcttgatccttttattggcgagttgtatggtaatcaccaatggatcgacatgaggatacctcacatttttcttttcttcctccgtgaatataatgggaggttcctaagttttcaccttcttcgaaggttctggggcaaaggtcgactgctcgttctttatctctttcacatatcttttctgggtgttattgctttcccctgggatatgtggccctcctgaaataaccaggatgtcctctccttcaataggaagaggttgtaatccctagttgtttgggttattgggtagattgggctggttgtatccatggccctgtcttttcatgtattgtttaaaatggcctccaaggatgagactttctatctcatttttcaattgatgacattcgtcggtcgtatgtccaatatcgttatggcatttacaatatttattaggatctc

SEQ ID NO: 159504 - DNA, 600 bp, Cannabis sativa
acttcaccattaatgattggggtcccttcttctacagaaagaggtgctcactcaatgttggatagtgatgaagatatccctaatgctcaacagggccgtattaaggtgatgagagggcctagggtgaaatttgaaatgaggcattttctttttatataaattaaaaataaatttaattaaattttgacataatatcaattttaattcttttatctttatgtaataaataattttttgcaacttaagctaactcgatcaagtaatatttaattactaagaacatttttattgaagtgctatatattttttaagttttatatattttaaaaaataataaatataaattttatttatcattaaaagtgtttaagttataaattttactttaatataactaaaaagtgactaaggaaagtgtcgaaccctgaacctcattaccaataaatgtcccacttaccacttgtgctgaacgttttcattgtaatttgttgagttaaatatttatttactatacgtttttttatatgtatattatatcaattttaacttttttggggcctccaaaattgtggggcttggggcctcggccccggctgcccc

SEQ ID NO: 159505 - DNA, 519 bp, Cannabis sativa
ataaataactaaataactaagtaacaataaataaatacataaaataaaataataatttttttttttaacatttttacttaaagaaaagaaaatttatagactttctagtaatgatttttttttttaaaaaaaataaaatatctagaaaaatatttatacatatatattaaaaaatatatatttaatttcatatgcatgggtagtacctaaacttggttattagtactaaggtctctgtagtaaatgcaattttaaaattacataagcacaaataataatgcaaacatatagtatgagacttacatggtagcaagcggagactttttagccgatgtgtgtaactcgtgagaacgttcaggaccgatataactgtggctctgataccaaactgtaaacgcccgtacttttataaaaatattaattttcttttacaagcgttaaacgcggaaaaacataatgtcgcatttttatttaatacttgaaaatgttcacaactgaccagttttcgtacaaaagaca

SEQ ID NO: 159506 - DNA, 515 bp, Cannabis sativa
agtttactcctttatattcacaactccattatattttttttttatgtcaggacatctatacttatatatattctttatatatcaatatcatgtgtgtgtttaatggccatttaagaagagagtacacgcatatatatggtgatacaatcccaggtgaaacaaataattaacttaagcatatatttatatatatataagatcgtatctaacttaaataatagctaggcttacgatatatacatatattttttagcttgtaaattgacccaattcggtgttttaatcacctttaaacccatgactccatataatggcaacatttaattcagagaggttcatattgatataccgtatttctcaatcaaaatctttttaaagaaaaaaagtaattatgattgattaatttaaggatgagagtatccaaattttttggtggaatgaaggcattctatggatgagggcatccaatttttttggtggaatgagggcatctaattttttgtggaatgagggca

SEQ ID NO: 159507 - DNA, 530 bp, Cannabis sativa
ggatgactttgcttttacctttccttttccctgactaagatggcttgcacttgcaccagaccctccaccttgattttatcctcttttactcccactaggagcaagagtttggaaaccttgtgtgtaccccatgttgaaccctaaatcttgtggcctagactgatgttgatactgaggctactggcccgatcggggtgttgaccacaactgaagcacccatatggtccactatgaatcttttcaaatgaaccactacaagtgctaccccccacaaaattgttgtccttgggaccactgtgctacccgagccctaggtcgtggaagatatgaaatatccataacttgggtggtcaaaggtcacactttgacccttgtaagaagataaagcttataaatgatccttttatttatatcacaaaatacttatttaaaagttatgggttaactcctatattaataagaaaatatcagtaacaaaatcaggaccactcatcaatatagaataagaataatatccccacagttatgta

SEQ ID NO: 159508 - DNA, 526 bp, Cannabis sativa
  modified_base (116)..(123): a, c, t, g, unknown or other
  modified_base (289)..(291): a, c, t, g, unknown or other
cgatattagggggagttgttttgatcgaataaaaccgaaaacaattgtgtaattttactttcttcctagttttttctggttttttttcgtaaatttctgtttagatcattgcaggnnnnnnnntccagttgatttcgccagaattaacggttgtatttcccttgttttagcttcactttggttgttttgctgatttgaaacgattgaggtttgttcatcttcatcgttcgctccgtgaagctgaagggttagtgcatgtggtatttttgtaaatatttgtatgtagacnnnataaatgtttaatgggccgtcccatagtatttttgtaatttttttttccttttttgtacttttctatttttttccctttttttaattcaatattttaattaaagaaattaatcaattttaaactactcacgcgaaccaaaccagagagcacagccaccaccagagagaagagaaaaccctcgccaaccacccctccgccagcccttttctgccccatttctcaaccatttgagcc

SEQ ID NO: 159509 - DNA, 553 bp, Cannabis sativa
aaaaataaaattataactatttctatttaagtactaaaaacacaaaaggaattattacatggaaaatacaaattgacactttattaaaaatacttctataatgtgtggacaatatttatactttttatgtgcttttaatcactaaaatacctcttacactattacttaaacaatcagacgatggttgttgggtggttactgggtagttggccgaaagttacatcagacaaatgtttcaatcagacgaaataattgttagtaaaatgtttatgcaactgttatgaaacattaaaaatcagaatagtatttccacgtgcgtaactctatcaacatgtctcttcatgatttaatatgaacaaattcaccattagaaatttggaaaacaacaaaaatatactaggataaacattttactatagtattgatgtaattttttttggattatatttaagttggattatttgggaactccaattcaactttttgagatcttcatttcatggattagaaaattaaagtctggacattagttttatgcaaattaaattggatt

SEQ ID NO: 159510 - DNA, 550 bp, Cannabis sativa
ttgacttatttgaattcatactaaccgttacatattctgtataaattattagtgcatagacatatgtataactcgacaatggtaccgagttgctagatgctgtgatgtttggtgatgttgcagaaaacatattctcatgtactgcagttcaactaaaatcatattaggacgaggtaaatataaaaaaaagaaatatgtaaaatctatacattttcataaatagaaatatattaaaacttatcactaattattcttacagaaacataagttgtttgtccaaaaaactacaaagcaattatcagccaaaaaatggagaattcagttgtatgtagatccaaaacgaacaatgagttcaaaatacaatcaattcaccattcaagcagctgaaccaatggaagattaggcagaagtttcactatactctttttagtttttttcaataattttccatatattaagactttttttaatacttttttcttctattttaagatcgcacattcactttaatttttgttacataatgtttgttttaaaatttgcaaaactt

SEQ ID NO: 159511 - DNA, 597 bp, Cannabis sativa
  modified_base (499)..(500): a, c, t, g, unknown or other
tcatttttataatgtacattattttatttttggtttttgtaattattttttgggttttttcatattagtaacattgttgtgttgtatttgcatggtggccagattttttgcagaattattggtcgtcggattgcgcttataaggtaaaaatttaaacctcaatatatagtatatatatatatatatgtatttttgtatttgattgaatatgtgtgtatatatgttgtgtatatattatttatgtaaatataatttgtaattatattgtatatattctaagtaatatatatatttattgtgaatgaggataagattggagggatttaattagtttagaaataaagtttttaaaattgtgttagtgtgagatataattgattatatatgtatgtataatttagtaactagtaacttgctactattttttataactagtaagtaatgaaataattaattttgcaattttgttgtatttctttatattgtaggttcggcatanntttgtgttgatcgcatttgagcttgctataggtatataaattctctaactttttcttattatataattaattatcaatgcatgttagttgagtttga

SEQ ID NO: 159512 - DNA, 713 bp, Cannabis sativa
tagcgctgcaaccattttagaaatccaaaccgtaattttgaaaaaaaaaagaaaaagttaaaaaaatagtacatgtggtaattcccctaaaaaataaagaaaaataattaataattcaataaaaatataaaattattttgaaaaaaatttaaaaattaaactaaaaaaaatttatgtttacttaaacaaatctaaatttttagagaaaaaataaatagactcaaacttattcccgtaaaatttaatttttacaaaattgaatttttaatatatttttgtcacatttaaataaattttttaataaaaaataaataattttttaaatcacttaattagttttaaattttaatttcttttttaattattttaatcattcaaaatatttttttaagatttaaattaaattttaagatttactaaaaaaaatattaaatatctctcatttttatttgaaaggaacaatttgataatttttaaagtttaaaggacaaaattattaatttacaaaaacatatcaatatttaaataaaataataagacggtacctaataaaaagactaaatttctatacatgtaaatacaaaaattattaacaagcggtatattttaaagacagaaataatattattgaaaggtcaagagccaaaattactaattattctttatataaaaaaatataggaaaattctacaatacacctccttaaaatggat

SEQ ID NO: 159513 - DNA, 536 bp, Cannabis sativa
taggtccaatttcagttatggttcgggtccaggatgggtcccaaatccagacaccgaatacaggttttgtccaagcccttggtccagatccggatccctatgtggggtcccagactggttcatttcttgtcctgggtcatgaggctggtcctaggttcaagttcgggtttgggttgggtactatgtcccggtcctagttctgtttcctacgtccctatcctaattttggggccaggtgctgattattttgtgtgtttgggtcccagtctaggttaaggttcgagttttagtctcgattcgggtttaggtgtctgtctgggttttgatctgggttcgggtttgggtttaggtgctggtcttggtcctagtcctagttcgtttctagttctatttgcgattctgagttcgattttgggtttgacttcgggtcagagttcgagtctagctctgagtttgggtttgggtagggattaagtctaggttcagatcaggctcagggtgtgggttcgcatcctaggtcttggtctaggttgggt

SEQ ID NO: 159514 - DNA, 525 bp, Cannabis sativa
atttaatatttttatacatttaaatttttcaagaccaataaaatgaaacaataatttaaggacaagaataaatgaaaaaattagagaaagctaaactttgcatgaaaattttaaaaactttgaacattaataacttttcatgcgattgttcgtttgaggcgatttttttttttaacttgggtattttttcgcgttctacgcatcaaccattttgtccaaaaaaaatgctcttttttgtatgctaatatcatatgttatgcacccctttcacctaattttttgtgttttattttgttattttatttaaaataaactaataaaattctaatgttatgtattaacatattttttattatgtatttgttaattctactacaagaaaatgggcaatactaatttttttttttatatatatctcttctaatatttaaataaaatcatagtagctaatttatataaagattttggtttggtattgtaacgccccgatattttgccttattttacaaaaatactattttcatg

SEQ ID NO: 159515 - DNA, 547 bp, Cannabis sativa
ttacctacacatgaaaataatatctgtgagttaacaaactcagtaagaaaagcatatagcatataatatattatcaacttatatttaagcgctcatacacctatccacaaggctaaatagataatcaagaacgttcttaacagaagtacgacatctgtaccacatgcactaagtatcgctactgtactagtgttggtagcgttaaatcgtaccccgagtactactgagtgttataccacatgcactacgtacttaactgtactagtgttgatagcaccgtatcgtaccctttgaacatcatatgttgtgccaatgcactcagtaccgctaccgtactagtgttggtagcatataaatcttaataacagcatgcatgtaatacacatacacatattcatatatattgtttatgctagtcttacattattttcaaattcaagtttttcagtcgacttgtgtaaaatttcacgctttcattggaggtcctatgtcacaatcacataaacaggtaagcaacttgctaaaaccctttttggggacctaaact

SEQ ID NO: 159516 - DNA, 921 bp, Cannabis sativa
  modified_base (204)..(205): a, c, t, g, unknown or other
ggccgaaggaccaatatctggatccccttgaatcataactggcacttgggcaggatccgtacacttttcttctttaacaccaatctttcttaactgtgggcagtttcttttcagatgaccctctaccccacaataaaacaagatctggctctacattggttcaaatggaatctttttgcatcttgaatactcaggataaggtcnncatttcttattctcaccttgactgctatcctgaccttcctagaacctttttgtcctgtcccataattggtggttcatttagtttttgcttcctaatcaactagtaagttggcttcatatattccaccacatctagtggtacaataggaagtgtcggtaatataagaattgacacaagatgagcctattgttctttcaaatctcagatctgtttttcccttattgtctaatcatatcctgcatagcagaatttatatgttcccaggattatggcaatgaagaattctcttccttaccgttttccccaagcctagatatctcgctaatcagactatttgattgcccttactgcttaacatatcacagatttagtccacatcttctaaccattaagaacttagacgaatatcaatatcaacatgcatataccatacacatattcttatcacaatcatcactatgctacttttcccaacttactttatattagcctaggcaggtaatttaatagattataatataaatacttactataccatgagttgacctgttctcgcagcaaatgtatatattcaacaagtcttcaagacctataaaaccatggatgctatgataccaagttgtaatgccctaatctatagggacgccacgtgtgtgattttataaactagtttaatactgatagattaatttattattaaaaaccgtgataatatt

SEQ ID NO: 159517 - DNA, 646 bp, Cannabis sativa
  modified_base (491)..(491): a, c, t, g, unknown or other
cgggacctggaccctgtcctagccacagatccagacccgaacctaggacccagacccgaacctgggagccagacccaagacccgaacctggacccagatcgggattcgaagaacccataccaagactcagactaagactgggaccccaactgcaacttggacccagacccggacccagaaccaaaccaagacccggaattagaactgtaactgtgactaggacccatacctgagaccaaaaccaaacccaaaccataacccaaactcataccagaaccttggccgagactttgactacgactgggacttgagacttgggacacgaacctagacccgcacccgaaccgtgaccttgacctgagatggtcctaaacccgcatagagaccttagacccgtgacccagaccaggatccagaccctgagaaggacccaaaccttaacccgaaccaagactaggaccgagacctggaccggaacccagactgggatntggactaaaaccaagactcaataaccgaacccgaacctaggcccatattaggacctaagaacccgacttggatgagggatccagatctaaatccgggactcgaaccataaccaggacctaacctagacccgaaatctgaagtcggacccaacccc

SEQ ID NO: 159518 - DNA, 508 bp, Cannabis sativa
  modified_base (478)..(481): a, c, t, g, unknown or other
actaaaaaacaaatcgcactgcaaaaaatagtgcagcgctgtatggtttttgcagtttctgcagtttggactatcatcaaataattaaactatcataaatacaacaagtttgagcaacacttgtcaaaaatatcataagacttgaaaataaatatgaaaaaattggattatttcacaaatatacaaaaacaacaaaaaaaattataaaaatacggactcacaaaattttaaacatttttaagattgttttgattttatttacagaatatacggtctttctatgttgtagtcttgttaatttattgttatttgtatgttattttttattgttgtttagatgttattttcatgtaattttcttattgtttttgtgttgtttctgtaaaaaactgtaaaaatatatatataaaaaaaatcattaaacgtaatgtaattttttaacaaaaaaatgagaaaattacactctataccctttttnnnntgtcctcttttatttttaccttttttt

SEQ ID NO: 159519 - DNA, 903 bp, Cannabis sativa
tcctagatgcaatggaagttggcgagaggaggaaaactgtgcatggaattccgaagagaaagctttccatgaactgaactttcctagggccaacttgaaatactattgctggacggcttctgacagggtagcaggaaaaattctgcaacacacatcccctcgtaccccttgcaaaaccatttgcatttcgaaatacttgaggtgggagagaggatcttctctccctgtgtacattttccatgttggcattttaaacttgtggggcaacgccagaagattgatctggggagaaaaaggagttctgcatgctcggtccaactcgagatcattgtttctttgtccagccatgccttggaacatattttttagttcatctagctgtgcctgtacagctaggctaacttgctcgacattctggtcaatttgaatcacgtctacatctttttgagtgggaatttgagcacgggctccagactgcacgatcatcgtgacatattgattgtctacttctctccttcaattcagatcattccttaggtcgtgagttgtccccaacctttcgaatacagaagcccctggctgccttagcaattgatttgcttggttgataggtggaatggcaccgttaatctagttggaaccatcatgtatgatctctcccaatgaattactagacaaggtctgcctgcctactgcttggcccacaagtggaactcgtgaccggggattgggcggctgaccatttgtagtctgggaagtattaatcgctggatcttcgtccgtctcacccagggggatgacattcggaggttgctaacctacagtttggtaggctgtttcgtatcagcacggtagctttccgactacgattttcaatctctgtatgatgagcccttaacgctt

SEQ ID NO: 159520 - DNA, 509 bp, Cannabis sativa
  modified_base (277)..(277): a, c, t, g, unknown or other
tttagacacaattggtcttatgtgtaacaaaagcttacaacttaatgtttgcttttaaaattacattttggctacctctacttgagatgtcgggcagaggccaccgttgaagattaataataggccatgctaaaaagcactggttactagctcttttatatttggctacctctgtagtctttaccgtgaaaaggccatcactgaagagcaatgggtactagctctttttatggaatcttgtgtggtgaaaccttagaggaaccactatacaagttgnctagtgagagcacttaccgagatgttctctattatagtatttttgtagaagagccaattccaagttccttttgtactctattggcttctttgcactcttactgttatcatgaaacttggtgccgaccttttcagtttagtccaaacatgcttgctagaggatctttattatcaaaaaatattcttcagagcactaagtctcttacgaagaatttcttttcttgatttgtttg

SEQ ID NO: 159521 - DNA, 586 bp, Cannabis sativa
gatcctcccatttgaccatacaccggttgttgctgcaacaatgacccaaattgaccgtacatagggtattgttgttgggatgagcctccaacaagaataccctatgtacagtcaattgaccatataagatttcatgttatgacacaattttataatattttgtattaaaatattttatatcattttatgaaataaattattcatcatttaagagttattatattattaattatattttatttttaagttattattactttaattttttatatttattttattataaaaaattaattaaataattattttaaaaatattactttaataatttattaaatttatttattattattattattcattacttcaaatttatgacatattaaattttcagtatttttaataatacttatttaataatttaaaaattattttactattaattaattaaattaatttttcatatatatagatacttctaagtaactattacttttatatatatatatatattacataattattttaaaatattatttttattataattaactttttaagtaattaatatattcttattctaatt

SEQ ID NO: 159522 - DNA, 688 bp, Cannabis sativa
  modified_base (49)..(50): a, c, t, g, unknown or other
tattcaatgtgggttgtacaaatgttgattgggccggcccacagtattnntgtaatattttaccctttttggaattttcttgttttttccctaaaaaaatatcctattaagtaatagtatattcaacgtagaaaactaaaaaatattgttaaactaagaattctgttatatagtcacattttctatcgaatagatatatatacatatataggaaaattcttctgtaggactttcaaaaagaacctatcggtgggagtgtcatggacccaataatagggtgacacaaaataaattttggaaggatatgaaacactacaacataatctcttctccctattctaaataaaacgctgtttttttttttttctctaaactggtggaactaacacatccaattaatgcacaaatatatacaattatgaatatctataaaaaaaatacagttatgaaattttaattcaaatctggcattccatcaaccgtggatcctcacgttcctttattccctcttgtttctctcagatctagcttctattgaccaataagatatacgatctcttcaacgaacaagatcttgttcaacctcatcaacgatatagatctcgttttatttttttctcaaactaatggaactataattgtgatttggttgttttttgttttgttgaggattatcagtgcccatctc

SEQ ID NO: 159523 - DNA, 853 bp, Cannabis sativa
tgtgatggttgctagtgcttttgcctcgacccgttttgtgaagtagtcgaccgcgactacaacgtatttgactccgccttttccttttggtaattctattatcaggttgatgccccagactgcaaagggccaagggctcgtgatagaatgcaagtgactcggaggttggtggacgtatgtggctattcgctaacacttgtcatgtttttttgcgaaattgaaaccgtcttgccgtagggtaggccagtaatacccttgtcgcatgatttttagggcaagagaattaccaccagtgtgattcccgcagatacccccatgtacctcgcggagtatatagtcgcaatcctccccatcaatgcatttaagcagaggctgactgaagcttctgcgatataatcttcaatcatagatgacatatcgggcagcccgccgtcgcagttttctcgcttctattttgtcatcgggcaagatacccttttccaggtagacaattattggactcatccaagtaacttctctggcaacatttatttccatcacttcttctcggctcaccgtcgggtgagtcaacacataagcaggaatcacatcgagcaattcagcttctctagttgaggccaagtgggccaatgcttctgcgtgtgagttatgagcacgcagtactcgggatacaactactttcttgaatttctgcaacaactcgcatactatggcaaggtacttagccagacacccgcctctggccagatatgctccgtttacctggcatacgacgagttgggagtctctaaaagcttgtaagtattctattttcatctcgagggcgagcttcaatcctgcgatcaaagcctca

SEQ ID NO: 159524 - DNA, 535 bp, Cannabis sativa
tttctaattgacaaagacttgtcatcatttaaacggaataattgaacggaacctaccagaaggattaagggccaatttggcacaactgtgctgtgagaaaaagcagttatagttgtactgtgagaaaagcagctgcagcaaatcaatgaaaacagctgagttgagtgtttggtaaattataaattttaaagtactgtaagttgttaaaatctattataatgataataatgatgttataatttagtttattataatcacaaatatgtaaaaacttatattatataatattttattctctatatattttaatttttttaaatataaatttatattcatttgttaaaaataatttataatatttttatattatgttgtatcaaatataaagaaaaaattagaaactcaagtataccagaaatattttaggttaatgttatttgttaatatcaaaataaaatataaattattttaaaaaaaataacagatttaataattatttattttattataataaatttattttaaatatttttat

SEQ ID NO: 159525 - DNA, 913 bp, Cannabis sativa
ttagaccatgtgaacctcccattacttaaattaggatcaatcaatctcatttcccgaatcaactcatcgaaaatcttcatactcttagtacaagagttgctattcaacttctcccccactcttcgcacaacattaaaatccccccccaaacaccaagaatctccacaaatagaataaaggccagccaactcatcccaaaattctgaccttaaattgtatgaacaaggtccatataatcccgaaaaccaccatggatctaaaccctcagcttggatcaagattgaaatagaaaaattaccaatcaatgaatccaaaaccttaatatttctcgtatcccatattagcaatgttcctccagatcttccaatggatgggctcaaaatccatgccttaaaacgtgacctccaaatactgccaataaaccttctatctacagcatctttcttcacctcttgtaaaatcaccacatccggactggccttacatattgtcgctttaattgctcttctcttctccttgtccccactccctcttatattccatgaaaggatcttcattaagctttcttgaccacccctgcttttttgccacttctatcataattgacattaaatgtcagattattcaattctctgcttaactttctcataggcttcctttctccttttatcacattgttgtcatcattattgtgcaggatctccattcccatctccgccatggagtgaacgatgttagaccacgattgatcctcatgatagatttgtcttgtattctgtcccttcccgagataatcggtagttaactgcttttcgtgttcattctgtctccacagttccttgatgtcaccaataatatcttcttgctcttcactatcctcggcctcagaatctattccttccccctccgaaca

SEQ ID NO: 159526 - DNA, 623 bp, Cannabis sativa
actccatacatccgatactagcaatgtacatattgacctcgccgacctgcgtgctgtgttgccagaagttgttttgggttgtatctattatgtattttagtgttatatttttgaggcatcttcgtatatagttcttttgtaaaaaaatttataacatggatcctcggaacacaatttttatgcctttataatgtccatttttagtatttttttagtcaaatttttaatattatcacagtttttaataattaatcaatctattagtattaaactagtttataaaatcacatacgtggcgtccctatagattagggcattacatctttcaacttcttccttgagagctttagagcgctctttgtcaaggagcctgcgtttctgttgtacaggctagaagtttacttcgtctatgtttagggcataataaatgacctaggttttgatcctggtcatgtcctcatgcaaccaggtaaaaatatcttgatttgtcctaaggcaaaccataagcatatcacttaagacctctgtcaggtttgttccaatcttgacaaccttggtcgggtctgttgtgttgaggggaagttctttgagttcctcagtcggaccaactcctgagtcaattt

SEQ ID NO: 159527 - DNA, 510 bp, Cannabis sativa
  modified_base (185)..(189): a, c, t, g, unknown or other
  modified_base (470)..(484): a, c, t, g, unknown or other
tgttgaatttgtaatcttggttgttttgtgtatttatttcatgatgtttggttctatttcgattccttagaaatgttgttgttttaattatttaaaacttttggctacattacacttataacgatggtatgtttatgaagtattaagcttaaataaaatgtgatacttagtttttacgtattttnnnnnatatttttaagttaatattgaaatttatgtgtgtaattggatatctaattaaaaaccgatccaatccaattagtaattagattggattagattggattttgaggtctaattgaattgaatcggatgatgatttttcaaatccaattactgattggattagatcggatgaggaaaaaatggtggattggatcggatgctcatccctatatgtagggtttatttatttaataagactatgatattttaaaatatattcgagggtaaatactattttggacccnnnnnnnnnnnnnnnttaccaattggaccctctgttttgtt

SEQ ID NO: 159528 - DNA, 732 bp, Cannabis sativa
  modified_base (414)..(424): a, c, t, g, unknown or other
gcagaggacccgtagccgtaggcccaagccagtggtctgtggtcccggtcccgtcccaaatccaaataccggagctcccgatgccagcacttcgggttcgggtaagtcccctttattaatacattacgtccctcctgtccatgagtatacccgtcttaggcctatagggttcgacgagcgtctctgtatgtttagaatgccttcttcccggtggggggatcatgccaaggagtattacttttcccatttaggccactatttaggtcgatcccggatgggtacgggacctccggcgcctattcctttggatcactcggcctacttatcttccagctggtttcttcccttggacagttatgtcggggatgatgaagccagtgctataatccaagactttgctagggccgaattagnnnnnnnnnnnaggactagttttattgctttttcgctaagtgcggtttattttcattaatgtcctaacacttatttctttattgcagcagccaggcccatggacgatctcctggccacttttgctaaggcctacagtctgcacgcctctctacgtccggttgtctcccatttaactactcccaggaggtcctcctctaatggtccttcaggcaccatcgtcctggtggacgaggaggaggaagttgaagaaggggaagtggaggacccggacgcccttgagcgtaagcgaaagggcaagatggtggaggcggaaccttc

SEQ ID NO: 159529 - DNA, 509 bp, Cannabis sativa
tgagttcttcctagtttcaacttgtctgctatggatccacttttaccattccctgctcttcctagtgttgggtcgtgatcacgttgttccgagacaaaacaacgacaacaataacattatccgtttgtagaaatatagatattttataattaactttggaactttactttttttttttcctcaatatcttttaatattttactttagtatttttatttagttgctaaccttaccactcatatattgtttttttatagtagttcgattgagataatatttaattatatatgtcaatattgtgtttttattttatttttcaaatataatttaatatttaaaattaattataatactcattataaattattcaaatatttttttttttgttataaaaaaacaatctcttacaaatgggccgaccaataaaaagtttttttttttaaaaaaaaatttagaaatttttacatgaaaaatctattttacacaatttattacaaaattactcacac

SEQ ID NO: 159530 - DNA, 951 bp, Cannabis sativa
agcgaggttgatgcctcgctttgtattaatgatgtcatccttgcgatcatatcttcatatacgaaatggttttctcgtcaatacgtgacttaatagtttgtacatctatgtgtcgctcaagacttttcagttagcgagttgtagatatactctaccagttcagtatctaatgagttattccattttaacatcttttaatataattactattatatttgttgattcatattctcccaagttaacacgtgtccttctttgaagtgtcagccgaattttgggtataacaattgccccttagaaagttctttttctttttttttcttttttttttataaaaagtactttttaaataattacgcatttggtggagttttgagcaagaaatggagttttggggtgaactggtgtaaaccggctagccagtttcaccagtaccattagaactggttagcctgtttttgcagggttttccgaatgttaaattttctcaattctcgtgcattccagtgccgcagttgggtgtttctctatttcctgagttagtgtaatccatagaaagtataacagaacttagagtgggggggttgggtttcccggattagggtttttgatcatgcgatttacccggattcattatgtgattaggacatccatttcgcacaagacttttcgttcaggtcggccagcacacttgaatttgaaaagaaggtaagaactatatataatgtgtgatatggatattcgaatgtatgtatgtgttaatgtatatgcatgcttgttgtgatttatacactaccaacacttgtacggtagcagtacataatgcattagtaaattgtatgatatctgaagagtacatcacggtgttaccagcactagtacggaaaggtacaaggtgtatgtggtacaacacttaacaatactcaaggtgcggttcataccctacctaca

SEQ ID NO: 159531 - DNA, 817 bp, Cannabis sativa
tgtacagacaaaattaataaaaaaacaaacggtatgctataattaaataaacagtgtcaattatgatatttatttcaaaatttggtcactaggtgtaaatttctctacaatctatgtagagttcaaagctgtatagagtttgtagattagtcttgttaataatgcttgagattattttatttacaccacttttctcatttttgaaaaataatcaaaattaaattgaattagatattttaaactaaaagaaatttaaaattgaaattataattttattcaatataaattaattttatatacataattaaaaccttaaaatataagaattattacatgaaaaatacaaattaatactttatttacaaaaatacctccataaagtgtgaataatatttatatattttatgtacttttaattattaaaatacatcttacactatcacttacacacacacacaatcagacgaaggttgttgggtggttgaccgaaggttgcagcagacgaaggtttaaatcccaaaagtttgagttgaaggtgtgtgtaagaggtatatttttattttttttttatttgggctgtatgtttatttatttggccggatagaagtttttttgtaatattgacttcgatttcgctcctccgtggctaaatgtggccgttgtctagtgaagaagaagtcgaaggtgtatttgcctgaaataaattttaacttcaacggccagaagggaaagaagaagtcaacttttaaagcaactgtgatgaaactgtaatgcaacagttatatatgttgcgagccagctaacataaaaccacaaa

SEQ ID NO: 159532 - DNA, 679 bp, Cannabis sativa
  modified_base (603)..(620): a, c, t, g, unknown or other
atctatatcatttcgggatagaatgtcaagaatatagtcatctgcgctattcaattttatgagagaaagtagaatgacataatgatatattatttaagcaaattctaaatgcaaaagctaagaggaaaaattaaaggataattttgattaaaataagaatccaacgatgtcccggtaggtaagaatcaaagttattcttattttataaatctcttcattgtttcatttatgtaaacactagtctaagttatcatctttggatgtacaactagataatgcatttacaaatatttatctgttgagatctaacaatattatgtttgtctaacggatgacaatcctttggaatttgtcccattaaaaacaacaagctaagttataccaacaatgaagattcaaaattaaactacaacaattaataacagaaaacaacatggtccaatataaattcatacacatttagaaagtatcatacaattaacaagtaagaaagacatgtgaaaatataaaacaaacacatcttaaataattttcaaggtttccaacaaactaatacagtacttcgttttgagtcaagtgtcaaagatatcattcattgaatannnnnnnnnnnnnnnnnnaaatggaaaccattctagcaaccttttattcgatcgaaaagagaatcagatgttgcttc

SEQ ID NO: 159533 - DNA, 611 bp, Cannabis sativa
taattcaatattaataattaatttccataataaagtcctaattatctgctaatttctaaagtaaagctaagcggtctttacatgttctcactttgaccactagtctagtcaacttggagcctttttgttctgtcccataattggtgattcatttagtttttgctcctgatcttctagtaaggttactccatatatttcacaacatccattggtacaacaggaagtgtcggtagtacaagaaaagacacaacatgagcctgttgttctttcagatctcaaatatgtttttcccttgttgtctaatcatatcctgcatagtagaatttacatgtttccaatattacggcaataaatgattctcttccttactgtttgccttgagtctagacagctcgctaattaggcaattcaattgcctttgctgtataacgtgtgacacatttaatccacatcatccaaaaacataaaactcagacagatgtcaatatcaatatgcgtataccatacacatatttttagtatagatagttagtacggtacttcttctcatcatacactataattgtaaagaccgcttagtttaatttggaaattaacagttaattatgttt

SEQ ID NO: 159534 - DNA, 699 bp, Cannabis sativa
gtaaactggttggggatggccaagctacgagcgtctggagggatccttggattccacatggcaaagattttaccccaaagccggttgtctcgtatggaaacgaagattataaggtggctgatcttttactccctaatgggggttgggatatcagtaaactaaacgctttgtttaatcaagatacgatttcggctatcttaaaagggggtcattcctctgagcaaggtagggataggtgggcttggactctggaacgaaatggaaaattctcgtgcaagtccgcttacctaactcaggctttggagacataagatgctttggtggtgtattttgtctaaagcccttccaattagagctgagattaatagaagatttcccattgaagatactagctgtcctctttgcgggagaggggaggaaacttttgagcatttgttcctctcatgtgaggtggccttccacctttggcgttcttccccctggggtatttatccagtttgcaataccggaattcaaccttgggactgggtaaaattcatttgggacctgaagaacaagggtgttaatgcggaggatgttttcctctatgcttcgattactgttgacgccatctggagaatgcgtaatgataaggtacacaacaatagtccagttgatgttagcagatgtattgattctatttgctactcttttgcagat

SEQ ID NO: 159535 - DNA, 536 bp, Cannabis sativa
  modified_base (436)..(445): a, c, t, g, unknown or other
tgtacttttgaatttgttagtagacaatgtaattttatggcccataatgtggccaagtgggccttttcccatcagaggttcggctttgtgcctctttcctctatgcccgaaaatatattttgtaatgaccgcgaggtctgacggtttttaatctaatgcatgcacgcttttcttcaaaaaaaaaaaaaactatttactacacatataaaaaaataattatgcttgtaataaaatatttaaattttattttcagtattaataacaagggtctaacctaaattttagtggccataagaaacaaaataggtaattatttagaaacgattgtgctgtttttcttataattactagtgtattcttgagttttttgttttggggagttctatttgcacctataaaataataaatataactcattattaaaaaaaatataaannnnnnnnnnttttaaaaattactcttaatattttttttaaattttttttctcacattattttatgttaattttaatatttattttgattttatttttata

SEQ ID NO: 159536 - DNA, 689 bp, Cannabis sativa
ttcaaggtatttgccgcaactgaaattcctacttgttgtcgactggaagttgtaaaggatggtcgagaagtcactactaacaagaagaaagggaagtctaaagaacgcttttaaacttttcaacaacgtatgaaaagactgttgtgtaggaattgtgaaggtgactctcaatccaaggataattttaaaaattgcaatgtttgaggatagttttcttcgtttggaacaagggccctcatggatgcaagaattggattctacccaccgccaccaccaccgccgccatactgatgtggcgctcaggtaagttcccttccttttagttttaaatgtcacattgaggacaatgtgtcactttagtttgggggtgtgaacttaaatttttaatttttgatttttaggtctaaaattgattttttagtgtgagttaatttgcttaatatgagttaatttgaaagtatgtagatagcataatttgaaaagtttatttattttaaaaaatccgtgtgcttggtgatgttatattcttgactaatttcaattttatgccgtaaaataacatggatttatattaagtaattttctagtaatttaattgattatgtatgctaaatttgacttgtgaaaagttgtttggaaaattctagaacttgtttgcttgctatttgaggcaaaataataaattatgc

SEQ ID NO: 159537 - DNA, 610 bp, Cannabis sativa
  modified_base (178)..(182): a, c, t, g, unknown or other
  modified_base (255)..(257): a, c, t, g, unknown or other
  modified_base (477)..(488): a, c, t, g, unknown or other
tttagtaattatattagtttactgtaatatcatttatagaaaaataagtgttttaaggataaaatacattgacgggtgaaatagtaaatttgtccccattcagtgtaaatcatctatagaggatcttcgattattgggattagaacgatggttaaaattcatagcgtatctatatcgnnnnncatatagagtgttctatataactaagagtgcaattccaagttctataatggttcaatgaggaattaataagtnnnggaatttacttggtaaattgtagacctgcttattggaagctcggttgtataggaccatggtctccacactagttgagacaatatttcttgtaagactcaggtaattgattttagttaatcaattataattctaaattagactgtgcctagcttatgaattttcactaagctaaggcttaactgcgaagaaaacatattctaggatttatttgttaattannnnnnnnnnnnaagtctaattaataaatatgtttgttaccccaaattttgcattctaacgtggcatcacgagaatggtgacacgtggactctacttagagcatctgttcagatcaacatgccgagcaggatgc

SEQ ID NO: 159538 - DNA, 522 bp, Cannabis sativa
agacacaagccatgatcagatagatgaaacgcctgggaaacaagaatctttccataactttgcgaatgaatacccattcaacacgatcaaaggctttggccatatcaagctttaaagtcatccatcccaatcgaccggatttgcgatgagagagtgaatgcatgacctcttgaccgatgataatgttatcagagattaaacgggaaggaagaaaagcactttgagtgggagagatgatgcgactgagaatgggtttaagacggttgaccaagacccttgagatgattttgtagaaagtggagcaaaggctgatggggcgatattctgttatctgttcaggatttagccgtttgggtataagaacaatgagcgtcttgttgatggccgataagtctgcatccccatttaggaagtttagagcagcaataaaaacctcattacccagcaaatgccaattcttttgaaagaaactgccactaaagccatctaatcctggagctttatcatgagctagttggaaag

SEQ ID NO: 159539 - DNA, 715 bp, Cannabis sativa
aggggcaccggcggtcagatctcagaaaaatagaagagggatgaggagctgaagaggcaccgggccaccgacagcacagttcgcctgactgagctgaccgctgagatgagaacccgccggagaagacgaagcaaccgctggttttcttgggttacgatttagtttacgaatggtaatatactctttttattttattttgttgttgctgctgctgttgagagaagaggaaatcattagttctacaaacataaagagagaaccaaagaaatgggcaaccatgaccacgatccaacctattaagtattaagttttaatattatttttcattgtattaaaaaaaatatattttaaacttaatagtattgttcgggtatcgggttaaaacccgaataaaaaaatgcattattttaaaacccgaactcgacacccgtgttgagcatttttgggttagacccgacccgactacacgggttttaaatttttcggcttttttcggcagcgggttggggcgcgtggtcgggttttcgggtctaaatgttcagccctacagataattgctcatcaacttgctgtacagtttgttccttcaattgatcaagtggcagatcttctcaccaaatctttgtccacagatagatttcactacctaaagtccaaactcaacatggctatctccaagttcagtttaaggggggatgttaataactaatcttgg

SEQ ID NO: 159540 - DNA, 819 bp, Cannabis sativa
  modified_base (105)..(130): a, c, t, g, unknown or other
  modified_base (535)..(539): a, c, t, g, unknown or other
ttttgtagtagtatttctaaaattccttttgaaatatgtggagattatatattatatattgaggaaattaaacttactatgagattttaaaagttcttatgatannnnnnnnnnnnnnnnnnnnnnnnnntttatatggtattttttttttattgttaggtcttttatggtattttatatgccatatatatgtaattagatttttaaatctcatatttaatgtttttatttgtttaggaagttttatttgtcattgatgccggaaaagtcaccgaagtttactgcaggtgccggaaaagtcaccggagtagcggtcggtgccggaagtcatcggagttactgccggtgccggaaaatttgtcggaattggcattgtcgccggaaaaatcactgaaaaaatcaccaagaaactactttcttgctgatttttccattgacaatgcccattctgatgacttttctgaagctagcagctactttgtcgactttttcggcaccgacaacaaacttcggaaaagtcatcagaattggcatnnnnnccggaaaaattaccaagaaactgaagaaaccagtttctttgtgattttttcagtattttttatgacgataatggcaattctgacgacttttcctgcgttggtagcaactctgacgactaatacaccggcagctactctagtgactttttcagtaccgacagtaaactctggaaaatttgttggaatcggcattgtcgccgaaaaaattactgaaaaaatcacaaagaaactggtttcttttcttcatcaagaaactaatttcttaatgaagaaaccagtt

SEQ ID NO: 159541 - DNA, 539 bp, Cannabis sativa
taattgggttaggttatattagtcggtggcattggcaatggtataatagcttgtttaagctttggaatcttccattccattcttacataaaggcatcatctcacactcttttacacctattctatgggtttaggaaaatatagaaaagaaataagaaaaacattgggagggccaaacttttttttgttttaattttgtacaatttttttttttgcaaaacttctttaagtttatttttttttataaatttgacacacaccaattaaatattatcattatttatcaattggataaccattgtatacatctgtgtatatgtaacagtaaaatttcaaagtcgataaagtggtaatttagttagaattaaatcgtagatatatataatagttgaaactagtcttccaattaataacaattatcaaggttatgtgattttatttcccaaaaaaaaaaatatatattatgtaaagtaaaaatacaagttattaatttaaatagttattttatttctattaaaaaaaataacatattccacattt

SEQ ID NO: 159542 - DNA, 701 bp, Cannabis sativa
tcgagaaaattgcgaccttacttctaagcccatagtattgaagttttgacaaactaccctatgaggcaagttttagcaaaattagaggccttgggtagattgttgaaatggtcagtagagctgagccagttcgacatcaaatataagcctaaatctgcgatcaagggacaagccctcacagatttcatactcgagtttccaagtactgaggtggcacttatagaagaaagaattgatcttgatgtaccaaacaatgaaggatggactttgtatgttgatggagcctccaacagtgaaggctcagggggaggtataatacacataagtcccagtaattttaaggtacatgctgcactcagatttgaattttctgcatctaacaatgaagccgagtatgaggctttgattgtaggattgaaactcgctcttgagatgatgattgagtatttacaagcttttagcgattcccagatcgatgtctctcagataaacggggaatatctggccagaggaggacgtttggctagatatctcgccctaacttacgagttgctacaaaaattcaagaaagtgattgtttctcgagtacctcgtgctcagaactctcatgcagatgctttggcctgtttggcctcaacaagagaagtcgagttactcgatgtaattcatgttgatgtgttaactcatccaacagtcagtca

SEQ ID NO: 159543 - DNA, 761 bp, Cannabis sativa
  modified_base (531)..(533): a, c, t, g, unknown or other
aatgtattgatcagccaagttatcagggtaaggatactatatatataattgacaaactatgccgaacagaccttactctgtccatcactattatacctcctatactcccacttttatttgatttactactaaagactcactatttataattccttagtcagggatctttgattcttacttcccatactacctttaagcacaagtcaatacttcatttaagcatctcatgttacatccaagcgcaaccaaattatcaataccctatcttgttcttttcttctaatttttccactttcaattggacaaaacttagttgtgtgcaataagttagttattgtcagcttgagagagtccttccaaagatctctattactggctttttagattgagaaaaaacatctcatattttttttttttttaaattctttgctctgaacaattttagcttttgacaaatccattgtcattcttttctcgggcattataaggcctagaaacaccatctcttttcattagggctggactctgtgnnntttcctcttagtttctcattagatgacaccccaatacacttatactattgtccataatataagtcgtaattggattgtagtatcctttgctcacattgtaccttgaattcctttatgttgcatgagtattttcttatcaccacacttatcagaaacttgtatagtccttgccataccatgaaattcttcaatatatgttactttggtcctaattatgtctcacttttc

SEQ ID NO: 159544 - DNA, 501 bp, Cannabis sativa
aaatccaaagattaacatactcaattcatcaagatcacaataacacctaagaacatacaatcacaagaagaacacaactcaagaaatgcttttaccaccataaaattcagcaagaaactcaattagaaaatctgtaaaaactacctcaattcacaccaaagcaagagcaataatcttcctccaaactctagctccaaatcaagccaaaaccaagtttttccttccaaaatccaagttgaatgcaaagagggtaagagagggagaaggttcaggtgagatagagaagagaccagaaaattaatttgattttctccaaaaaaaaaaatcacttttaatcaatgtaaatcaaatatggtcaaatgaccattttgcccccatagcttaaattcacgcatacaccctcacaagggtaatttagtcatttcatgcataaataattcacaattaatttcagattatcactcatcaaataaaatgccaattaaatcaatccaatttaca

SEQ ID NO: 159545 - DNA, 601 bp, Cannabis sativa
gccctcaagctcgcagtggcagtgctttgctttctccttctccaccatttcagcataggtggttttttcgtctgcagtaatcatcagatcatgtttaatattaacattcagtccgtcaaggtatttttccttcttactgaaatcggttggcacaattcctgaggccaatctcgccaaccgatcaaactgtgttgtatactcagtaacactcatattctccctctgggtcaggtgagtaaattcttttctcttggcacttctaacggcctcattataatacttcgcattgaaaagttcctggaacttttcccaggttatcgtggtgacatcgcgtatcatagacaccatgtcccaccacaccaatgcgtcctcttgaaactgaaaaagtggctcacaccactctatcattcccggtgacacccataaaattcaaaatcttggtgaccacagttagccactgctcgaatttcatgacgtccggacctcccaaagaaacctgagctgccttgtaacggcctaaataattaggcatgctacccaaaatgcttatgaaaccctaatcccctaatcgggattgctaaataaaacagcgcagaattta

SEQ ID NO: 159546 - DNA, 504 bp, Cannabis sativa
  modified_base (474)..(477): a, c, t, g, unknown or other
tcccttaaaagcatatgaaagcaaactataattgtagtatgcttgtagtattaattaagtcgattagattttatttttcctgccaaaaaaaataagtttagaagaaacaagttggtacggtaccaattaaagaacatttaaaatcattcaagtgatcctacattagaggaacttttgaaaataaatacctacataaaaataatttaaattaactttagaaaaaataataataattaaaaataaaaattttaatcattaatatgattttttttaaaaaaataaatatatcattaaatattattataatatgtataaattttaattatatacaagcagtcttatagtaaaaatatacaccttacatcatataaccacaagatctaaaatcaatactaaaaaaaaatttcatactaataagaaacttttgctaggtcctactataatattactctatatatcaatatatatatatannnntatataaaggaaagcacaaagggagtt

SEQ ID NO: 159547 - DNA, 517 bp, Cannabis sativa
agtacaaattctgctattcttgtttttgttgctgatcaccaacctgtttttccaagcctaaaactccttcggtcagcccccaactcccagccaattttgcacctaatctgcaaccttgtaggagagattacactcgacgaaaagatgctgaattgattcagcaacttcagcacaaaccgggcactctacattgtccagcaagacccgaaattgtagcattttgttccttgttagcagctgatcattaacaacttgccacaagataaacctatgcttcaggacatttattgaactccacacacccctgatgtaaatgaaaggaatctgaggcagtttactgttgtataaaagatgaggtttgaacttacccgaagcccctgcagtttgaatgtccaacctatcaaatttgtgtctcacatggcaaagctttcgccaatacaaactcgagtcaatctttagttcatatgtccaaatagatgagttctttagatatatattgttgatccatttcacccaa

SEQ ID NO: 159548 - DNA, 774 bp, Cannabis sativa
cccagaagccaccacgtgtcccaattttataccgcctgacctctcatcagccccttttcaatcaaattaatgcaaaaagaaagtggttgtctcaccatttcatcagtttttttgtgccatttatctcactaatcacaagtttactatacaatatttatgtttagaatcaaaataaattaatagagaaatttaacggaataaataaaaaataatcggaatcaatatttgtaatatgttgtttactaaaattttttgaaaatggaatagttgtgatttatcttgtttactttattaagaaaagtaatctgaatgcttaaattgactaaattgctcttttgagttaaactatattatatgttagttattttgtaagatatattttaaatgacaaaattatcattatctatttaatattaaaaaataaaataaaaataataaaaatacattacccttaataacattccttacaaaattggtgggagaagttctccctttcttttctcccttatttaatcaagttatccctttcctaattttaataatgtaagtaaacaaaagtatggaaatgattacatcaccattgattctcattacttattagtaaacatgccaaaaatgatacacgaaaataccatatttgaggagcaaatttgcactataaaaaggaaccaaatacaatgaaaaaaataatcagttttttagagtagtaaaattatactctctttattattttcttatttctctcttagttttacttattttacgagataaaaa

SEQ ID NO: 159549 - DNA, 517 bp, Cannabis sativa
  modified_base (102)..(105): a, c, t, g, unknown or other
caaaataggcaagctactgaataacataaataacagtataataaattatttaaataactataaataatttcataattaatcataaacaactgataatttccnnnntaactaagcgggctttacacagtaagatcgatatgcataacatatataagaaatgctataccagctttatgcttaagccatcctgagcctaattaataggcttaccaaatggttaagaatgttctcaacgaaagtacgaccactgtaccatatgcactaaagtaccaactccgtactcctgtttcattggtagggccattattgtacttccaagagttactgagtattgtaccacatgcacgacgtaccctctggtactcgtgttggtaacactgtaactatcctaaaaccctacactgtactaacacccttaaactacatttttattagtgtttgtagtgtaaacaattaataacatgcatacattcacatatatatactttatgctatcttacctcatttccatgctcag

SEQ ID NO: 159550 - DNA, 532 bp, Cannabis sativa
gtattttcccctctcacccgacccctctctctctctaaaccctcttgatgtttcaatttttcgaattgaagaaaagtgtttggttttagcttggaatttgcttgatttggagcttaagacttggagtttgattgtgcttagccttgcaagtaattgaggtagtttctaaagctttaattttagttgttgttgctgatttttgttgttggatgagcatgaaaaagggttgtgaaactttgatttgcatgtgtttgaatcttgagttgttttaaatgagtttatgcatgttttggttgtggattatgttgttgagctttagatggtatattggggatattttttctagctttaaatccatgggttttatggtatttcactgctggaaattgattgagttaatggagtttgaagcttttgttcaagagcttgaagttgctaagttaagcaagagttttgggttattttatgcaatctgattttggaggttttattttggaatttaatgcatgaatatgtgttttaaagtccctaa

SEQ ID NO: 159551 - DNA, 548 bp, Cannabis sativa
tattgtttaatttcttatttttttttttcattttgcatgttccttttgttgtttcatttattttatgttttgtttgatggtgagtattgttgttgttttggttttgttttgttaaattttagggaaagggtaaatccccagtaaagattgtgcaatcaagaaaagggttgtagaggtgtgtgattttcgttatttttgttctattttttttatgcttgtttttgttattctttaattttttggtgttgttgtagtgtttttttagtagtgttttcttttgttttttttaggattgggaatctaagaacacccgatcaaaatactaccattctagagtagtaacttctagttatagccaatatccttatccatatgaagaaaaagtccaaactacaacttcatgtaatggtggctctcactggagagtttgtcatgttgtataaaatgttgatggaatgtcttaattggttacacgtatcaaaaatgcaatgaagatagagactactttacttctaggtggtccttgataatatatatatatatattat

SEQ ID NO: 159552 - DNA, 710 bp, Cannabis sativa
ttcgtaaaatcaatgtaagtgtagcttaatttgtttgcaagtaaaatatgttttattttagttgcttgacagttttatgtttgttttgcaacagttctttttcctgattttcaatttgtttttttcaggtcccagaaccaaatccaagtcttgctgttgaaaagacagctgtcattccttctgatgaagaagctgagatactcctcttatggataagagaaagcgtgcaccgacattaaaatcaccttttgttgattttgggtcggctgatgtgaggagcactccaatggaggtgatgtcatcaggttctcaatcaggaggagatgagagggattttaagatggttacttatgtgaagggcctttacgctcttaacgatttttttgctgataccgtctctgctaaaattgaggtaaagtttgatgcttgggttgatgaaggtttgctgaaacatcctaggtgactattttattctttatgtttttgtattctatttttttgtttcaattttatttttattttttgcatatatttgattttaatattttttttttgttgtttgtttgttgttttagtcatttcaattgttatgttaatggtgcgaagaaattttccccagggtttagattaggtgtttattatgttgaagataaaacctatcacttggctacctgtgacatgtttatcaatgactcggtaaagtttctatt

SEQ ID NO: 159553 - DNA, 613 bp, Cannabis sativa
  modified_base (28)..(28): a, c, t, g, unknown or other
  modified_base (244)..(244): a, c, t, g, unknown or other
  modified_base (434)..(436): a, c, t, g, unknown or other
  modified_base (502)..(510): a, c, t, g, unknown or other
tatatagccgagctttcaataagtaganctagaattcaccaagtaaattttctaacttattaattccgccttgcgccattatagattaggaattcaatatcactctcaattatgtagaacgctttatatgtaccacgatatagatacattatgattatccattgttacaattctaatagtcaaggatcctctatagattatctacactggatagggacaaatttaccgttctaccctttaatgnattttatccttaaaacacatagccacctataaattatacttcaataaactaatataattactgaaatgaggcatcaatcatttttctctattcagccaagctctaagaaaatcatcatttcacttctaaatacttatagaagttataaattccatatctatgatcagtgctctcactcaattgaactacnnngttcccaagatgtaaatatctgctggagctttttgttagcacccacgaacaacttgaagaacatannnnnnnnnactaagctgaacctaaccatattaagattaagatccatagacctaagatcaaccattgatattggcttagaaagatataatggtaagtttatgatttcttatc

SEQ ID NO: 159554 - DNA, 553 bp, Cannabis sativa
tttaaattaatttgttttttcattttaccttaatggatacccgatgggtttcccataaccgatgggtattcccctaccctgaatccgtagtttattagacggggatgaggcggggatgggggtataaataggtaacggggatgggggcggggattgcattccccgtacattaaccgaccaatttccatctctagtaattagcctatctagtaattacacagttacttccaaacacacccttaattttttaaaataaataaaaagaattcctttataatttcatccttaattaattgcgtaaagccttcgttttatgctcttatcaaatcaaacttccaattgaatcacatatccacgtgtcctcataagcatgcggccacgtttcaaaatatgaatcacacaacgaatctgattttttttttttttttatgttggggttaattaattaaggtgtaatacttttttaatcagtttttgtttttaaaattagaaaagtgaaaatattttttaaaaacatgttctataaaactgtttttgcttttcaattttttaa

SEQ ID NO: 159555 - DNA, 642 bp, Cannabis sativa
ggtgtgggtatgtttgcggtagcttcagcttcattgcactccgtgatgaagtctactagcgcctgcccttttatggaaatgcacggaacgtagtgtagatcaaattggcttaactccattgcccatttgaggagccttccagatgcctctgggttttttgtaagacttgtcagagcgggtggttggttaataccttgattgtttgagcttggaagtgaggtctcaattttctcgacgtcatcaggaggcaaaaaactagtttttcgatcactgggtatcgcgttttcgctcctatcatgcgcttgctaacatagtacacaggatgctgagttttttcctcttcccataccagggcccgctaatcgcattctcggagacagctaagtatagtaacaagtcctctccgagaacaggcttcgataggattggtggcttagccatgtgttctttcaattttttgaatgcctcctcgcactcgtcggaccattcaaatttttaacatttcttcaagatgttgaagaagggaatgcatttgtttgtgcaccaggagataaaacggctcagagcagcaacctttccggttaagctctggacatctttgtgcttcttgggggaaggcatgctcaggagggcttgattttt

SEQ ID NO: 159556 - DNA, 755 bp, Cannabis sativa
atcatgccactagttagtagcttgtccacctctttctccagagcttccgccttcactggattgaggggacgtagtttctgctgaattggtggcatattcgggttaacattgaggacatgggttatgacatggggacttatgcctgtcaggtctccttggcaccatgcaaacacatctgtggctgcccttagtgctttaattaatttttctttttcctccggttctaggctttttcccagccggaggatcttggtagggtcaaggtcgcatactggcatttcctcgacgtcttccataagttctacaatttttctggatcccacacggggatccaactcatcttctttcgccactcctggctcgataccttcacagaccatcaatactggtaagtgggccgcaacattgtaacattgtctgcctctccttgattacccctcacggtccctactccatcttcttgagtaagtaatttcacacacaagtgctggatagacgtaactgcgctaaagtccactagggccggtcggccgaggattgcgttttaagcagttgggcagtctaccaccacgaatgtgcagtatttaaaagtgctatggggtttcaccagacacaaggtgacttgcaacctcacttttcccattgggataagtgtggttccattaaaccctgtgagctgggaaccgcttggagaaagatcccggtccatgaggcctatcatcgtgaatgcttctttaaacaataaattcacagaa

SEQ ID NO: 159557 - DNA, 600 bp, Cannabis sativa
taaattttcacttatgattaatggatctcttcatggctattttgatgcaaggagaggactgagacaaggtgacccaatgtctccattaattttttttcttggcatggaatacctcaccagagtaatgaagaaagtgggacataaaccagacttcagatttcatagcagatgcaaggacctgaagctgaatcacctcatttttgcagatgaagttctcatattctggaattgtgattacaaaagcatttactatctactataggggcttaaattgttctcaaaaacatcaagattgcaacattatccaaacaagtcaaccatttactgcaatggaatggaagattccgaagtacaacacataattgatgcatcgggttttcagagaggtgcagttccattcacttatctgggaatccccattagccctaagagactctcctcaaaggaatgtggtatgctagttgacaagatgactcacagaatcaaaacatggagtaccaggcatatctcttttgccggtcgagctatattaatcaactcagtcctgctcaccatacatacatactggagtcagatcatgcttcttccaaaaaagattat

SEQ ID NO: 159558 - DNA, 517 bp, Cannabis sativa
  modified_base (174)..(176): a, c, t, g, unknown or other
  modified_base (349)..(355): a, c, t, g, unknown or other
ctccttatagaaatttcgtcccgaaattttcctgaataacttcggatatttctattgcatatccgtctcgagttcccaagttgcctcttccactttactgttcctccacagtactttcaccagtgcaactatcttgcttctcaagactttctctcttctatcgagtatctgcannngtttttcctcatatgacaagtctggctggagttccaatgcttcatagctcaggatatgggacgagtctgagacgtacttttgaagcatagaaacgtggaacacatcatgtacagctgccagcgctgggggcatagccaatctgtacgctacttgccctattctctcaaggatnnnnnnnggtccaatgaacctcgggctaagcttccctttcttctcaaagcgtttaatgcctttcatcagagatattcgaagaaataccatgtcgccgaccttgaaatctatatcccgacgctttggatcagcataactcttctgtctactctgagctgtgagcattcgc

SEQ ID NO: 159559 - DNA, 521 bp, Cannabis sativa
atggccggccagagggtggggcagccggggcctaggccccaggccccaggtcccataattttggagggcccgaaaaaattaaaattaatattatatatacaaaaataaaaatataacatatgtatatatatataaattttagttcaatagtttccataatatggcttatagcataattgataagagtgagattttgtgttaatgtgtgggtgctgggttcaatttttagctccctcacattttagttgttttaaaaattcaaaagtactggttaaaaggtttatttatttatttttatttatttaataaaaatgtaatattttaagatatattcaatgcattacttaaaaaaatatataatataatatttaggaatagatctatagaaaattattggggttttttttcttaaaaagtacatgatttaaaaaagaataaatattatttttaaatatttttagtaaggagcaaagattatgtttagtaaacaattttttaaaaattactcttggtgcaatcaa

SEQ ID NO: 159560 - DNA, 655 bp, Cannabis sativa
  modified_base (86)..(111): a, c, t, g, unknown or other
  modified_base (241)..(246): a, c, t, g, unknown or other
taggcccatggtccccatactatttgagaaaatactacttgtaagacttagttaatttattttgattaattaattataattctaannnnnnnnnnnnnnnnnnnnnnnnnntttcactaagtaagggcttatttgtgaagaacgagttactagggtttatttgttaattaagagaccttgttaagtctaattaataaatatattatatgataatattttttaataattaatttttagttannnnnnaattagaattggcatttaagtggtcaaattggaaaatttgcatttttgagaaaataagttggaaaaatgagaaaatggcaaaattacaaagtgggggcccaataccatcgatggccggccactagggattgattttgccactttatttttttattatttaaatgctgattaaatctaacctaaccataagtgttttcttataaataggtagtgatggcttaatggaaaagatgatgcatctcattccttcaaaaaaaatttagcctcctctcctataccctaaccaaaactcctctctctctcttcctctcttataaaccgtagcctatagtgaaagagtgagggcccacacaattccagtggtactcaatcatagtgtgtaaggatgtgaagaatccagtttcaagag

SEQ ID NO: 159561 - DNA, 552 bp, Cannabis sativa
cgagtatcagcaagagtatttttgctaaaaaagattgaggatttagcaaaattcacttgttgacccgaagccctttcatataacagaaggatctgaagaacacttgcagcctcgtcatctttggccttacagtacacataactatcatctgcaaaaagcatatgagagactatgggggcgccccttgccactttgatacccgaaatgtgatgacgaagttggtaatccttcaacagagaagagaaaccttctgcacaaattagaaaaagataaggggacaacggatctccttgtctcagccctctgccaggggtaataggtcccatacaatgaccaccatgagtgaccttataccttaccgtactgacacaaaacatgatcaaagaaaccacccttctatcaaagcccatacgcaacaacaccatttcaatgaaaggccattcgactctatcgtaagccttactcatatcaagtttgagagccatatagccacccttccccattcttttcctctttagataatgcataatctcaaaagaaaccataatatta

SEQ ID NO: 159562 - DNA, 517 bp, Cannabis sativa
  modified_base (49)..(63): a, c, t, g, unknown or other
  modified_base (140)..(142): a, c, t, g, unknown or other
  modified_base (457)..(466): a, c, t, g, unknown or other
ttaaaatagaatattttataaaataaatttaatatctgaccttagattnnnnnnnnnnnnnnnataatcaaattttaaaaaaataagaaaagaagtaaggaaaaatagatttttacctaatttcaaattcaaattacacnnntatctaaaattaattttaaaaaacaaaattaatttatttctaataattagatttgaaatatgaaaagtaaaaatcaaagtacaaaactacacaaaaaatcggaagttaattccataaaatagcatgaaaaatcaaagaaaaacgaaaaaaaaaaattgagttgtacggatggtctgcaaagcacaccatccaggtgcacatccttgggcgcaaggggctgtttgggcgcacaaagggtgctgccatcagccagccacgcgcgcaagggtgtgtcaccacccccgatttttcaaaaacttcaaaaaatcataactnnnnnnnnnnaaatcgaaattgagttctgtaaataatgaaattgcttaattttttttcaaa

SEQ ID NO: 159563 - DNA, 525 bp, Cannabis sativa
aaattacctacactaagtgttctccaaactaattatgtattaaaaaaagcataataattcaaatttcccatataaaacttgttgtgattatatagttttttatgagaagaaaaatttatctgtagttcgagtcattatctgatatttagttttaatttcatatgataaactcttactttcttaacatattaaactgaccattcacctatagttcaatgggtatatttttaatgaggattacttatgaatgggtaatattaaaaaaaaattgagtttttatgcttaatttttgtatttaattaaaaaaaatctctcatttttacattatatggactgagattgttacatcggttaaaaaaattaataaaaaaaattatttagcaaaaaaaaaagataaaaaagataagtatgactgaaatattttttatatcactacattttttatatagtgtaaaaagaggtactttttgatattttttataattaagtagctaaattaaatataaaaattcaaatttctctttt

SEQ ID NO: 159564 - DNA, 531 bp, Cannabis sativa
attttactaatgctttatatatatattcgagtgatctaaagtatgtatacattattttaatttatattttgattgttaggtattttttggtaatttagttgtcaaaatattttttaattaatatgcattttattgaacttttaaattgtttttattacattgattttatgcattttattactcttttctatcttaagaaagaattatttttcagctgaacttttctttgtttggaaatttcttgtaagagaagaaattctcttatggaaaattgtctaattttgggaaacttgacttttcttttttctaattgatgatttcgattttgcctttattagaacaaaccaaattatctttatttggcaggtttgaagtctaaattcgtgatcttggttcaatttgaaaagtttcctttcttgtcctgatctgctactgcgaaactcgattctgatactgcaaataaggaattttttaagaaagttttgtacagatggaaaatcgtttttgtggctgtctctagggttgctatgt

SEQ ID NO: 159565 - DNA, 510 bp, Cannabis sativa
ccggtcagaatgttgacatgcccctcgcccagacaacaaattctgcagctcctactggcctagaaggcctgtacaaggagccttggactccaaccgtctaagtacttctctttttatctttctttttttatatctgtcgggccataaggaatttttttaagacaacgtgactggccaaacggtctttaaaattggaattatttttcatttttcaaacaataggctgaccaggcagcttttaatccaggttttacatgcttttgttatctttgatgaatttcatcctctgtttataatcatcgtgcaactctgtttgttttatttttaccaaatgctttgtacatgtataggtgccccccattgaccgagcagacttatgactcttggtcacttgttttttacaagtatactcttttctctattcggggttttagatttgactaaacattttgtaaagaccgcttagtttcgaaattagcagttaatcacgtttaattatgaaaattattt

SEQ ID NO: 159566 - DNA, 512 bp, Cannabis sativa
accatatatgggaaaacaattccaatctctatctattaggacatgttcgtaaatatatatataatgtataatatatatttagacgggtaggaattcatggttacatcattcatataactacgatagttatatttatttttagttgttggatcattattaaaggaatgtgattcatttaaaattaaataaataattaataaattacttgtaattcaattttatttatttttttataaataaaaaataaaaaaaatatttataaacattattagttgttactataagaaatgttcatatatatatataacatatgcactttaatatacatatcaatatatcataatctatatatcatctctacatgatacatatatttattatatagattttatgatatatagattatacatgcatttcataaataaatattcttatcacaaatatatatcatgtatcacatgctcaacatatataatatatacatgctgtgtattatatatctcacatatata

SEQ ID NO: 159567 - DNA, 548 bp, Cannabis sativa
  modified_base (477)..(492): a, c, t, g, unknown or other
ggaagtggaaagcagtccttggggcacgccttattgaggtcggtgaattcaatacatactcacaattttttgttcaacttaagtattagtacgggattagcaacccaggtcaggtaagaagcttcaattatgaaattgttgttgcgcagcttttctacttcttcttttagtgctagggctcgctccttgtccaacaatcttcttttttgttgaacaagtcggaaattaggatcaatatttagggcgtgtgaaattatagcaggatcgattccgaccatgtcctcatgtaaccatgcaaaaatgtctaggtttgctcttagaaattttatcaatgttgattttacttcgagcagcagacctttttcaattttgagtttcctggtcggaacatttgggtcgattccaatctcttctaattcttccacatcttcatgcccgccttgggcggttccctatttggcaatgtcttttcccttnnnnnnnnnnnnnnnngaagatacttcctttttagccttggttagggcaggttgtaacattcccgtgcaact

SEQ ID NO: 159568 - DNA, 574 bp, Cannabis sativa
taaattaatcacaaccgtttaataatgatccaacaattaaaataaatgtaaccaccgtaattacatatttgatgtaactattaaaaccattatataaataataaaagaaaaatactaaaaggtgttactgttgtctagcaccctcctcagtattatattgttattggagtaattaagtatcaggtttcatatagcttaagacaataacttttaaaaaatattactaaccaatcatagggtgtcaccatacaaagtgctataaagctcataataaaagtccatattaatgaagaaaaaaaaaacttatggttgtgccagattgttcgtaggagcccctagttggattatgatgatccacaatggatctttacgagtgatagtagggtaggggtgttgggtgttcattcatccaatccaattcgcactattttgttcatagcgcattcgatccgcactaagtgtagattcgttttttggaacaaatccaatccgcacaatagctcaaatctaatccaatctaattcgtaaaagtgcggattggatcggttattttggattgattactttttaatat

SEQ ID NO: 159569 - DNA, 558 bp, Cannabis sativa
ttgttatggatggctgaagggtttttgccaatggacacaagaagtaaaaagatggaggaattcggaaaggaatatcttgaggatcttttatcaaggtcattctttcaacattcaagtagtaagaatgaatcccgtctccacatgcatgacctcgtacatgatttagccatatttgtatcagatgatttttgtttgagattagacatgagtaatagcttttcaaccaagatacggcatgcctcatatactttcgatctcaacgagcttgaactcaacatgcgtaacagtttgagtaaagctagctgtttgcgtacctttatagtattgttcaatccatatgaccgttactatttaaactattcattcatgttggatatattgcttacaaagagaagttgtttaagagtactttctttaagccgaacttctttggagaagttgcctgattcaattggcagtctaatacatttaaggtatttagatttgtctaatagttttattgaagagttacctgattcaatttgtggtttgtacaatttacaaactttattgctttca

SEQ ID NO: 159570 - DNA, 522 bp, Cannabis sativa
attacaatataatttaagatttaattttaagttatcgattatttgagttataaagttattattgttttttaaggtataatagttattttaatgattgaaatagtgcttgtggatctacttcagatactaattgcatttgacaagataaattatttctcatttctttataatttttcggtttgaaatattttctctatagtgactattgttagtattttttataattttttttttattaatgcttattttgtttagttgtagtaaaaataaaatataaatttgcaacaatatttaattactcattatttcaattttcatcctactaatatattgtttgtttatgtgcagttaaaacattattgtcccttcaagcttttggagaaatgatataagtttttataacaaattacatgtcggtgatgatgacaatagattgaagtctgttacaaagattttacaactatgattgcttttactatcagagttcccgctcaaataattttaagaccattattagaagtt

SEQ ID NO: 159571 - DNA, 514 bp, Cannabis sativa
acactgataagtcaatatggaaaatttttcaatttttacttgaacttttttatttataaaaatatatcttctataaaaataataattttttttattattttataatttatttataattatattatagttgtttatcgaggttaatttctcatttgtttttttttacctttttggtttacaaagtatatttttgtaactaaaaatttaatgtcgtcaaattataaatgaggttttttcaataatatacttaaaattgattttatttgcaaaaatactttcaacaaatttatttgcacaaataccgatgtgtcacgtcaacattaataccgaaattcaaaattattaccaaaaatgaaaaaaacttgaaaattctcgctttcagaaatttcagcgtttttcaagttttaaaaaagtaaatttttagtggcttttgatgtaaataatttatcaattagttactttttattcaaaaaaaaatgtttcaagataattttttctcatatacatttagtta

SEQ ID NO: 159572 - DNA, 523 bp, Cannabis sativa
gaatttacaaagtaaattctctaacttattaattcctccttgtgccactatagattcgaaattgcactcttaattatataggacacccagcttttgaggctgagtgttcatgccttctccctgtgtttgcggatgaattgtgaggatgccaacttcttctcggattgcctctctcttgtttctgctattcgagattctaatatcccttcttggaagctcacaaatctgtttttgcatttattttcttgtctaaattttgatgctaaatgttgtgtgttttggattcctcgtaaggataattttttcgctcaaaatgtggctacttgggttgcgtcccgtaacattgttgggtctctttgtgctggggatgtagcaccccttgttgctactcttgactgatttgtctagtttttatgaagtttttggtttcagcaaaaaaattatatagaacactatatatgttccacaatatagatacactataaattatccattgttctaatctaaataattaaagatcctt

SEQ ID NO: 159573 - DNA, 644 bp, Cannabis sativa
tgggcacattatcagcaaagatggaattaaagtggatcctggaaagatagaatccgtcagggattggccgagaccaaaagaaagttacaaaagttagaagcttcttgggtctagttggttattaccgtcagttcgtagaagggttctctaaaatttcaacacgcttaaccgagctcactaaaaagaatcagcgttttgtgtggacagataagtgtgaagcaagctttcaagagctaaaatggagattaatcacagctccagtgttagccctacattctgataaggagaagttcatggtttattgtgatgcatccagacagggtctggtgtgtgtactgatgcaggccgattgggttattgcctatgcctcccgtcagttgaaagaatatgagaaacggtaccagactcatgatctagaacttgccgcggtagtatttggtttaaagatctggcgacattatctctacgaagagagatgtgaaatttatattgaccataagagcctcaaatacttctttactcagaactatttgaatatgacacagaggtattggtttgagttggttaaggattacaactgtcaaatcctttaccatcttaggaaggccaatgtagtggctgatgccctgagcatgaagggtccc

SEQ ID NO: 159574 - DNA, 556 bp, Cannabis sativa
tgtaaaggaggaaagaaacttactgtttgaaattagggcttggggcagtgaatggttgttcggtctgtaaatcttcgaatgcagcaaggatcactttgagaagatgaagtcagaggaaaatcgtagaaaaagtgtcaaggacagggatggcatgcaaatcctcaggcaaacccaatggtgattcttagcaaagaagcttaaggatttgtcagactttctaaaatagaggaaataatgcaaaggtggttccttttttcttactttatactcatgatcagctttgtcggatcaagaaaatgtttgattctatggacagaattcaaagaggaaggggaaaagatggtcatttaatcctgatgtacctcgaaatcgcacaactgctaaaatcagaggacatgcgtctttttaaaagggatcatgacgaaaataccctttgtaatcattataaagcactttttatttgaaaagaactttttaaggggcaattgttatacccaaaattcggctagcacatcagaggaagacacatgtaaagctgggaagaatatgaactcag

SEQ ID NO: 159575 - DNA, 722 bp, Cannabis sativa
atgtttaaagaccagatcggacaaaatatggaagtgtacgtggatgatatgctcgtcaagtccacaaaggctggggggcacattgccgaactggatgaatgcttcaaagtcctcagaaagtacaatatgaaactaaatccctcaaagtgttcctttagagtcatctcgggaaagtttctagacttcatcgtcaatgcccgaggaattgaagctaatccagaaaagattcaagccctcctggacatgaactcgccaataaaaactaaagaagtgcaaagcctgattggtcggatcgctgcacttagcagatttgtttcaaaatcaacggataagtgcgtcccattcttcaatattctgtgaggaaacaaaaaatttgagtggacagaggagtgtgaaaaagctttccaagagctaaaagcacagcttgtaaaacctcctgtactctcgaaacctctggacgaagaagaactcagaatatacttagtcgtcacggaacatgccgtgagtgccgtgctaatgagagaagaaaacaacgtatagcacccagtctattacattagtaatagactcattgaggtcgaaggccgatacccgttgatagaaatgcttgcttactgccttattctagcaacaagaaagttaaggccttactttcaagctcatcctattcgggtatacactgaccagccattacgccaaatactgcaaaagccagatgcttc

SEQ ID NO: 159576 - DNA, 599 bp, Cannabis sativa
tttttctctcaaagattttccgtctctttttctgtagaatctacccatatttataggaatataggttggcaattatttacatttaaatttgaattacataatcgtttcatgaaatgtaagatttgatgatcacgtttcatttaaacacgtgtagataacactagataactgtataaccgcttatcattcttatcttcaaaacagttgacgctaacatgggtagaggcatctcgtattgcatgtatagatggccaataataatttggtttgagcatatgccttctagcaatgacatgagcaaacttaagaactactctttgaccataagacctcgcagactgaacaatcatgtcttatatgtttcctagttgttacacttagttattataatgtggagtatacactaagtgtttcaataactgattcatctcatcaatatttccttatatgtagggaggtggatgtcttgctatacattgctcgtagttttctcaagattgtaccttccgaggtaagatggtctctcatcaatacaagaatttatagtttgtgtatccttatctcgccaaagactgtacagtcagcgagttatgaatata

SEQ ID NO: 159577 - DNA, 506 bp, Cannabis sativa
taatgaagataatgatatgtctcaacttaacaagtccgtaaccactttgatacctaaagtttctaatccttcaggtatgagtaattatagaacaataagtttgtgcaatgtcatttacaaacttatctccaaggctattgtactctgatttcaaaaagtactaccatttgtcatctccgaaacacaatcagctttcctatccaatagactcatcactgataacatcttagttgcttttgagcttatccatcatcttaggcataagactcaaggtagagttggattttccgcaatcaaattggatatgagcaaagcctttgacagggtggaatggaagtacattgaagttgtgatgctgaaaatgggttttgattctaaatggattacactaatcatgaattccattagcacaagtgttgggttttgtgccctaaataaaacttatttcaatataattagatttacttattaataaagatcaggaataacattttatgttgcatggt

SEQ ID NO: 159578 - DNA, 607 bp, Cannabis sativa
  modified_base (210)..(214): a, c, t, g, unknown or other
ttcatttctagatgctcacatactacctaaaacggaaagcgataaataaataatcacaaaggcagttaagcatttactctcaacacttactgcaccacgagtcgggcttgtctatggtgatgattgtacatgttcaccagtctacaagaagtttaaaatgttggaatataatttaccaagacctatatttactaacaagtatgtttttannnnnctaaatatgaatttctaaaacgattaaaataaacacacataaagtatgagaaaccttacattggttgtagtggaattaaatgaccccttccgctcaaatctttaaccctggttccattctgttgcagagtataatcaagatctaagcccgacaccccttcagttgtttggattcttcaaagccttacacactatgattaaggactaacttgctatgggtgggcatgcactcaatcattagaaactcgaattttaataatgaagaagactatagaattcgaattagaagagagaaaagaagaagaagaagtcttaaactctctagttatgtgacaatatgaaaactaggtttagagtcattagttggattatgagtgttggaatttattttacc

SEQ ID NO: 159579 - DNA, 571 bp, Cannabis sativa
agctcgtgacctggcacccgaaatagagaactagacttggaactgagatcgagattttaatatctggaccttgggcttggaccaaacttgtagttggtgtctagatctaggacccagtcccggactcgaacccagaccaggacccaaatcaagacctggacctgaaccagtcgtagagccaaacctggaaccaaacccgtacccagtgactcgaaattggaaccgaaactggaagtagaccaggacctgggaaaaggcctggaactaggatttggacctagaaccgtaaccagacccagaactgtaaccggaccagtttccagactcgaactcaaacttagacccgaactgggacccagactccggatccccacccaaacatagacctgggacccgaacttggacccaaactcaaactgaaaaatggaactagactcgggacttaaaaccggctttgagccctagaaccgctgataactctaagatttagagttattttcatatctttaagcttgaatttaatgtgaattgtggagcaattaatgtctatattgtgtaattgtgtttagtt

SEQ ID NO: 159580 - DNA, 501 bp, Cannabis sativa
  modified_base (66)..(75): a, c, t, g, unknown or other
tcgaaatgctggacctagatctggacaacgatcttaacccagacccaaagttggacctggacccgnnnnnnnnnncagatcggggtctagacctggacacatacccggacacagactcggacccaaactcaaacacccacacctagaattagacccaaagctagacccggggtaggacccaaactctaacccagaattggatcagaatcaaggacttagaatcataactgaatcaagactcaaatcgagattgtaacttgggactcgaacccaacctagaccaagacccatgacgcgaacccacatccggagcctgatctggacctagacttaaatccaaacccaaacccaaactcagaccaggactcaaagtccgacccgaacttaaagccaataccgaactcagaatcgcaaatggaactagaactgaactaggactaggaccaggaccaggacctaaatcaaaacccgaacctagatcaaaccccagacagagaccta

SEQ ID NO: 159581 - DNA, 612 bp, Cannabis sativa
tgtgactagtggagaaaaatatatggagatggggcctggccacatttcacaaaggggtaccactataaaaaatgtgagattttctctatttcgattaaaatgattgttagtgcatgaaacctagtatatatctcaacatgtccaatagaaaagttatgcacaatagtctttgtttcgtccttgaaaagtttcacgatttttcgagatgtgtagggtgagattttagcagaacactaacgagtgtaagaggatggaaaaaactcgttaaaatattccttgaaaagaagaatattttaaattttttaattaggggtccattttaacaaaatttaactcgaatccaatcatcatattcatgtcgtagtagtacaaattcaatgtgactagtggcaaaaaatattctacgatgggtccgggcaacatttcacaaaggggtaccactattacaaatgtgttcactttttggattaaaattatttttagtgcatgaaaactactttatctcacagcgtgtccaatagaaaattgatgcacaacactctgggcttcatcctcgtaaaatttcacaatttttgagatgtgtagggtgagactttaaccgaacactaacga

SEQ ID NO: 159582 - DNA, 619 bp, Cannabis sativa
  modified_base (48)..(65): a, c, t, g, unknown or other
tccaatctaatctgcacaagtgcggatatccgcattttgcggattggnnnnnnnnnnnnnnnnnngattggattggatcggatactttgtgaacacccctaaccagcaacatttgtggaatgataatctgacgtgtctttgcattcttaattcttcattgcttcaagatgcttaatcaactcttcacaattcttcctaacatgtcctttttgtgaaaacagtagcattctacttccctccaagagcgtcaataagtgcgattgtctctactgtcatcatatttttctctcgatgtactcctaccacagcttgattctgacattgtcataagagcttgatcagtatgagacatactatttggttgcttaatgctatatgtctccaaaagaagagcagtcgacacatcatccacaattaaagtagtatttccaacccaaggtgtagtcactagtgtctcatttgatattggtgaagaagccaacaaaataatagtttgatcatcctcttcatcaattttgacatatctaaaattaacaattaagttatgcactttttaaatctatttatatgatccctaacatcatctccttcaatcatcttcaactcatataattgtttc

SEQ ID NO: 159583 - DNA, 506 bp, Cannabis sativa
  modified_base (31)..(42): a, c, t, g, unknown or other
cattgttgtagaattcatattaggatgttannnnnnnnnnnntgttagtaaatctagatcccagtaaaataattccaacaaaagaggtattcattatatctggatgacacggctcaagctcttagtttgagtcatatccaaattgtctccctaattcctccacttggtatctcctaaacttgtcctccagctcgtttatccgcaattggatgggatcctttgctttggaccaagctgttggcgaaggttagttttcttccgattcaagtgctctcgcagatccggttgggagtaattgctggcagacctcgtcttactcacagatcacatcctactcatagactttgtctttgagtgactcgcagatttactggttcccatactttcttgatcattagctcgttgagtactttctccttttcaagatgattgattgtgggttcttgactgcctcgaggtcacacttgcttcttcacactctggttctttccccatgagtgtggttt

SEQ ID NO: 159584 - DNA, 729 bp, Cannabis sativa
aacaagtcaaaccccttgctacgtatttagccatatcattcatcatacttggcaaccagaacatggccttgagaccttggtacatcttcgtttatcctggatgaacggagtaaggattcgtatgagactcatttcagatctctcttttaatgtcatcatccataggcacacaaacaagattcataaaccgtgtcattctcgtatcatccactgcaaaattactagtctttccaggcaaaatcctatctcgagatttcacttactctggatcttacaattgtgcttctttaattttctccaaaagagtagattacacggtaatattagccaactaccccacaacaaactcaatcttggctcaggtcatctcatctactaattgtttggaaatttgcttcacggtattcatttgactctgtcctttcctactcagggcatcagttactacgttggccttccaaggatgataaggaatctcaccaacataatccttcaccaacactagccagtgtctctatctgatatacaagtctctctgggtaaggaagtaattcagagtttcgtgatcagtgtatatctccaatttctcgccatataagtaatgtcgcaaaatcattagcgcaaatactactcctgcgagttctaaattgtgagtagggtatttggtcgtactcctttaactgctgagaagcatagctattaccattccagcttgcataagaacacagc

SEQ ID NO: 159585 - DNA, 605 bp, Cannabis sativa
  modified_base (443)..(453): a, c, t, g, unknown or other
ccagaaatataagattagtgatatatttttttttttcaaaatcatctcgtcacatttgtatttttttggggctaattatattattatcatgaaataatgatatgataaaagatttaacaggttaagtgaagtataagtaaacatggtcgtttgcaaagaggttgaggttggagaattgggggatgagagaatatagtttgatataaatttatatatttatatgtataattttttatatatattagatcaccaagtagttaatattagtgggatctagaatataattttaagataaactaactaaaatttacactgaaatttaaaataatagtaaaaaaatataggctaattagtatttttttccctcgaactttgatatgtattaaatcatgcccttgaacttttaatgtcgttaaaaatgccccttgaactattaagattgnnnnnnnnnnngacttttgtccaattttattaaaaaaattctaacatgaatgaaagttcaaggggcataatttagtacatgtcaaagtttgagggcatgatttggtagacatcaaagtttggagagcatgatataaacaatcactgaaatagtaaaattgaat

SEQ ID NO: 159586 - DNA, 535 bp, Cannabis sativa
atcataagctatacaattagtttaggggagcaaaatacttagtgtgagagagatgatagaagggagaaaaacttgcaagattgagaaaaataaaagtattttgtaactctatgtcactgaaaagaaaaaaaaaacacaagaaagtaaaatgtgattgaaaaatattcaaagaaaaagattccagtgatgttgggaaataaagaaaaaaaatcttttctcaatcatggttagtgtgggaacactttgggatatttgaaattataagaagcttgtgggttctgtttgtgtgcttatgatatctttagccaaaattgtttttcgatttccaaatatctaagccatactttctaaacctcaaaatccctattaattccgaaaggatgttgtcaacattagtggagagaggtaagcatgcaagcttacgagctatcagattgtggaataattggaaagagtaaaactattataacattgtttcgattgtgaagtcatcttgtgtttatgcattgtatgataaactgagcatctaaattaa

SEQ ID NO: 159587 - DNA, 604 bp, Cannabis sativa
acattctctaacagcccaataaacatcccaatttttatttgctccacacgtggatagcacataggatgtaaaatattgatattataataatttacttcatagtaatttaaggtgacaaaagtttttaatgttgcaacatgatggtagcttttcaagttgtaacttacattcattccaagttgtaatggaactcaaaagattgtttaagagttcccaaattgtggctatttatttacataatcattcaatctagtagtgatggagctttcaaaagtgaaagcctataatatagtgttccaacaagtggcctctttacatatatattctattatggaactttcaaaataactttcaaaagagcaagcctatttagaagagatgcacacccaagctttctattgcatctgatctttcattagaagcgttgtggttgttttcatcttcgccagtagcttcatgttttttcccttcatcatcagctgtaactttgtatttcttttcaggaagagtcacaagtggagttggattaggatgggaagttgaagcattagagattaattcttcatttgagagtggaattgtatcaaggaatgaagtgatgttg

SEQ ID NO: 159588 - DNA, 514 bp, Cannabis sativa
  modified_base (254)..(255): a, c, t, g, unknown or other
  modified_base (458)..(458): a, c, t, g, unknown or other
cagcctattacgctcgcgcacgaggtcacctgcagggtgtcctgccgaggtttctcagcacctgcagcctcctagagcccaattcgcagcctcataagcgagggtgtcccctgtccgaactaagcatgcacgtgtcttcacacaagattttcccagcatccgcgcacgtatcgccttgtccgaaggactagtgtgcgtgcgattgagccatgtgcacccaaaatttcaaaccttcataactttctcaatttttnncggaatcgagttccgtaaaaaccaaaattgcttactttttcacaagaaatccaaataaaatatttttagaatgaaaattaaattattttcatggaaaaattttgtaattcaaataacatcatcaagtaacatatagaccaacatgaacacatccaaatcaacaaactaacaatattcaacgttttaaatccatatttcatganagtaaatcattaccatggatctgaggtgagttgttggaaatattttaccagtatct

SEQ ID NO: 159589 - DNA, 510 bp, Cannabis sativa
ttaacacatatcctaaaattttataaaaccctagaacttaagtcaaacctatattatgagtataaataagttgaaattattgataagagagacatacaaaatcattgtattgatcaaggtacctggagaattagtaaggctaaaaaacaccatggggactcagtgtccggagtattctagatgtgattttgaggacaaaattgttttaactaggggataattgtaatgaccgtatagttaaatcatgaaaattagaagataattaaggatttaattaatattatgattaaatgcttcttaatagaaattggagcttattggtagaaatagaccttaaaaaaaaaatttcccaattacggagatatatttgaattctaaatgtaatatatatgtgatatttaaaattttataattttcataatttatacccggtaacagtagaattcgatgatttggcaaatagagttatttttgtacgatcaggtatcttagaattagtgtagtaagata

SEQ ID NO: 159590 - DNA, 558 bp, Cannabis sativa
ttgactaaggacctcgaggcttccgaccaacttgaatctaccatcgccaccttgtcagcagaagtgaacaatcttcaagaggaaaggggagttttttggactgtcttccgtcagttggaagcagagaagaagtttaaggaggaggagcttacaactgaggtcgagaagtacaaatcggaggctgaacaacagagaggagaagctgagcagcagagagcgaaggtgacgaggcttggagaaaaggtacatgccttggagacagagggtctcaagattttttatgacttctggaaagctaatctcgaggcaaattttgattacttaggtgattccaaagacatgtttctcgagtattgcagttctcaggtggcttatggtgaacccgaggcgaccacttctatctctggctagaacgttggcatgcccccggctcagacaacagatcctccagctcctaccagcccagaagacccatacaaagagcctgggactccagctgtctaaatacttctcttttatctttctatttttttatatatctgtccggccataaggcct

SEQ ID NO: 159591 - DNA, 727 bp, Cannabis sativa
aagcaaatgaggtgtaattattaaaataaaagttaaaatagactcatcatttaaaattgtatattttggtaattttgtacaaagataaaaatttcattaagatttttatttaaattagggtgtatttataatttattggggtgcaaatataatttcccaataataataattacaccccaataatatatttacatatttaacctttagtaaaataaccaaaataattatttttactccactactaaaaaaattgatttgattgttacaatttttttttaagaaaaaaaattattagttaaaaactttaaaactataaaatcgttcatcaatagataattttgaaatttcattttatattatcaaatataaaaataatacctttgaaaaagtattttatcgatttttattatttatgtttatgttcacattatgcttaaatttgcagaaatttaatgatccataatatataatatgttagatattgttactagatctttatccatttgtcattttttttctttttactttttttttgataacacaatatatgtaatgcatcatttttcataaaataactaaatgtagagaagtaaatcgtggaaattcttcttattctttgagagcttttttttcttaaaaaaaactgtaaagtagattttgaggtgtactaaataataccattttgtaaataaagtggggtgtggttataaaagttaatatttaatgg

SEQ ID NO: 159592 - DNA, 542 bp, Cannabis sativa
tgtaaatagaactcccctttttttaaaaatagagaaaaagaaatgcttgacagcatagatcctcttgaatatgatcaatattaaactgtcaatcacaaaaacaaaattttctgttaaaagaaaattacaaaaaactggactttaagtcaaagtttacaattttactgttacacaaattatttttataaaaatactattttttttataaaataaccgtaaaataacaaaacagaataattaaaaacaatagtagaacaactaaaaaataaccgtaaaataatagtgaaaacttaacacagcacacaatatgaaacttacatagtatttttaaaaaagattccattataaaaataaaaaagttaaaaatttcaatacgatagtgtagttaattatcccaaaaaaaaaaaaaatccaaatcttaatgaccaatttcacacaaaatccattatttccatgtgggtctttattctcttttctggaagaaaactaattatgatgggccaagataaacaaggcccattcagtaataaatgcagagaagt

SEQ ID NO: 159593 - DNA, 650 bp, Cannabis sativa
  modified_base (299)..(305): a, c, t, g, unknown or other
aatttgtgatataaatacttaaatttattttttaattacaattaatacttaagttaaaatgttggcggcataaatactttccgttacacttcgtgcggatcagatgtactataggcaaagtagcatgtagtgcgaattggattggatcaacacccgtattattctttatgttattttattgttgtttttttgttaatttcatatagttttcttggtgttgaccgagattttcgacaaccaatataatagtatataagaaagttgtaagaagtttaatgcacgagatttttacgtggttnnnnnnntaatgagccttagtccacgagttttttgtatatatatgagagtatttattacagataatgttattggtgacttttctctttggttcctatgaaacccaaaattctcgaccctgccttaatgagtttggggtgtatttatagtgtttttgtgggtgatccctagaaccgaggtacatctctttctgcattattcagtagaaacacacattcccaacgagcgtatcataggaaatgcatggtctaaactctagcttttttaggggttaggtagatgtaatccattatcctttcttgactgatgtgatttctcataaagtagccatcactaggctcattaatcatagc

SEQ ID NO: 159594 - DNA, 580 bp, Cannabis sativa
  modified_base (27)..(28): a, c, t, g, unknown or other
actaatcagattgtaaagagttttatnnagggcataaaacctaacactatgcaataaggaaagacgcaccagctgctatcactgatactagcactgctggtgagattgcactgcgtgaaaagtgggagcaatccaatcgcctttgcatcatgttcattatgtccaaaattcctttgggaatgtgtggatcggtggagccacctgagaaggtgaaagattttatcaaagtgatggatgagcaatttgacacttcaaataaatctttgttcatcatcctcatccaagagttcttgtccactaaactcaccgattttaaaggagttcgagaacacatttctaaaatgagggacatcactgctcatttgaagaaactcgatgctatcattcctgataccttcctggttcattacatccttcacaatcttcctccacagtatgggcctttcaaaatttcctacaacacacataaggaaaaatggagcatcaatgaattaatgaccatgtgtgctcaagaagacgccaagctcgtacaggagcaaggagaaagtgttcacctgaccactcaacctaagaaacgcaa

SEQ ID NO: 159595 - DNA, 658 bp, Cannabis sativa
tggtacccctttgaaatatgaccagaaacactctcaaactatttttccccactagtcacaatgaattcttactattaagacgtgaatatgaaaatttgattcgctttaaatttgtgatttggggtttttgggtttgttgggtttgggggtttggggttaagttgttttacattaggtgtttggaagtcgggtttgggtttggggttttgagtttggggttttgggtttctagatttgggatttatggttttttgggtttgaggtttaggttttggggttttatgactagggtctagagtttaggatcttggagctagtatttggagtatgaggttttaagtctggtgtttggtgtttgggttttaaggtttcggtttggggtttgggatttggggtatggtgtttttgtgtttggggtttttaggtttgctgttttttggattagggtttggggttagggtttgaagtttgggattttgaggttttacggtttaggtgttttggggtttggggtttggggtttggaatttgggttttaggatttagggtttggggttctgcaatattggcgtttggggttttggggttttggaatcgttataggaatgggctggggaatggaaatgggaataggaatggaaattggaatgggaatggg

SEQ ID NO: 159596 - DNA, 551 bp, Cannabis sativa
tgctaatcaacgagattattgaaaatcatgaataattaaaattttgcttatttaattaaaaacaaaatgcaatatatttataaaatctcgggatctcgtttacaaaatagagttacaaaagttaactattcatatacaaaagatttgtcgcctagtgattaaacggcaaaagccctgatgtctcgaggatcgtacgctacaggcttaaccgccgcgacatgtacaatcttcacctgctcactctcacggctcctcaactttagctttgcccttacctacatatagaaatagcactgtgagtcgacacactcagtaagaaaagcataaacaataacatagcaataacctgaattatgatcggacgcccatacccccaatcatattgctatccccgtgacccgcacggtactgtcgtactccagttataccgatgtgatactgtcaagtagtacggtactatcgaccacaatatcagcctgtacttggtacgctagtcatactctaggcgtaccaatgtgatactgtcagatagtacaaaagccaacatacat

SEQ ID NO: 159597 - DNA, 514 bp, Cannabis sativa
  modified_base (238)..(238): a, c, t, g, unknown or other
aataattaataattaataattataactaaaacaattacaaaataattaatataaaaaaataattaataaaaaaataaaaaataaaacacaattaataattaatataaattaaaataataattaataattaatactaaaacaataattaataattactaaaaaaatataactaataattaataaaataataaaaattaaaacaataattaataattaatactaaaacaataattaatanttactaaaaaacataactaataattaatgaaacaataaaaattaaaataataattaataattaatactaaaacaataattaataattaataataattaaataattattaattggtaataaaacaataattaattaaaaaatacttaataaatcattaaaaataaaataatacctaaaacaattactaaatattaagtaattaataaaaccaaaaaatataaataaataaataaaccacgggtccgatggctaccaatcggaccaattgtgaaggtc

SEQ ID NO: 159598 - DNA, 554 bp, Cannabis sativa
  modified_base (514)..(515): a, c, t, g, unknown or other
cttgggtcccgaagctattcaaagaacaagtgaggcagttgagaagattagagcgtgaatgctcgctgctcagagtatacagaaaagttatgatgatccaaagtgacgagatattgattttcaagtcagagatatggtatttcttcaaatatctcctatgaagggtactaaactctttggtaggagaggaaaacttagcccgaggttcattggaccttttcagatccttaagaggataaggcaagtagcatacgggttggctatgcccccagcgctagtagctgtacatgatgtgtttcatgtttccatgcttcagaaatacgtgtcaaacccgtctcatgttttgagttatgaagcattggaacttcaaccagatctatcatatgaggagcaactagtgcaagtactagacagaagagagaaagtctagagtaacaagacaattgcactgatcaaggtattatggaggaacagtaaagttgaagaggcaacctgggaactagagacagatatnnagcagaaatatctgaagttgttcaagtaaatttcgagac

SEQ ID NO: 159599 - DNA, 776 bp, Cannabis sativa
caaactcagttgcatcttgctcagagcttctcccaacccaatgatcaatgcttaaacacttgctgaaatctacaaagcactcttgattgcctcctttacatggatgaactctattggcaacaatgaccctgaatgaattggctcaagcttaatgataaaagcacccattaattattttcaccatgtagcttcttctcgtcactcgataaataaaattacttcccttgttctttgttaggttatatttagcctatgttacgggtctaataagtaagtattttctcagttattggtatcttttggagcggttttacgcttgattttccttgtttcaggttcctggggtattaaagttcaaattcagtcaattgacgaaaagacgggacaaactggtgaaaaatcggccaaagttgctcattgggtgtcagtagtcgcgactagcaaagagccaggtcgcgacccttttctctggtcgcgaccatggtcgcgacttggagatttagcagaacctcggtattttgagatttgcctgtagtcgcgaccagcctttaagttggtcgcaaccaggtacggaaaacgcagtttttgacctaatttagattttttcccaattggaggcgcacttttcattcctatataaggaacactatttagaaggtaaaagcaagtaagaaaagacctgaaaagtgaatgaaagaggagaggaagcgatcttgaagacccggagcgatatcaccatctagtttctttcttttaccctctatctatcttttatg

SEQ ID NO: 159600 - DNA, 506 bp, Cannabis sativa
aacaccacagccactacaactagcttaattcaaactaaaacaacataagaaacatccagaaaccaaactcaagcacacacaaccaccacagtagctaaaacaccaaattaccataaaaccaaagttttgagtttaaaaattccaaacttgaataaaaacaactaacaaccaccacaacctgttctaacccattcatctgaacataatcaagcccaagaaaacaacaacaaacacatacagtagctacaacaagaaaaaccccaaagcatgcaaaatttattttcttacaacttaagaaactcaaagagacaaggttaaagacttaccaagagttcaagatcccttaaaatctactggaatcaataagaagaggagaaaaacacagcaatcccacctcattttgagggtttcgaaagagagagaatttgagagaaaataagatttttgcctccttttaatttttttcaataaaatgatcaattaccaacttaattcagccaatattc

SEQ ID NO: 159601 - DNA, 540 bp, Cannabis sativa
ttcttggacatagtatcacggtaccttatttgagtgggagaattttaaaattctaagcccatctttatttggatgacacttgtgatagctaagtatattatgatcgtgataggaactttagaattcaactgagaaagtaaatctaaccattcatatggatagatataacttatcagaaatttgaggataagataggtgaattttgcatagtctattcgaatgacttgggcaaaacacctaatcctcatgaaatgtttttatggtatctgtaatgattacttaatcttaagcaagtattgtacattaatgttaaatactagattgctatgttgatgacttagtctagaagaaactttagtttcagactaagataatatgtcacaaccagatatccctgagaaacaatagtaacaggttaagtgtactcctgtgtacgaatttaaccaaactcctactgttgagtgggagccatctaagatgtaatcaaaaaaggaacattaggagacagtcaagaaaaatctctgtaagtgacctatatgt

SEQ ID NO: 159602 - DNA, 596 bp, Cannabis sativa
tctgtagctgacccatctacatgtagtttctaggtcgacttatcttcactgttacttggctgaggtgtttgtaccggctcagggttgctttctggtattcttgctttcttgcccgtgcattctaccacaaagtctgctaaagcttggcctttgattgctattcggggttggaaagtgatttcatactggcccaactctaccgcccacttgagtagtcgtccagaagcatctggcttttgtaatatttggcgtaaaggctggtcggtgtatacccgaacaggatgagcttggaataaggccttaactttcttggttctagaataaggcagtatgtgagcttttctattaatggatatcagcccttggcctcaataagtcttttactgatgtaatagactgggtattgtacgctgttctcctttctgattagcacggcacttacggcatgttctgtgacagctaagtatgttcccagttcttctttgtctatgggttttgagagtacgagaggttttgcaagttgtggttttagctcttggaaagctttttcacattccttcgtccactcgaactacttgtttcctcgcaggatgttg

SEQ ID NO: 159603 - DNA, 652 bp, Cannabis sativa
gtccaggatctcagccactccctgactgtggtaagtatttcgtagtttacttttttcctcattattttctcttaaggacttttactcatacttttatcctttccagtttgctgtcgaggccgaccgcctttccaagaaccttattaaccatggctttgtcttgtccgaatttgggggcatggacgaagtcatgaagatccttcaggattttactgctgaaaggcggacgtaccaggaggatgctgagcgccgggaggcccttgccaaagccaagtttgaggaagaggccaggcagagggaggcacaagcggaggcgatgatccgggatgaggcccttcggagggataggccagaggccaagcactaggaggagctgagggcggagggcgaggctactgccaaggccaaacgtgagctccaggaggctagggaagccttggatgaaatggctgccaaggtgaagtccttagaggaagttcaccaggcagacttagagtctaggggcaacttggccgtggagctgaaggagctcaaggacttcaaagagcaagccttgaagaaggctaagaaagatgagttcctttctcccgtctcctataaccggtgcgtcaagcattcgacgatggcatctacatggcctggtctacaaatg

SEQ ID NO: 159604 - DNA, 817 bp, Cannabis sativa
gatcatcataccacaaaattgtggcaagtgtaatgccaaggggcacaacagcagtacttgcacataccgaggttaaaaatgaatttgtaatttagtcgtactgggatgtgttgtactattatgtatttttattgaattcatgttgaaattttttaaacattataatttgtggtattttcttttttgataattattataatttgtggcatagctggaaggcctaaaattgttatgagctaataaaagaacataatcataccaataaaagaaactagttacattgttatcttaataaatacatatatgttgatagatgaatatatatatatatataaaaaaacataattgttcatgctaaattttggcaaaacaaatctacacactaccactctctaaatttcttcatattgtcattgttcacattatcaaacagaagatccagcattttatgctcgatgtgctttattacatacatcccgtaatcactgctgtatgagacaataaaaagtaattaaatagaagtatacaaattaaattcaatttaaataataaaaaattaattgtaattaagttaccttgacttcgtctgtcgtacaatcctcccgtcgatgacttctgaactaaaatttctaatttggctctttaagacggtcaattgaggcatgacgatcatttcatgattctcaaataggcaggactgcagcatcaaagttaggaataactcttcacacaatgtcaagtgaatcttcaattcatccggggaaatcgatccaaggctcgagtcaaatatgctcaacatccaatgatcaaggtctgc

SEQ ID NO: 159605 - DNA, 600 bp, Cannabis sativa
gtaaaattgtaataaaataaagttgaagagtaaaaatgtaggcttaaccgtgtggtagtattttagtaataaaatatgtattttgtatttttagtgtaaaaatttctattaaaagactactatgatttctaaataatgtgggacaaaagtaaatttagtaaaaaaaaatatgtaacttattttttaagcacaaaatattaaacttttctaaaattaaaaaagtaaaatgaaaaaaaaaatgttttttaattatttttgtgttttctattattgtattaaataatatgttatatttttttaagtttttaatgtgtttttgtaaccattaagtgatgtaatataaaatatgacttcatattataagaattatgagtatatagattttaatagttttctttatataaatatatagattaaatcaaattgaaaactattttttagtattttgtttatcgatgtaattgacgtaataaatcggaaaaatgacctatacttacaaataaaaaaaaaaaattgaatttttacagtatatcttactattataaaagtgttgtaatgaggtgatagtttgaagaccattttaccctttaagaaattcaa

SEQ ID NO: 159606 - DNA, 548 bp, Cannabis sativa
  modified_base (62)..(77): a, c, t, g, unknown or other
aaatggaagagctcttatttcaatgattatattagtttactaaaatatcatttataggaagnnnnnnnnnnnnnnnntaaaatacattgaggggtaaaataataaatttttccatattcggtgtaaatcatctataaaggatctttaattattgggattagaacgatggtttaatatttatagcctatctatatcgtggaacatataaagtgttctatataactgagagtgaaattccaagttctatagtggtgcaatgaggaattaataagttaggaaatttacttgataaattctagatctgcttattggaacttggttatataggcccatggtctccatactagttaagacaatactgcttgtaagactcaattacttaattttaattagggcaaatggcggcaaaaccccccaaaactttcattttggtttcacttaacctcctaaacccaaatttgggcagtaaaacccccaatactcgtgttctgttagcaatttaccacttccgtccaaatttagctattaactgccaggttggattgtcc

SEQ ID NO: 159607 - DNA, 672 bp, Cannabis sativa
ccccgagctcctcactcattctgttcataacagcgaaattctatctaaagagagttgggagagcgaggaagcccgattacccacctcaatcgatttattttgcacatcaagcttatgtgggactaaagctcaaagattcaatggatagaggtatttcgatcctatattcatatagtgtatatattcatttattacgcatgttatatacacatacacatttttttttatacatataaatgtctaacatctttttcatgaacaattattcattctcgtactctattcaataggcacacgcacaacatattgactcaatgttaaacactacagtcaaagcaaactaacaacataatatgactacaaaatcaaatttaccttttcatgttcatggaagctaaatttccaaataagtgaaaacaaaatttgacaatcttgacattaaaattttcttgtagcatgattacaaaaccagatttacctttccaaaattttaaacaacatttcccattaaaaaaatgaaacaaatttagtttaagagttttcttttgggttgtttttaacgatcgtgaacaaacaatttaaaatctcagattagatttagaaaaaccattaccctaaaagaaaaataaatgttcaaaaaataaaaaatatgttaaacttaaagaataccaa

SEQ ID NO: 159608 - DNA, 564 bp, Cannabis sativa
  modified_base (41)..(45): a, c, t, g, unknown or other
gtccgtttttagtgttttattttggtcaagtttttaatatnnnnncggtttttaataattaattaatctattagtattaaactaatttataaaatcactcacatgatgtccctatagattagggtgttacacggatcaaaaggagtttgagttcttaaaggttaagatagattcattcgtgaaggtggaagcatcaagcttgcgacatacaattagagataatatttttatgcataagtcaaaaacttcatatttttgagatcttactaataaattttatctctggacgtgactccgtggactaataacaatctgtaagaattattgatatcacttataaaaaccttgtgtgtttttatttttcagcactgttatgttttactagctttctagtctgtagttacaaaactttagtctgtaattacaaaatatctattttaggagcaactttattatttcgtatttagttaattaaataataaattagcaattataaaagggaaatttgacaatatatgcttaaaaataaatggtacactaaaaatatgctagcatattttacat

SEQ ID NO: 159609 - DNA, 848 bp, Cannabis sativa
taacatagaaattaagagtttaagaaagaactagttggtgattacattctggattgccaccattgcttcctatgcctccttcttttacttttgggtccaatttctgcccttcttcgttctaaaacacgagccccttaaatagaaattagggttgctacctctgaaaaaatccaaaactggccaaaaatcttgtgtttcggccctagtcgcgactacataaagcctagttgcgaccataggcaaagtatgaaaataaacttgatgtctggcctcctagtcacgaccatagaaagtggtggtcgcgaatactgaagcaaatttgacagcttcagtatctttcagtaaaatgtgcataactttcacatacgaactcccaatgagttgattcaagatgtgttggaaagaagaaaaagaaatctaaaacttctatgttttgactttttccaaaatctgatcagaatatagtcaaatttaagcttgaagtttcacatttattttcttgcagaattttctctattctatagattgttgtttttcaaaatatgatcaatttatacattccaagtgtgaaacctgaaaccaaagaaaacaagtgtaattctattcgaaatataataataaagaagaaaaacactataaaaagtgacccaaaacgtaggctaaaaatagcctaataaattcctccaaactagattcttactcgccctcgagtaagactaacacttacactaaaacctgattaactaagctgtaacgaacgctttagtaatttagattagaaaaggtaattaacactaatttctgttattttatgattatttataaaattaattatttgtggaccccaa

SEQ ID NO: 159610 - DNA, 586 bp, Cannabis sativa
tttaattttatattaaaataaatatttttttttattatgaataaaatttaaaatataatattttttaattcttattaattatatataaaaattacgattaacagaaaaaatttataatacaaaaatatacctcttacattaagttatgcataataattaaataaatcttcactttttcttgttttatgcttgaaaaatatattacaaatataatttttgtaataagctaaatattgataacaacttacttttaaataattaaaaatgtcattttataattatgaaaaattatactttatcttacaaaattattaacaattttatacatcatttcacaagaaattcgtcagaattggtattgtcgccgaaaaaatgactagaaaaatcaccaagaaactgtttcttgatgaaaaaaactagtttcttggtgatatctttttagcgataatgtcaattccaatgactttttcggcgccagtaacaactccggtgactttctcggtgctagcagcaactccggcgactatgccatttccaatgacttgtttcagttaactttattatttagcatttatatttcgttatg

SEQ ID NO: 159611 - DNA, 826 bp, Cannabis sativa
taataataataataatattgattttaaaattaaaaataataataatagtttatgtattgtaaaaaagtatgttggcatttaatagatacaagataaggcaaatttgtatggagagaagagtccaaaaatattagtattattgtaattttataattttattaggggtaaaattggcataatcaatatagataccaataccatatttttataatagtaagatatggattattatattaaaagagaaagatagatatatatatatatatatatttttggttgaataataataataataataaaaagatgttataaatgatatgagttataaaaataaggagatactataatttcataatataaaaatatgtggtttctataattaagaagagagaaatacaaaaaaaaaaaaaaaaaaaaaaaaattaaattagaaaaaaaaatgagagaagaaagattaagaagaaaagatcatttaagatgccacataaaaggttttaagaaggtgaataggaagatgaagaagatggaagaaaatgaccaacatggagagagggggaagaagatggcaacgcagggaggagaagaggcacatagaattgttgtagagtaaaaagaaactaaagagtaataagtaataaattgtgtgattagcttttaataagaaaaaaattaagaaaagacttaaaaaaatttggaaaactcatgacaaagagaaattagatttctaatttgataagttgccacatcattttcttaaacaattggattataaataggtttttttttttttttagttttaaccaaaaaaaaataataatattacaaa

SEQ ID NO: 159612 - DNA, 679 bp, Cannabis sativa
ctttgacatctccaatgtttaaaatttttattatatttatcttttacattattctttgttatgtcaaaagacgtgacatccatttgagtgacacgtgaggaatatttcatgacatgaacgggtaatatgctccataatgtacagtccaaagtgatttatcatttgtaaacaactgattagaagagtaagatggaatattcggacatgataaatggcaccgtccgacctgcgtcaatcttacaacaagctcacatacaccggccaaggtaaatgcatttggaatttcttcagagatacttttctcttttatttatcaattaaattcctattttaatgggatttctacatgcaaatgatgtaatttagtgaaatatatatgttgacctcgattttagccaactgacagtgtagtcatatttatgattagtatcaccacgtgtacacaataagaataagtaaataaagagatacaatatttttacaaaggttcgactcccttagctagcgagtaatgacctactccccttttaagatcacaagtgttgtggattttggaatggctctcttaagattacaatagtgagaattagtaggcaagtaagagagatgagagaaacttagtgtctactataatgcttgaggcatgtagaagagagagagctaagatttatgacttaga

SEQ ID NO: 159613 - DNA, 654 bp, Cannabis sativa
  modified_base (624)..(628): a, c, t, g, unknown or other
ttggattttgtctaggattaagcttcttcatgttgtagctatggaggattttgaaattttctatctaggtcctccatatgcccatatcccttttagacttgacaagcatgtcgtccatgcacaccttcatgttgcggccgataggatcattgaacattttgttcataggattctaatgtgtggccctacgttcttcagccctgaaggccatgactttgtagcagcgcaggcctaagtctgtcaagaagcttgtatgctcctgactggtgggtgcatcctctttttcttggctttggataaggccaagttgtaatagtgacaggcagattgctaacctcctcttgacatcctacctcatgccttgttggagaaaatccaaccaccaaaactctattggcgtagttcttcataatcgacgttccctcagcttctaacgccatgatgggctgaataatctggtatacctgatgagtgtgatgctttggccagagaggccatacatcacttgattgtagggcgccaagtcagcgagttagcgcctcatcttttcatgtgttgattttgaaaagaatgttgagcgaggctctattgtctaccatgtatctgttggattttatgccctannnnnaactccatttcaatgtaatctatttt

SEQ ID NO: 159614 - DNA, 502 bp, Cannabis sativa
  modified_base (79)..(80): a, c, t, g, unknown or other
  modified_base (297)..(299): a, c, t, g, unknown or other
cttccccaggaagagcccattgctcttcttgaccttctttagcttcctcaggaagtacctcctcctcatccactaagtnnatagtgtctggaggggcactggaagaagctttcgtgggggtgaccatctgggacgaagttggagttagggaagcatccggactgtgggctccgaccagagtggccaagatcacctccatgggattagctgctgcaacaagagaaaagagttaagtgttagaatatctgtgaaagcagtaaacacttaaaaatcaatcaagctagtcctaccctgacnnnctaattcggccctagcaaagttttgaatcttaatactggttgcatcatccccgagatagctgtccgagggacggaaccagctagaagaaagataggccgaaggatccaagagaacgggcatcggaggtccggaacccatccgggaccgacctaaataatctcctaagttggagaaataataatcctttgcatgatccccccac

SEQ ID NO: 159615 - DNA, 566 bp, Cannabis sativa
gcatattagtggttcaagaggcttttaccaggagcaattacatcctagaaataattttcaaaggcattcctccaatagcatcaagcggagagtgattacattgtgtgtgtaatgagtatcaccaatgtaaagaaaagagagaaagaaagcttaaagagatacatccaacactttaatgatgaagttgccaaagtaggaaggatgtccaaccatgaccataagtttgccatagctgttggaatatgccttgggagtagattatggaagagtatgctaaaaagagaattggatggcattgaagacttctacgagagagtggaaaaatacatttgtgtcgaggaagaaaacggagtcttggagacagacacaagcaagtgtactttgggaagctcgccaaacccatgcagggtctattagatagtacccctaatactcgtaagccgaaacatccaagtgaagtctctactatacaacccataaaaataaatatccaagatattcctctaagtaaagtcccactatgtgagaagaagctcctaatatttctaatgaaaaattttcatata

SEQ ID NO: 159616 - DNA, 537 bp, Cannabis sativa
gaagctaagttgaagggaggtgccagggccaagcagtatgctcaggagcctttgaatcctaaagatgaaaccgaggacgagcaggtgaccctattgaagaggaagaagaaactcccggccacgcccaggcctgttgaacatgcaattcgcataagggagcccactttacctgttcgaccatctcatccctttgctagaaaattgaaggctgtcatgtctgagataaaatcgatgtcaggtgacgatggacttctgaatctctgtgcacgcgatcaccttgcattttacttcttttttgagcttcttgactttcatgccttgtgttttttgatggttgttttctaacaacactgtttttgttctgtgtagacatgtctcggtagatgctcgatgctccaaggaagagaatgggcggaagttctagcgcctctccttcggccagaagtctaagggcggtgaggggttctcggagaagagaccttctggagaggtcattgacctttctgaggagccgactgttgcaaacccttctacccc

SEQ ID NO: 159617 - DNA, 533 bp, Cannabis sativa
actctacaggatacgataagtgcagctcagagcattactactgtctcagtgcctattaaccaggtttttccaaataattacatgattacagatgcttcttggtcccagaatgtggttgggttggcagccatttccatcaataggtctgaagaaagtgggaagtgaaaacaagtaagaagaaggctattgctcctatggatgctgaaattcaagcaattttgatggctattacttgggcaaaagatcaaggttgggaggatatcaccattttttctgatgctcaagtagtagttaatgccttgaataactctttgtttcctccggattggagaagtatgggtttatccctcaaggttttagatttgttaaagtctttttctagttttagttttatctacattagtagaaatgttatgtcttttgttgatggtttcgctaaaagtgctaggagatctagccagggtgctaaacactttcaaggggagggtgcaccccctgttgtcccattttttccttggtgttaaatgaacttt

SEQ ID NO: 159618 - DNA, 518 bp, Cannabis sativa
ttattttaaggataattttgatttgcaaacacctcactatagttgggagaattttatcatcaaaatgtgtggttagagagttaagtataagtggagtcatagttaaaaagatttaatagggaaaaactcaaatataattaataattagacaaattgaataaaacttgtaacaataaaaaaaataagataattaattgttatattatttgttataatataatatagattaaaatatttaaatgtgacatattatttattaatatgaaattaatatatattatgtgttgaatattgtattatatcatatataatataataatacacataaaagttgtaatatatgaggagttacaaatctgaaaatagattgtaatttaaggatcacatgtaattaagtgagttatcacatataaaagttatggaatcaatgggataagtttctagctgttagaaactgttacaatactcaattatatcatttaaatgagtattggatgttggaggaagatttaactcgg

SEQ ID NO: 159619 - DNA, 633 bp, Cannabis sativa
aagacaaaacacaataaaaaaaaaataaagcaacaccattacagtaaaacaaaagtgttcgaaaaaaacacaaaaatcaaactactttctgcagccacacaagattttttttcactcatgcgattcaaattgcttagtttctcatgcgatcagaatcaatcaccaaagatctttcatcaagaaactgatttttttcatcaagaaattagtttcttaatcaagaaacaagaaacttgtttctttatcaagaaattggttttttaatttcttcttcaggaaattgattttgattatataaaaataaaatttataataaaaaacttataataataataaaaaaaagacaaaacacaaaaaaaaaaaaaaaatgaagcaaccccattacagtaaaacagaggtgcttgaaaaattactaaaaattaccctataaaactacctaaaaataaataaaaatattaaatataagctttgaaaacataatttatatatatatattacatatcaaataccataaaaataccgaaaaaaaaacactatataaattggtctaacctaaaatgtcatatatatatatattttttttttgacaaagtgattaaaatcactcatgaatttacgacgcccacgtccgcc

SEQ ID NO: 159620 - DNA, 596 bp, Cannabis sativa
  modified_base (326)..(336): a, c, t, g, unknown or other
ttcctcgatatctgtgtgattgtttttatcactgacatccttgtgtactctcaatacgaagaggagcatgagctacaactcctaatggttctgcaacagcttcgagaacacaagctttctgccaaattcaagaaatgtgaattttggttatctcaggtgtctttcttagggcacattgttagtaaggatgggatcaaggtggatccaagaaagatagaatccgtcaaggattggccaagaccgaaaacagtgatagaagtcagaagtttcttgggtttagccagttattatcgtcggtttatagaagggttttctaaaatctcaannnnnnnnnnngagcttactaaaaagaatcagcgttttgtatggtcagacaaatgtgaggctagttttcaggagctgaaacagaggtcaattacagctccagtgctagctttgccttctgacaaagaaaagttcgtagtttattgtgatgcatccagacagggtttgggatgagtgctgatccaagccgatcgggttatcgcttatgcctcccgtcagttaaaagattatgagcagcaatatccgacacatgacctagaattggccgcagt

SEQ ID NO: 159621 - DNA, 542 bp, Cannabis sativa
aggatgttaatgaaacatacatggtagtaaatctagatcatagtaaaatatatcaaacatatacttctcaaaaattaaaattcttgaatctatctatataaccacaagaaaaaatctcaggctgtcaaggagagaaactaataaatttttggacagtaagatacagacgcatatgtaatattgaacttgtatacatataactaagcctatcacaatgcattacctcaaaatgagcactgtgtcgatgagatgttaacaaatagaaaagaaattcaaagctagaaacaaacaattaatcaaaacgaacattcccctaaatcacatttacaattaaaaaaaatcagcaaaataatgtccgtaattataaatttcacaatgtcaaacaagtatatatgagtctatgagcaaggtttataaattttgaattgagcatgaaatttcatcttaccaatcatttggagaggccttaacagcttgatcaaagtaagtctctgctctggaagcatccttgtgaccttgccatatcaagtctccatacatgg

SEQ ID NO: 159622 - DNA, 535 bp, Cannabis sativa
  modified_base (510)..(510): a, c, t, g, unknown or other
cacaagatgagtgttggacggagtatcaagcgagaaacaagcaaatatgccgaccagaagtactcaacagattacttagctcacatgaagacctggtaaagaagagtcgcaaaagtttctaaccctaggggtttcctaagcattctttctacagcatagttgcattcaaagtgtaaacatgcaaagaaaagcataaaggaatcagaaacttactcaaagattccaatgtctgagttcaagccaaccagtaatcgtctgaaggcacttctgcaactttaaagccagaaaactctctttttgctctgaagtttacttaacaacgaagggtgataaaatgagttatgtgccagtactatgggtatttataggcaaaagggtaactgtatcaaaaggaaccttagacgcctcagtttcccgccttaaaagcaaatatgggaaatcaaaagtaatcgagtgcaaccgtcagccgtgcagagagaaagtccgatttcaaaatattaattgtcagancattaattagccgaaaaccgaaggg

SEQ ID NO: 159623 - DNA, 716 bp, Cannabis sativa
  modified_base (686)..(690): a, c, t, g, unknown or other
tttcgggagaagaagaagaagcttgatgccatgcttgaggcgcgtctggggcctcgccttcctcctcgtattgactaggctgattaagtccagctcattttaccaagattatatctctttttttttcttttttacagctatttttcttttattcaagacaatcttaagtatgtagctgttttattaaggggagacaattgcttatggcttgttcccgggccctttgtattatatatatttttttttacctgcctttagggccaggatattttatataatgatccttttgatgcatatttttcttttagacctgccctttgggtcaggatattttatatacatatgatcatattgatgcatattcttttttactttatttttattttgggcctgttttacatctgtctgtgcgttatgccttagtacccccttgagtgacatgaaaactttgtttttaaggcactcagttttattttaaaatttagatgttgcatacatttcgacggtacaaattctttaaacaaagcctaagtcaacctatttggactattggtaatacttccggaggtgatcagcgttccaggcccttggctcaatggttccatccatcatttttagcttatagttttcggagtcgatttcatcctcgatttcatatggcacttcccaatttggcccaagtaccnnnnntccgggttcttgagtggctgggaaga

SEQ ID NO: 159624 - DNA, 558 bp, Cannabis sativa
ttatttaagtaaaatttaagtgtactataaacaacaaatatctatagcttagttggttgaggtgaatgacataatgtctaaggtcatgggttcaaatctcatgatatcgaacctgtttttatcgtatattattatttgcatcttaaaaatttacataaacactttatttaataatttttattttatataaatatataactttaatttatacttttctttgatttttttttcctacttatattattaaaatttatatatttaatattaaaaaaaatatataaaattttattaaaaaaattaaatatgattttttttaataaattatgaaaataaaataaataattattaaatttaacataaaataatacgaaaaattattataaatcatttttaaaattaatttaagttatttttttaaaaaattattaacgtgtacttataatttattattattatgttgtaggagcacaataaaatttgagatatttgcaccaataactattattattaaattatttaagaatttacccttacctattttaatactcacaatttagg

SEQ ID NO: 159625 - DNA, 589 bp, Cannabis sativa
gaaaagattactgaaaattatgaatataaaaccagtttctaaatacattatatattttaactaacagtttttaaaatgatattatctgttaaacataaataaatataaattaatgttggaaatcagtttgtcaaatatatagtgaaaaaaacacatataattttaaagtaaataaaaacaaaaaaaaaaaaaacaaaaatcggtttctaaatacattatatattttaactaacagtttttaaaatgatattatttgttaaacataaacaaatataaagtaatgttggaaaccagtttgtcaaatatatattgaaaaaaacacatataattttaaaataaataaataaaaaaaaaacagaaaccggtttctaaatacattataaattttaactaatagttttcaaaatgatattatctgttaaacataaacaaatataaagtaatgttgaaaaccagtttctcaaatatatagtgaaaaaaaaaaaacatataattttaaaacaaatagagacaaaaaaaaaaaaaagaaaccggtttcttaatacattgtaatttttaactaacagttttcaaatattgtacaggaatg

SEQ ID NO: 159626 - DNA, 557 bp, Cannabis sativa
ttaattaaaagactttgtaaagtctaattaataaataaattaaatgtcaattttatttgataattaattataattattaaataaattagttttgacgtttataggattaaaaattggaaaatatgacataagtgaaagaaaagataaatggttgaataaaattgcaaaattgtaactagtgggacccatcttctattgtcggccactatgtggtttattttgctattattttatcttttatataccatataatttaaatcctaatcctaggtgaaatagtataaaatgaataggatgctctcattctgatccaagccttcaacctaataacctagttttcattctgttagacagctagaattttggagagctccttcctttactattttcgaattgccctctcttgttcttcattatttttgagcctatagtgatagagtacattctcactcatatcaagtcaactacttaatcatagtgtggaagactgtgaagaatctaacacctgaagaagaaccaacctcagatcttgttaatactttacgacagaaaggaac

SEQ ID NO: 159627 - DNA, 596 bp, Cannabis sativa
  modified_base (177)..(178): a, c, t, g, unknown or other
ttcgtgacccggccggataaaccacctccggccaccaaatttgacgccgcttgaggggttttgttccattttcaaccctctatcacaatccaatacccattaaatccaaaacattcaaaataatggccaaggtactatgaacccgaaatggattttcctccattaatgaactcaacnnaaaattgcaatcttacaatacaaacatgcaataaccgtccaaaaacttgaaaaaaaaaactcattctaaaattttaatctcagattacccattaataacatattaatccgaaaatttgtttttgaataaatgggttaagcacaacaaatattaagctctaaaattaatagctttggctctagataccaattgttaaaataatattcaagcaagagcattataatcactataatcaaatattatacaatgatgctcttacaactatccaagatccaagcatttatttagagcattaatggttaagaaaacatacataccatattgctcatcccatcatattgagccattgttgaatatccaagtccaaaacacactaacaatatgctagagagtgaagagtaatcaagagacaattgtg

SEQ ID NO: 159628 - DNA, 516 bp, Cannabis sativa
  modified_base (101)..(110): a, c, t, g, unknown or other
  modified_base (159)..(176): a, c, t, g, unknown or other
aaagactatatctaatatttcttagaggcatccgctaagcaaagagacttatcaaggatgtaagggtaatggcacttgttgttggaacttattttaccagnnnnnnnnnntactaacatgtatgtttgattaacaccttaaatatgaattctctaaaannnnnnnnnnnnnnnnnnaagagtttagaaaaccttacattaatggcagcaggataatatgactccttccgctcagatctctaacccatgttcctttctgtcgcagagtaataacaagatttgagcctagatctccttctctccttcggtttggttaaccaccatcttccgctttatgatttagtacttgacttgctatgtgtgggcatgatactctatcactaaaggtttgaagattaatgaagaacagcaagaaggtttgaaatcactatgaaaggagtctttcatctactagttgacagagaatgaaaactaggtttatgttggttgaattaggttggatgagaatgagatcatc

SEQ ID NO: 159629 - DNA, 513 bp, Cannabis sativa
gagagagagagagagagagccctttgggtgtatataagaaagagagagagaagactagggtttcaaacttagagctttatagcctaaatgagaactagagtgacttagccttgtagggttgagttaaggctctttatataggagagcataaaccctaattaggagataaaataatagatatttacattttaaattaataaataaaactaaccaaattgcccttgaaagtagatatttttgtagcatcttagtgggctgtcaacgctcaacttgcagcttggcttggaatccacgaataaaggctgcacttccatgtcctgtcagggagaagctagttggccatacatctacaggatgaggtctggttggccatgttatgtgtgcaggttgaggtctggccgaccatgcaggtcatgttcctattagccctaccaagaggagaccagcctttggatgtggatgctagcctttggcaagtggagactagctttgtacaccttttccttgcaaagg

SEQ ID NO: 159630 - DNA, 523 bp, Cannabis sativa
tacaacttctattttagaaatctaataatatggatggatgggaacatgatgtacaattatggaatcttaattttccaaacggattgaatgttggttctcttagttaattctagaatttgaatgttgtgcataaattcagatggtatcttgaattatactttcactagtgaattaatagacctaaaggataaataagtaattagaagggtaaacagtattttgaccaaaactaattatgaaccaacgcatggagggctaatcactggacttgattatatcaatggacactgtagttaagctcaataaatataattctataattactaaaagtgcaattttatatttacagtggagtaatcattgaattaataaagaagggattatttgattgatgagacttaataaataatgtaatttattagagcatagaattataggtccatcgtcctcgaatttctaccttgaaacattgtcaagggtagagataaagagttgtataaagatgttcgaaaaaatctatttt

SEQ ID NO: 159631 - DNA, 560 bp, Cannabis sativa
  modified_base (217)..(217): a, c, t, g, unknown or other
agaacaacctgttgttggcaaccgtatggagccgttatacgaaagattctgtaagtaagcacctccagtgttttttggaggtcctgatgtgatgaaggctgagcagtggctcccactaattgagcgaattctaaactttatgggggtggttggtaatgatcgggtgacctgcgccagatttcaattccaggaggacgctctcgtgtggtgggagttnataaccctcactcgggacgtcactgttatgacttgggaagagtttcgagagctgtttaatgcaaaatattataatgaagccgtccgcagtgctaagcagaaagagttcagcgaattagtgcaaaccgaggggatgtcaattactgagtatactacaaagtttgaccgtctggccaagctcgtcgtgggtatcgtgccaactgaatttagtaagaaagaaaagtacttggccggtttgaatgcaaagatcaggcatcctctggtgatcactaccaatgaagcaactgttgggttttgtagcctaaataaaatccatttcagtataatcagatttactagttaat

SEQ ID NO: 159632 - DNA, 523 bp, Cannabis sativa
tactttcaacagtatgtaaagcgacaaggcaatggacacaaccagccgaattcgaccaataacccaggcaaccaaagattacaacctcctcctcgggaaggagaggatattttagttatctcgggagggtcacatctcgctgcagaaagtaacaatgcccaaaagaggtatgtcaaggaaattaagaacgagcattcactctttgctccgaaattttctaagaaagctaagactgaggaacctccaattgtattctccgaggaagacacaaaacatgtaaggtaccctcatgccgacccgctcgtgattacactccagctcaccaagaaaaaagaataaagagggtgttggtggataatgaaagttcagtgaatatcctttgtaaggagacattgaagaaaatgggattggaaagtacaaagttaaaaccttacatggtaaatctatgtggatttacaggcaatagtgtcgccagtcaaggaataattgaactcccgttaactgtaggcgaggcgcctttatc

SEQ ID NO: 159633 - DNA, 789 bp, Cannabis sativa
aattttgtccctgtcgttttaaccaattgcttgagttggtgtagggcaatcttggaatttcaccaagaaaatcctacaaaattgaatgtaaaaatgtactttatccaattatccctatttttcattaatggattctattctatttaggaataattagagaagatgtactttttttttgtaacaaaattatatttttacgtttaaaggatttttttttttttatatttttacggtttttgtagtggccaaaaattgcaccaggcccaaatgccttttacggcccaaatcaaaattacaacccttcaaaccaagtcaataaatataactcactcatccaaaatatattgggttttggctaaaatacaaggcccaaacgagcccagcagctacaagaccaatctgatacaaaggataggaacgagtctataaccgaagtagaagaatcgatcttttatcctggaaaaagggaagaccacttcccacgttcgttcttcagaataggagaatccaaccgttaaaggctctataaatggagaacccaggagtcctaaaggatcatctcatcttcattcactgaacacttattcaaacatttacaaaatacattactattattagtactagtccttctccatcgctctacagtggaaatatatgttttctatcttctttatttatattcgattattctttatttgaattctttactgacttgatcgtcggagtcccttcggctggcaccatcccggtgtcccaaggtctcaacggtcctttttcctttgttctaca

SEQ ID NO: 159634 - DNA, 562 bp, Cannabis sativa
atgtttaaaaatcacgtaatacacctatgttagttagggtgttacagagattatcccaattagaaaatcagccaaagcttggccttttgatgttcttgagtggtaggttatatcaaattgtcccaactcaattgaccattttataaatcttcctaaagcatcaggttttgataaaacttatcttaatggttaatctgttaagacttttatgggatgtgcctagaaataaggtcgtaatttgcgagatgtatgaatcaggcataaggcaagtttttcaagagggggatatctttactgtacccccagtaacctcttactaacatagtaaataggttgatggtgctttccccttcttgcatcaaggctatactgattgcattctacgagacagccaaataaaggtattaaagtttctcctgttattggtttggcaaaaactggaggaattgatatatgtgtctttataactttaaaagcttcctcgcattcttctgtccattcaaacttctctttgcctcataaaacattaaagaatggtagacatttatctgttgactttgaa

SEQ ID NO: 159635 - DNA, 646 bp, Cannabis sativa
tagaactcaaacttggacctttaacgatgattttagattctgagattgggtagttgttctattgcttggaaaatgtttattggggtataatatgcaggtctggaaggtttggtaaggtttggagtcgatttgtttgaactttgaacttctttgggttttctagggaaaaccgggtaaccggtttttgcaggtgggattcccaacaaattcaggttgtcgattcttgttagtttcaggtttctggttggttaattccctgctagtttagggttttggtttaaaacctaagtcccggatgtgatttagcgtgtcacttatccatgttgtgatcgatgtgatttaggagcctataaatcgccgagcagttgttccactcaggttgaccggcacacatgaagtcgaagttgaggtaagattagtataatgtcatgcatatgttattacatgtttagcatacatgttatttatggctattagattacattgatagcaataatagtataataagagttgtactgattatcgataaatgtatgttggcagaaatacttatcaatgttgtcacatcaatatggctagagtatgactagcatattgagtataggcaggcattatggtcgatagtattgtcgtatgaatgttctag

SEQ ID NO: 159636 - DNA, 522 bp, Cannabis sativa
  modified_base (480)..(497): a, c, t, g, unknown or other
tttggcaaattaggaaagaagaaatagaaatagtctaatctgtaaaaaaaaaaaactcaaaaaaattcaacatttacacaaactttgtcccatgaaagtaaattaatctaaaaaatcatattatttggatctttaattatattaaagtgtcaatagaaataccttaaatattagtaaaatattcccacatcatatataatagtatcaatgtttagaaccacaataatcttatataagaaattatttcattttcacactatgaatttaaagatgttttcttttaaaccaccatattatttgtgtttattaatgttattattttacaaaatatatatatatttttaaagacacttagtatttcattttatgggaaataaaaatgtatttttttttttttgaaaattccaaaaactgtatattctttgtaaaaatatatatatatggaacacgggtaataataaaattacaaatttgaatttnnnnnnnnnnnnnnnnnncttaattaaaaaaaatatcaaaaaa

SEQ ID NO: 159637 - DNA, 548 bp, Cannabis sativa
  modified_base (515)..(522): a, c, t, g, unknown or other
gttgtatttgtgttaatagcgatgcagcaatcaatgaaaatactgctggtgtggggcttggtttcgtgtggagaacagccagtggccatttggtttctgctggaatggtttatatgccaagcatgtgttctgttaagatggctgaagggtgggctttgctggaagctttgaagaatcctcctgcagttgatacttctcagattgaagtccagaccaactgtaaagtgctggtggcagatctgaagtttcaaggaaatacactcactacagaaaggaacattatccacaagctcaatagggtgctggaaaattttaatagtgtacatatttctcatgtaaaaagaaccaataatgagtgtgtaaatttattagctaggaaatgtctagctgataaaactacacaattttttgacaattcttttccggattggttagctatgttttgtaaggctgaccatcctattgtggtgtagtaaagttgtttcggttctaataaattctttttcaaaaaaaannnnnnnnaaaaaaatttctttttttttttcttt

SEQ ID NO: 159638 - DNA, 506 bp, Cannabis sativa
aaaacaggccaaaagtaaaaataagatcaaacagagtatatatatcaaagtgaacatatatatttaaaatatcctgacccaaagggcagatccaaaaaatataacatactacgggcctggggacgggccataataattgtctccccttaaaagataataatttaaattgtctaaaaggaaagaaaaagagactgtaaatgaaaaagaaaaatatggttgtaaggaggaaattggttggactccgcggcctattcaatacgaggaggaagacgaggaccccaacgctattcaagtaaagcatcaagccttttcttcttctcccggaacttagagcctcttcaggcttgggatagaagtcaagtttgatactctagccattcgactgccaggccatgtagacgtcgtcattgaagcgcttgacataatgcttgcagacgacgggggtcaggagttcatctcttttggcctttttcaaggcctgatctctaaaatcccttagctccttc

SEQ ID NO: 159639 - DNA, 597 bp, Cannabis sativa
aagagaagtgttaagacggctggagtcccaggctccttgtacgggtcttctgggccggtaggagctcgaggatctgttgtctgggtagggggcatgtcaaggctcagaccggaagtagaagtggtttcctcggactctccataggccacctgggaagcatagtactcgagatacatgtctttggcatcgcccaagtaatagaaattcgcatgagggttagccttccaaaagtcatagaaaatctcgagactagctatctctaaggcattcaccttccctttgagcctctctacttcagtgttaagctcctcctccttggacttcttctctgcttccaacctgcggaatatagttcgaagaacctccgttacttcttggaggtcggtcacttctttggataaggaggtcatggcagcctcaagttggtcagaagcctctaaatccttggtcagctcagccaccttcttcttagcagcaagaagctttttgttgactttacccagttccattcggacggcttcgaaatgaagcgtggcttcatcagcgtctttcctggccaagtccacttctgccctcatggtgttggacatggcaatg

SEQ ID NO: 159640 - DNA, 595 bp, Cannabis sativa
tgtaaaatagactgtttgaatcttgtttgaatcttatttttgacttattaaatatttctgaattttttaaaattttgcatgatatcctaaataattacaacgtagacgatcatcaaaaaaattagattaaattatttttttcagatgctgaaacagatagggtatgtattagtagatgctgaaacagatagggtatgtattagtagactccttttaagaagtgtgcagaatttttctaatatattaatttacatatttttttaattatattttttacagaacctattaaaataacatactacaaatataaaagcaacatgaaaacaacatagtataatgttgttatttaaacaattaatgaaatgaaaaatgtctatatgtttacaaaaaaatatcaaattcgtaaaaatattaaaaatatatatacatgtatttttgtaatatttttgtttttttttaatatttatgaaataattcttaaaatttttggctaaaaaaattatacatttaaatcataaaatgttttaaaaatatatctatggagaatcgaaaagtaaaggctaattaggatttttgcttttcaaactttgacatg

SEQ ID NO: 159641 - DNA, 650 bp, Cannabis sativa
tgattgtgttttaattgcatggtgaaagaatgagtttattttgatgaatttgtgagttgttgaggcttcaattttgtggttttcctttagattattttgtatgagttttgggttgttaattggggtttaagactactgaaattgaagtggattccttggagtttaagcttgtgatttcagcttgttgctcaagttgttaggtttgatgttatgtggaattttagctcaatgtttggagcttattttgaagttattaatctgatgtttttcatgtatgttggttgtggattaatgcatgaaattggtattttaaatctctattttgttgagttatgattatgggttataatttgtgagtttgtggaaattttggacatgttttggtgtgtttgggctgaatttcgaagctgttttttttttttgggggatttcctgggtttggaacccaggcgccgcggcccgcctccttggaaaatcttgggtttcaacacaggtgccgcggtcccatgtggggagtgtcgcggcccgcccccttgttttgggcagattcgaatgcgatatttgaatatttataacttttcgattcggactccgtttcaggagttctatatatcgttggaaagctctttctgagctctatgtgattatct

SEQ ID NO: 159642 - DNA, 653 bp, Cannabis sativa
  modified_base (611)..(619): a, c, t, g, unknown or other
cataaagcttttttacgtgattttccaattaaaattctgcatagtccacgagtcaatcttattcagattattcagatacaaactaggttttttttctcttaaggattttttttttcagtacattctacccctatttagagtaacatagggtggcagttaattataatcagattcaaatctcacaatcatatttccctgaaattgtgggccttaattacgcaccacgtaaataaataaagttattatttgaaaatcatacagctgtgatttatccgcttttactggatcaacgctgacgtggatttaaatacgctgcaaagtgtatcttgctaggccatctcgctgagaacttgaatagcaacaataatcctggctgcgagctggaggttttcccatgtctttctgaggttgataacgtaaatcccgttgtttctgcgattgaagacataacgctccatctgacaatcgtagttattggtgacaaggtgaacttcagtagtcaacatcatttgaatgtcagcttccatctgagagagatgacttgaaggagcaatggatctcattgaaagatgtctgcagctgattagtgaaggtaccatgagtatgccttnnnnnnnnnagatggatgcctcgctatccgtcacttaggttct

SEQ ID NO: 159643 - DNA, 501 bp, Cannabis sativa
ctagatctctaacccttgttgctttcaattgctaacagggcggggcggggcgggtgcggggatttctcccccagccccatacccgcttgttaaattcacccccatacccgccccaatacccatttaaattaaagcgaggcggggcggggattacccgaagggggaaggattcccatcgggtacccattacatatatatttttttaaaaaaatgatgtctcaaggtgaattaaaaaaaaataatcataaaaactcagtaaaacaatagacttaagtggaacagtgtgtatagtaaagaaaaaaaaaatagtataaccaataaaaaacctaaagtatgaaattattttaaatgtagtagttataattttaaaacttaaatatatacatatatcatatcggggcgcgttcggggcaggtatctattcccccgcccttgtaccgtttccgactcgggtatgaatctttaaacccatacccgcccccgcccccgaaagtctacccc

SEQ ID NO: 159644 - DNA, 868 bp, Cannabis sativa
aaaaaagattttaacaaaactaatatagatataccataatatttaaataatttacttctaattctaaaaaaaataaaaaaaaaataatgattttaaaatgaggacatctactaacatagtgttatgatttagggacatttgctatatttttttaaaatgagaacataaactagcatagtcctatgatttggggccatttactataatttcccttttattaatgtacattggtattatttcatttttgtaaaatttttttgggatttttttattttattaatattatattgtgtgtgttataggtagccggatttttgtcgcaatttgtcaccagactgtgtttataagataaatatttattaacttgatatataatatatatgtatatattttatgttttattattgaatatgtgcttatatatattgtgtgtatactatttgtgtattttgtgtaattgtattgtatatatatttgttgtaaatgagaatgaggtagtaggaatttaattagtttagaaataatgtttttaaaattatgttagtgtgatatataattgattatatatgtatatgttattttttaaaaaaattaactatagaatttggtaactagtaatttgttatattttttaataactagtaagtaattaaataattaaaattctaatttggttatatattgtattatattgtaggttgtgagctaatttttaaggtttgatatatttcggtattgatgggattttaacgtgatataggtatatacattcactaactttttgttattataattaattattaattcattcttagtggagtttgaatatcttatatattcatccgtaatgaagtagattctgtgaata

SEQ ID NO: 159645 - DNA, 611 bp, Cannabis sativa
cacttgtcacttccctgaaaattctcttttatattaattaaatgatatattttggtgttgcgaaattcactcgacaacattaaacaagagggaatttcttccaaccaagaaatctcgttcatgtgttgcggtattaccatttcacattacatgtagaagacatacacccagaaagacagataacaaggacctaataaatctaaaaaacaaccccaatcatagacaccttcaaaaaaagaatggatagactcgacaacaacttcagcatcactctcttcaaagtaaacgaaaaaatccaacaatgaacaactcttggcgcaagggaaatctaagcagcataaatgtgagaatcttgtacttgtaaaaattgactcccttgaaaagataaaatattataactgcaaataaacaaaaaatacattagtaataaaaaataaaaataataattataatacataaataaacattattacaaagtttataataaaatttcactatacataaacaatattgataaatagtaattgctgaccgaggttttcggcaactaataaaatattataaagttagagagctgtaagaaaattagagaaggattttacgtggttggg

SEQ ID NO: 159646 - DNA, 720 bp, Cannabis sativa
ccccaaccatatgaatacccaccagctattaattaaggtaacatgtgtaagggtaaattggatagtaaccttataaaagtgggtaaatttgaatagatttcaatatgcaggtatttttagttaactgacaaaaaaaaagaggcatttctcattttatccctttttgaaacaatatcaaaatgaaaaatttagtaatattttttaatcaatattttgttttttaaattaaaaagatgaaaatattttccaaacttatattctctaaatcggtttttacttttcaattttttaattgagaattaaaattttaaaataaaaaaaaataactttcaatttttttttaaataattttttttcttaattaatattttagactccaaactccaacctagactttggaatttggacctcgacctcaatccagacaaacccaaacccagatcgaaacccgaaccagaccccggccttggaccaagacctgaactcgaacccggacccgagatattggtgccagtatcagacctggactaggcgtcggtctcagattggaccctgaatctatattaaataaaatcaacaaataaaaatgaaatttacacaacacacttttgtttttaaaattgaaaaataaaagtggttgtaggacacattttttcaaaaataaaattttaaaaacaaaaattttatttttatttttatgattaaaaaatttaaaaataa

SEQ ID NO: 159647 - DNA, 602 bp, Cannabis sativa
acccctttgtgaaatgtggctcagaccaatctcagatttttttttgcctgtaatcacaatgaatttgtactactaagatgtgaatatgaagatcggttacaggtaaaaattagttgaaatgaccccctaattcaaaaataaaaaatattcttatttttacggaaaattttaaaaagttttttccttactcctacactcgttagttttctgttgaaatcttaccctacacatctccaaaaatcattaaatttcacggggacgaagccaagaccgttgtgtataacttttctgttggacacgttgagagataaattagttttcatgcactaacgatcattttaatcgaaatagtaaaaatctcatatttctaatagtggtaaccctttgtgaaatgtggcccggactaatctcgaaatattttctgccactagtcacaatgaattcgtactactaagacgtgaatatgaagattggtttttggtaaaatttggttgaaatggcccctaataataaaatataaaatattcttattttctggggaaattttaacaagttttttccttagtcctacactcgttagttttctattaaaatctcaccct

SEQ ID NO: 159648 - DNA, 514 bp, Cannabis sativa
cattttagtagggattctttacctagtgtaattgcatccttggttgtggatgatttgatttaataaagattaatcattactcaaaaaaaaaaaaagtgacaaaattgatacattacaaaaattatactaaatttagtacataatatagcataatttaatatttatatcactataagtacattattttttatttatttttatgttttttaatattttatttttattttattaatatatagctataggtcataacattacaatataattatttatatatatatttttttttattgttttagataatataataatagaattatgttttggtatttttatagatgtattaattaaacataaatttgcatgaatctaattttatagttgtgcattggagtacaatgctaagaattaatgcaaatataacaaaataaatttttgtataaaatatatagcataatttttatatggggtgttttaatttttacacttcgaagcagttttttttttttttttt

SEQ ID NO: 159649 - DNA, 818 bp, Cannabis sativa
ctttgctgaaaaactgtccaggttttttgtatctgtttgaacggattgattatctgtttaaacagattttgactttcctttttgggaagattttcacttaatgacatgatcgtttcttgatggcttgaccacgacctagagggtttctaaactgtatatatattcatcctaaggtcgttggttttggttagctctcttggtgtatcaattctatattattgtgtgaagaacttcggtccaacaagttttagtactttgttattgtgttacttagtattatttcttattgaaattgtgcaaattgaacaccttggatattgttaataaaactttgggagaagtcttgttcatgagtcatcttttggaaggaaaaggtgcatgtgagtcacttttcaggaagaatattgcaagttagtcactcttcgggaggaagattgtaggttagtcactcttcaagaggaagattgcaagtaagtcactctttaggaggaagattgcaagttagacactcttcaagaggaagattgcatgtgagacactcttcgggatgaagtgtgcaagtgctacgacttgaagggagttcaaggtctcggcacttctaaaatttgattagaagaataaattacaacagttgcggcaaattcaaagacgaagtctttatttgtataagtcaattttattttgtaaacacttgttatttatctaataaatttctttctctggccatggccccgtggactaagagcaatttgaaagagttgttgataccacgtataaaattttgtgtgtcattttaattttctacattttactttctg

SEQ ID NO: 159650 - DNA, 634 bp, Cannabis sativa
  modified_base (63)..(75): a, c, t, g, unknown or other
aaaatacagggtccattttgtcatataacaaaacacatggtccaatctataacttttgcaaannnnnnnnnnnnnaatggtatttaccctatttttaatcataaaacaatgttgtatagaaaatatgagagaaggagtttttgaaatataaaatagaaaatttagttcatgtttgttatcataactaaaaaattattttttgtttttaaaagcaaaaaattattttttaaaaataattaagcgtatttggccttattttttaaaaatagttttcaaaaaataaagttacaaaaaacaagaattttaagaacaacaaaatattgtaaactgttttaaaaaataatttatttttagtcaatattaattttagaaaacattaaccaaacacgatttgtattttaaatttcaaaaattattttttattctcatttctcaaaatactttttagaaaaaataaaaataaaaaacaataacaaacatacttttaatttcttcataattgttaatgtaattttttttctcactctccctctaactctttctaaacaattattttttttgctattcaataaataaatatatattccttacataaataaaatatttaactgaaattgaaaatctatatgaatca

SEQ ID NO: 159651 - DNA, 704 bp, Cannabis sativa
tgaacagattttttgtcaaaataaaacttaataataaatctgatctaaagatgttataacaatactggttacattttctgtatctgttcgtattaaaaattatcttaaagtttgttatattaaaaaataaaattattaaaaattgagctcagagtcctatatattttttaccattttagaaaatatagaatccattttgtcatttaacaaaacagaatgttcaattgataattttgcaaaacacagaggatcaaaatagtatttactattttttttaatatgagatatgctaaaaggtatcatacatttattagtaaaattaaataccgagtcatataactttaaagaatatcgctaaccaccaataacaatgttgttcatagtactattgtctcattagtgattgtcgacatttattttgttaccgaattttacttttgaaaaatgtcattagagtatctccaatgtaatcaatggttaaaattattaaaaaactccccattactttaaaatataatattttatttttctctctcatttacatcatttttggccaccttactattatattgaaaaaaacattgttattggacaccactaatgcctagtacctttagatatgttgtcgtgcgattgggtagcgatactctttaaaaattattgggctatttacaaaaatatgggaaaataaagataagttttga

SEQ ID NO: 159652 - DNA, 674 bp, Cannabis sativa
aaattcaaaacgtaaagcagcatgcacttaaaattattgggactgattagtatgattccaccacctgaaccttcgctattagaagcccaatcgacgtacaacgtccatccttctccattcagtacagcagtgtcaattttttcttctacgagtgccacttcagtacttgggaactcaagaatgaaatctgccaaggcctgccccttgatcgcagatctcagtttgtacctgatgtcgaactggcttagctctactgaccatttcaacaatctttctgatgcctctggctttgctaagacttgcctcaaagggtagtttgttaaaacttcaatgctatgggcctgaaaaataaggtcgcagttttcttgacgatattaccagggcaaatgctagttttttcatttgaggatagctagtctcagcatccaacaaacgtttactgacatagtacactgggtattgtcgaccttggtcttcgcaaattagcaccgagctaatcgcatactctaacaccgccaggtaaatggattagacttcgccggatatgggtttcgacagaattgggggctgccccaaatgcgtttttaatgcttgaaaagcttctttgcatttctcggtcccttggaacttcttgttgccttttaaaatcagaaaaaactctttgcatttatcag

SEQ ID NO: 159653 - DNA, 851 bp, Cannabis sativa
  modified_base (88)..(91): a, c, t, g, unknown or other
aggagtccctcagggacatctcagctttctgtggaaaatctgagtatacgtgtccttttagtgggggtctggtctcgagtttctaggnnnnagaaatctcactataacaagtacagcaaatttggacatggaatctgggatactaactttcaaacctatgtgtaacacgatctacgaggaggggatgccaaatataaaagttaaagtggctatctcgaaatgtaactagagtgttacgctcagccctaagtagtgtgggtgaccaaccacattgattacctcgggatgctccttcttcagcttcccaaggggcagtattctggagatattgtgctcgagccacgcaatcatgagccttctccttgtctaggacgggaaccttttgcaaagaataatacttgggatatttataatcacatgtaaactccttgtcagttaggagatccacagacctcaggttgacctcattcagaaggaagtcgcatgacctaaggccatacgggagagtcagcaagagcctgcatcgcttggccatctcaagagtaggggcaggtcttttcgagacagctatcaaaaacaaagtaaaattgcagtcagataaactagaataaaaggcatggattaatttgaccaagtctaatgcaaataattacttacgaattacacagaaggtgattgtgccaatgggagaaaggtcagtcgtctagaagaattcgtccttgaaaaaagttttgttggtaaaatccatgatgatcttgtgattgcatgtgtgagtccaaagatagtagaaaccccctgccgcattcttcctcgctagaacagccttatcagagtagagatactctatttct

SEQ ID NO: 159654 - DNA, 576 bp, Cannabis sativa
ggcataaaacccaacacataatacttctacattatgaaccgagaacggggtcagccgtatgtttctggtatttgtagcacaaaccgcagctacaagcatcagttttcctactttttacaacttccatggacactacccaccgggctttcaaccatacgggtacatattccagaccggtcccaactaaggagatgatacaacatgcgacagccttgacatccatgtcagaagttgaaaaacttgccccaaagattgtaactgtggagatgctcaagttagtgggattgtaccctcataagcataactcaattgccgcaagcacaatcgatggacctgatgctcctgttattcccattgaccgggggaatccttctcatgggaactttactacaaccgactcttccttccacatgtctccaccacccactacttcgaggagggatactggagtgatttttggtgttgataacaatcacgagaatactacagtgctcaatgattatgactctgaaggttcctttctctcttctttttttatatatatacttattcacttttttggacatacccatatga

SEQ ID NO: 159655 - DNA, 524 bp, Cannabis sativa
aaaaaaacttaaagtgtacaaaagtaacagctgccgtgtaggagtatatatgtaataaaaaagctattttgtatttttgatgtaaaaatttctaagttatttatatataaaatttatttttctctttttttttttaaatttttttatgaaaattaattattttaaataaataaaaagctataataataaatatatgcgattacatcaattatatacatatacttaattttttttatctttttcaaaatatctaattcttaaatatttttttctttgtattctatttttttttacgtaagtatttatcattttcttaatataaattattctattatgtttctttgtattcttaaatttaaactctatattaaaaaatacctttttttttagaaacataaagttacagactaatttaattaacaatgatcaatataaatattcaagtatttcaataaattcataaacaaataaatcagaacaattcaaaatctcaaatcaagaaaattaaaagtttagatttataa

SEQ ID NO: 159656 - DNA, 569 bp, Cannabis sativa
cgaaatactgatagtggtaacccaatttgaaatgtggcctggaacaatctcggaatattttttgccaatagtcacaatgaattcgtactactaagtcgtgaatacgaagattagtttcgggtaaaaattttttgaaatggccccctaattcaaaaatagaaaatattcttcttttgagtggaaattgtaacaagttttttccttacaccttcaatctttagttttctgttaaaatctcaccctacacatctccaaaagtcgtgaatttccacgtggatgaagcgaagaccgttgtgcatcacttttttattggacaagttgagagaaaaattacttttcatgcactaacgagaattttaatggaaatagtgaaaatctcgaaatactgataggggtaccccttggtgaaatgtggcctggaccaatctcggaatatttttcgaaactattcaccatgaatttgtactacgaagatgtttatacgaagattggtttcaagtaaaaatcggtttaaatggcccctaattaaaaaatagaaaatattcttcttttctggggaaattttaaca

SEQ ID NO: 159657 - DNA, 744 bp, Cannabis sativa
  modified_base (33)..(40): a, c, t, g, unknown or other
  modified_base (395)..(401): a, c, t, g, unknown or other
aactgaaatttaaaatttctatttggaatctannnnnnnnagtcaaagacttaaatttatactaaatttatttcttgagtaatgattctttcttgttccaccattactaatctaactctaagtttaggttaccttaagtaagcatatacaagtatgagatttctaagatcgatgatttatgtcatttcgagatagaatatctagaatataattaatcatctgcgccactcaatttcataaaagaaaataaggtgacatcataagcaaataatttataaaccatctatccaatgatatactatctaagcaatttcttaatgaaaaagctaggaggaaaaataaaagataatttcgattaaaatcagaatccaacgatgtcccgtttaggcgagagnnnnnnntattcttattttataaatttcttcattgtttcatactgtaaacaataatctaagttgtcatctttggatgtacaactagatgtagcatttacaaatatttatatatcgatatctaacactataatgtttgtctaacagatgacaatcctttggaatttgtcccattaaaaacaacaaacaaagttagaccaataatgaaaactcaaaatttatactacaacattaatagtaaaaaataacataggttcaatataaattcatacatattcagaaattatcatacatttagcatgtaataaagacatgtaaaaatacaaagtaaacacatcttaaataatttcta

SEQ ID NO: 159658 - DNA, 635 bp, Cannabis sativa
ttgctatttgaggcgaaataaaaaattatgcatgactaggaaagtgatttaggcattctttggatcgattgtgcctttcaagccatccctagaattttatcattgctaccctttttgagcattaacctattctttgtttctacacattttgagcctagaaaagataaaccctgaatatctaaaatttaaccttaagtataccataagtagatctttagtttggagaaatttagataaaaagtgttgtatgtgtgtgggaataagtgtgaaaattgagagaagataaaaaaaaaaaaattgaatggcaacaacttgaaaaaaaaaaaaagagaaaagatagaaaaatatgacaaccagtgtcaaattcagaaaatatatatatatatatatatagttgttgcaatcttgttgagaaaaaaaaaattatctcatgtaattagaaaaggagaattgggtgacatgattggagaagcttatagtataggtaagcctaaatgaccattttaactacccttacctaagcctaacactacaagcctagaaagatcttcggattcttagttgtccattgatttatattagtggagaatagtaggtattgtaagtatatggaatattttgggttagtggattga

SEQ ID NO: 159659 - DNA, 671 bp, Cannabis sativa
tgagagatcctttaagggaaaaatctgttcataaaacaccacatctcgagaataaaaaattttattagagcccaaatcgagtaatgtgtatgcttgcataccattgggatatccgatgaacatacatgcatgtgcacgaggggaaaatttgtgcctagtacttggtaaggatgatgcatacgcaagacatccaaagttccttaaatggtcataggcaggtggtttattgtgcatcaattagtaaggtgttaaaagttttagcaatggtgtaggtgtacgatttatcaaatacacagcagtgttgataagatgaggccaatataccaaggctatagatgattgaaaagccaaggctcgagccacatttaaaatgtgttgatgttttctctcaacgacggaattttgttgaggtctctcaacacatgagttgtaaatttgaattcctttttgaagataaataggtttgatattgagttcttttgcattatcacatcgaactgctttgatgttcttattaaattgactaaaaacaaggttatagaattgtgggattagaacttgcacatcagatttggattttaacatataaacccaattatatctgctatggtcatccacaattgtcaagaaatatttataaccttctactatgaacatgaaaaggaccccat

SEQ ID NO: 159660 - DNA, 619 bp, Cannabis sativa
acttgtgagtagatctaagatcctggtaaaataatttccaacatctcggtcctcgcaatcataatctgagtcgtcccctttttgcctccaggagaccctagcgatgtctttgcgtagtactactaattcggccaagattccttcatttagcgtgcccgcggaagtcgcgagtgcatgtttctttttgtctaggtggtctcgtaagtcaccatgttttgcgttgattttttgtcttaggttaactggagggtacctccggtttttcctccctctctcttctggttcctggtgaacgaatacgctttttcggtcctctcagtcctgaggtccaagactcgccttagggagcttgcccctctgcggacctttccctttcgggaaatttgagcggacttttcacggatcctgcaccttttcctttttctcggggattgaagttggattcttcccatggttttcctcataagggtaccgtataaggcttggttccctggtcttgggttttctagtgcatggtgaggactcttccagtgtttcttcatgttctactgggatggcttaggatgtatgtggatccctgcaatctccatggctttttgcatggcgaccatcacctctt

SEQ ID NO: 159661 - DNA, 588 bp, Cannabis sativa
attttcccctaattttttttttatgagaaaactgtgataaaaagtacccttttatcctgatttttttttgtaaaaatgggataaaaagtattttttgagaaaagtgtaataaaatggtacttttttaaaaaaaatgataaaaggtgtgggaaaattacgactaacagtgcagaatcaaatcaactaaactttaaacaatcaaacaattgacaatgacaagactaaaaaatcaagaacaataatcgaaagaaaaacagggatgaacagagtatgaaaaaaccagaaacaataaatgcataaaataaagaaatcaacaccaatgtatatactagtttaagtttgatagatcggcgtgatctatggctctactcaagttctggaacaccaccgaaatcctctttgttgattgagcaagaacaagtacattacagtcaagatagattctctattgagttctcttaaagtgtttaatctctcacactcttaatcaagaatcttcttcatctggagaagattcttcatacaaaaccaaaactcaatctctctcttttctcagtacctctatctctacctctaaatcttctctct

SEQ ID NO: 159662 - DNA, 512 bp, Cannabis sativa
gacgaagtctcagcaaatgaggaagctaagtattaaggggttgttacccacgaaggctaaggaagaagataaagcatggatcctaatgacttgatttgtaaaatacgaaattgtaattgtaaatttgttagcaaaatgtaaagattagtgatgtaaaggttggtttggagtaataaaattttttattcatcaaaaaaaaaaaaaaaaaaaactaaattcgaaattcaatgtatttaactaatacattttcgatattcttaaaataaaataaaataaaacttgaaaaattagtctaatttacgttgttctaaaatcaataaataaattaattttcaatataaatataattttcttatttaattaaatctcttaagaaaaatatcaaatattgaagtgtcttgaataaaatcaagttaaggtcacccatgcatcctaaaattactccaggttaagcaagtttaactgtggagttctttcgtgatgggctaccgaaaaataagatgcaacttgtt

SEQ ID NO: 159663 - DNA, 969 bp, Cannabis sativa
gctcttgaccagctcggatctgccctttgactgctcgggcctgtccgagcttcctcctcgagagtctttgaacttaattgtttttggggcagaaggatccatgagggttggctcctcggagagatcgataacagcttcggccggtgccttctctctggatggtgttgtctcaccgcccctggacttcttggctggaggagataagcccgagcttcctcccactctcttcttcagagcttcaagcatttttttgagacatgtctgcacaaaataaaagcaacatagttagagaaaagcactagaagtacgaaaacataataatcaagttaaaagcaagacagagtatcttgcactccagaagaagcatttgcccgagcaagacttgatggctcatcatcatctgacaagtctctttgctcctccaagatgactttcccctttcgtactacaggagtggatggccgagcaagtagactaggctccctagtctaaattgcatgttcaacaggcctgtgctcggttggaagttttttcttccttttgagtggagtcacctgctcctcctcaacctcgtcttcctactcaagatgctcttgagcatactgcttggcccccacacctcccttcaacttagcttcacgcttgagttgaatgagttcattctcctgaagagctccctgagcccggccagcactggatttcctctttttatttttcacaggctggggaatgaaatccttcgggtagagctcgtattccacaaagttgtcctctgaaacagtgatattccgggcagcacccagcagctgagcaattctttgagctctatcccttagagcaagtgtgaagggtggacggtaatatataaggatctgttggaaccaagtgtaggtggtgcccatgccatccaccatgtaatactcgtcaacaaaattcccaattttgctaatggccttgtccccggtgccc

SEQ ID NO: 159664 - DNA, 648 bp, Cannabis sativa
  modified_base (483)..(488): a, c, t, g, unknown or other
aattcaagcacttaattacggcttgaaaaaactttttgaatttgattttcagtttaaatacgaagatattttcacttaaatatttcataatcaaattctcatgactcctttttcattcaatctcactttctattaccattctttggagctaaatcacctataaagtttctttccgttattttaaacatattaaagtaatttgtagtataaataagtttaattttagattgtaaataaatatttaagtttaatttttatcggtaatatatataagttatattttgaaaactctataatgtcaagtcattataagtgtcatttttttattggtatatttaaactaatatttttataaaaaattaaaatttaatgacttggactaagagattaccacgtgactagggtgcacatgggctgggttggctgggttagaggtattttaatacgccaacctaatgattgcggtttggataagctataaannnnnnaattttttttattgtacaacccaaccctacttagtacaataatatagggggttcattgggttgggttcattgggttgagatgaatattttaaactttaatatttatgttacaaacaggataaaattattcaacctagtgcatacacacaaaaaaaaaaaa

SEQ ID NO: 159665 - DNA, 708 bp, Cannabis sativa
tagtgttgaaataataattttttggtgttgatttaatactaaatttgagtttctccattggagagaacaacataggtcattgtcatcatactaataaatatatcgctgaagatagtatagagaaagaagcaatatagatattcttatccctagtatcaatatatcaatcaatctatatttgtaaatatagcaagtataattaattttttttaattaaatttaattaagtaatgtagctaactatttactagctactaaaaaaataaaaacacatgaataaaattaaaaatagaaaaaaattaataaaaaatagaattaatttctaaactagttttttagaaattaatttttaaacttttgttttaatactactctcttatctcattctcattcacaatatttaataaaattattagtttaaaatattcaatatatacatatacaacataaaatactctcctatatcacattctcattcatagtacgtgtacacataatacatattcaatataacacaaaatacatatatatatatatactattaaagtttaaatttttaccttattactacaatcctaccatcaatgccgaccaaaatttggccactacgcacaaccaaattaacacaatcttaataatatagaaaaggggaattacccccacatactattttttaactttttttaaaaaaaatttacggtttgggtt

SEQ ID NO: 159666 - DNA, 640 bp, Cannabis sativa
aaaaaaaaaattagaaaataagccaagtgaagaaaccctctcttcccttccctctctctcttcgaaaccagctgaatcaaggggggattgctggaattctttgtgttttcagcaagaaatcttcaggggattaagccaaggtaagctcttgtacactattcctttattcttgaattttaagattagttgagtatgtgattttgtgaatgggagctattaaggttagaaatgtttagggtttgaattctaggattaatttggattattttagtttctagtagctagtttggtggtgttgtgttggatttatgcaaatttgagttttgaactcaaagctttggtctttaatggcaaattgagtttcattaggtttttgtgtgattttctggttggaatatgttgtgtatacattgtttaggtactctggaaagtttggtggcaattggagaagttttgagcaaattggtgagtttttggggagactggtataaaaaccaatttactggttttaccagtacctgtcaaaccggtaaaccggttttggcaaggttcctcgaaaaattagttttctcaattctcatccatttcagtgtcgtagttgggtgtttccctattttcctgagttagagtaatcccaaga

SEQ ID NO: 159667 - DNA, 501 bp, Cannabis sativa
  modified_base (206)..(208): a, c, t, g, unknown or other
tataaaatatttgtcgcctagcgataaaacaacaaaagccctgatgtcccgaggatcgtacgctctaggcctaaccgcccccgacatgtacaatcttcatctactcgctatcatggctcctcaacataataaacatactaatatcccaggttataatcaggcgcccatacacctaaccataaccctaactggatcaggatcgatcnnnacaaagtatgactaaccgcgaatctattctacactcactactctaatcgcactgatgtggtagcagttaattcatactatctgatagcctagcatacatctgttggcatctcggcgcatctctatgtacacttcactgatgccctgatatgctaatcagagggctataaatttgttatttctgacggcaactaacatgtacgctaaacatgtataaacatatgcataatattatactactcttaccttgattccgaattcaggtgtgccggctaacctgagtggaacaactgc

SEQ ID NO: 159668 - DNA, 591 bp, Cannabis sativa
tttatttaatcagagatgatgtggttactctctgattaattaaaattatatatgttatttatattctttatctcaaaataataattcgagaaataaaatattttaccttatatatgaaacttttatcatcatttgcaagtaatgtattgtctttgcataaaaaaaatattactctcactaaccttctggtatataaaaattttcataattctcttttcaaatctaaagaaaaaatggtataatgaaataccgattgtgaaaattttgttttaatctataggaaggcttataaagcttgcatatgttcaccactattagaggaaaatctttaaggttgtctgtatatcttttaatctagttcactattttggaattgatgaatgaattgaaatgagcaacaaattccaaggttattataatagaatcttttataaagacaagtgagaatataaatctcctttgttattgattcttagttcaaaataaatttcttagtgatgaatttagttttatatctttatgtttctccatgtttcctagtgagtatttattggtgaaaaacctatccttaatgaatgttctccaccccat

SEQ ID NO: 159669 - DNA, 516 bp, Cannabis sativa
ccacctccctctctctctctctctctcttcatcaatttcgaatccctatagtataaagtacatgtctactcatatcaagtcaagtactcaatcataatgtgaaaaattgtgaagaatctaacactagaaggagattcagactcagatcttgttattactctatgacagaaaagaacaagagttaaagatcttctgagtggaaggatccatattatactactgccaccaatgtaagattttctaaactttatatgtgtttatttattttattgttttagaaattcatgtttacggtgttagattatagaatttaatcaacatacttattagtaaatctaaattctggtaaaataactttcaacagtaattgtgaagctaatgtcatcaaatttcaccctcaacagagttacgaaaataagctccgggttacctgtagcgggatctgttgggctccaaaaaatagccatcaccaccaagagctaatttaaccattagatctgttgggttttatgccct

SEQ ID NO: 159670 - DNA, 581 bp, Cannabis sativa
tatttgagactgaaaagtctttaggccgaccagccattaactcatctcgaaccttgaccagctcgggatcttctaactgtgcctttctgattctttttagcaaatcacataggagtgtcaagttgtgcaactttccaactacaaattcgattctcgcactgaccatctcaaaagcctgttgaggagctatgaaattagtggtgaaaatctgcccgggccctcttctacttagtgcatcagccacaacattgactttcccggggtgatacagaatctcacaatcgtagtctttaactagttccagccacctcctctgcctcatgttcaaatctttctgggtgaaaaagtatttaagactcttatgatcagtataaatctcgtatttttcaccataaagatagtgccgccatatctttagagcaaaaaccacaccagcaagctctaagtcatgtgttcggtagtgctcttcagaatctttcaattaacgagaggcacaggctataactttgtcagcttgcatcggaacacatcccaaaccctgtctggatgcatcacagtaaacaatgaacttctcttgatct

SEQ ID NO: 159671 - DNA, 585 bp, Cannabis sativa
tttttgagcaaaagatgatttattcattcataaacattcaacatcaacaatagacttgagttcaagaggagcagtatgctcactaacaatacgatctgaatgataacaagacgctatagcaagacaatgagccgccctatttattgtgacttgaaccaattaagaattatcacgtgacaatttacttaagaaaggtacctacaagaattatagcttaagtattattaccgctaaaaattaaacttaagtatttatttgcgagttaaagttatatatttatgacgcaaattactctatttattttattaaatatataaaaaacattaaaaaaaaaaaaaaacaaaaccctaaatcagacctctctctctgtgtctatcgtgcccactgcccagagagtggacgacgacggtgattcgctgcccagccatttttcgacgacggagacgacagcatcttctcccctactcgctgaggacgacgcccatcttctccctaagtcgccgacggcatcttcaccaacgacggaacccacacagcccctccctctccgacgaagacacagctcctctctctccaacgaagaca

SEQ ID NO: 159672 - DNA, 639 bp, Cannabis sativa
catgtgatttcggacgtggaggttgactaagaggttgtaattagcattcctcaaataaatatcttttacataaccgggatcccgtatttgaaatatttacaattgggttacaaaatattcaatacaaaagttgtcgcctagcaacatttaaaatacagcatgctgtcccaaagatcgtacactccaggtctaaccgtttcgacatgtacaattttcatctgctcgctctcatggctgctcaaccttagccttgcccatacctacacatacaaacattatctgtgagtcgatagactcagtaagaaaaatataatcataacatatatgtaaacaggattaagattaggtgcacatactcttaatcgtaacccctcccggcgtcctacacggtactgagtcaagaacgttcaaatgatagtactattgaccataatatcagcctatactcaatacgctagttatactctagtcgtatcgatgtgatgctgtcaagtagtacgatctatcgaccaaaatcagcctatacttggtacactagttgtactctagtcgtaccgatgtgatactgtcgagtagtacataagccaacatacatttatcgatattcaatataaaactaaatatattgatactgctatt

SEQ ID NO: 159673 - DNA, 718 bp, Cannabis sativa
tgtatataccatattaaaaaaattatatacaaccataaaataattatatacgatacttacaatattatatattacctttatatataataaaataaaaattaaacattcatgatctaaaataaaatgatatactatacaataaaatttagataccatataacagtagaaaatatatattttacaatcgatatatatataataacaacaaataaaaataaaaatagataggatgctaatgaaagtatatatcgtgtcaacaaatgtacaatagaaaatagaacttaaatattatttataaaaatgatataccgtatatcaaaaaatacatatatcattcaccaaaatatatgtactaataataataataaaattatatattactaatttatatatctgtatacactaacaaaattatatgtcataattaaaatatataaaccatgacaacaaaattatataccaccattgtatataataaaatagaaactaattaaatattatttaaaataaatatataccatacaattaaaatatataaaaataataattacatatatgtagcctaccaataaaattatatacatacattaaaatatttgtattatgttaataaaattatatacaacgattctacatagcaaaataaaaaataaatatcatttaagaataaaaatatactatacaacaaaacaaaaatatattgtacaacaaaatctat

SEQ ID NO: 159674 - DNA, 592 bp, Cannabis sativa
aaaattggaatttttgaaatcgaataatcaagtaaagagttatgcgcgttttagtgccgaaaaatgcaagttttgaacctgcctgattttcggcctacccattgaaattaggtagtccgtttttcacagataggtagtccattttaaaataggtagtccgtttttcccaggattctttttgaaaaatgtgctaacagctacaaacggctagtttttgttcctacactatataaacttgtttttcactcaaaaattaaggttggttgagcatctattcatcatataacatccttctaagtgttttaaggtaaataattattatcttttcataaacacaccaaccacacacacttgagccaaacttgttcttatcttctctagtgtacttgcaattctctctaggatttcacattgtatttcatcttgttagagagagtttgctttgtatttcaaaatcaaatatccattgtattgagaggtgaggttggcaccggtgtaaaaataacttggttgtagatgaggttgacaccggttttgtaaacaactcgagaagagtgagattgtcactacaacaatccgatagtgagattgg

SEQ ID NO: 159675 - DNA, 534 bp, Cannabis sativa
  modified_base (73)..(76): a, c, t, g, unknown or other
gagtcaaatatgttctaggatagtagaatttagaattctaattctagaaacataattatctttattttagttnnnnttttatgagacatatctttgggtacatttgaattttatgagacattttatggttattatttttatgagatattttgtcgtatgttttaaatttatgtgacagtttatttattcttaggttctcgaaaagtattgattctattaatttttgaggcttacgcctcatacgcctcgaggcttatgctttgccttacaaaaaaaatgcctcaaggctcatttgcgtttttttaaacattgctgcctactatttgaatccccactgtcattatcctaaagatttttccaaccatccagaggttaagttgggtttgtttcattgtatggacagacttatcccagatccgaaagaaagtgaaaacgctcatcttcaatgtagcatttttcgcaacaaggaagatttcttttgatttacccaagctaaagaaacatttgaaaaacgatcaccaggtaattaaatgt

SEQ ID NO: 159676 - DNA, 665 bp, Cannabis sativa
cgaccgatgtacagccctacttttatagcatcatgtgccaaatttagcacactttttagaacaacatagagtataattttttttaagtgtgttaaaatacaacaatacaccatctttttgtcactccattagagatgctctaagatatagcatagtgctaaatttagcacacaataaatgcaacttttttaattataattttaccattaattattaatgataaacttttatacacattttttaattataatattgtcattagttatttttaaatattctaatttattgataattattaatcatattttacgttttattataatttgcatcataaagcgctattatgcattggagcataataaaaaatattgtagcgaatataacacttgttagtttctcgtgccaaattcagcacaatatttagaccatttctaatgggagatgtaaaaattgtgttatatttagtacaaaagtagttttgtggtaagtttacaccaaattttagttttgtgctccgatgcaaaattttgaaattttgatgtaaaatttaatatttaattaatgctctattaacaaaaaataaaatctaataactttataatcaattttattatttttttttatatgtaagacaataaaaaaataatataaatgtttcataattt

SEQ ID NO: 159677 - DNA, 640 bp, Cannabis sativa
tccttaaggctcgtccactatccaccaaaatccaatagactattccagccaagccaatcaattcgaatcccccaagaacttctgaaccatataccccgagtcaccgaacaatgacaaaacaaatggagagtagattcttcttccagattgcaaaataaacacttcctatgcttaacctcccttggacccaatctggccggtgtggggagaatgtcagaaagaattttccaccccagaaactttaagcgaggatgcaggcacagcttccaccacttttcccaaagtttattaggcgtattgaaacggtgttgttggctagcccagtaagcacttttgatagaaaatttgcccgactttgcagcattccaaaacacaatgtccgtgccccctgttaaaggcttgatgttgagaatatcattagcaattcctccattgaaacactcacagacaagtttctcattccacattctagtgccctccacaaatagatccttgacttgccaaaggggctggttcttcttgaacataaaattcatcttgatttcctcctccttcctaccggggatccaaggtctgtcccaaatttcacaattcccatccgcaatcataatgcccccttcctccacacaaatatttcgca

SEQ ID NO: 159678 - DNA, 587 bp, Cannabis sativa
ataaccaagaaaaaaccattaaatccggcgaagagtttttgctaaatggaaggataatcgaagaacaagatttacagaagattgtcccccaaaacatagaggtaaacacaacataacccaaaattaatttaattcttaaaaaattaaaaaaaacacaatccgagatttagatctgaagtttaagaaaaaaaaatcgaaaaaaaataatgtgatgttgtttaatttatgatgcgaattgataaatgagggttgttctattgttaatttgccgtttctaacacaaaatgattggtaaatatacttgacaaactactacaattgttcacacaaaaaattagggttattctaatgttgttttgccgttattaatacaaaaacatttctaattatatgtataagaaaaataacataagaaaaacgaataaaaaatatactgggtaattttgtttgtttgttctactgttgttttactgttactgtactattgttttggtaattttgtttggttgttttgctattattttactgttgttgtattattgttttaacatgaaataagacacgtaaatgtaatatatggaacaatg

SEQ ID NO: 159679 - DNA, 660 bp, Cannabis sativa
caatacatttcaagacacactaaactgggatacgcctttagcctgcagaagcctcacctacacgtgtcagcctatggacctagtgactaggatttttcgggtacaatgtcagaggttgtctcccacgatacactatcgtacagagcatgagtgtccttgtgtacctgagcaaatgatccaacagctagggataaagggaaactccaataggagaagccctgaggtgacacgcgtctgaggcccaactcgtacgatttgacgcccttaaatgccatatgggaaatatgccacctacttatccaaagattggatttttccccagcaatgatccatccaaggtagcacatgaaaagaagttggcctataaataccccaaaaatagcacaagaggaggaccttctactttcaaaaaaaaaaaaaagactcattcttaatcatcccaagcaaacacatttttgtaaccccactatcaactccagaatattccaactaagcttcctcttcttcaagaggaacacgggggaaaggagttctagtccattatatctttatttgtataaatagttaccgaccaaagagcctaataaaatgaactcatggactgaggtgttggattatggttttaccaggatctagagttactaccatgtatgttgttta

SEQ ID NO: 159680 - DNA, 686 bp, Cannabis sativa
ttaccctagtgatttaaatgatttaaaatgttataccatgctatctatgttgaagtaaagaattatgtgttcaaggcataatttagttggactcgataattagaatagagatgaactgttctaaggccttattgtaattagacgtatgagcgtaacacgtgggtctatgtcacatagacataaataggcgtgtgagcgtaacatgcacgtctatgtcaaatagacaataagtgtaatagcattaatatatatgtgatatgtactattctgtatgttaatcagccacgagttcgagagcttgaccagagattgtacatgttcgggccacactagaccacgcgggttgggtctaccagttgatgtattttgtattctcggttttttgtcgcttaggtcgacatgataaaatgacttgtaatattttgtaaaacttttatggaatcccgaaacatgtgtaaccttttacaatggttgttaattaaatagttacaaattacattttcactctgtacttgatttaaagatttaagtttcctactcttattttatagtaatctcggtttagcaagattaagttatattaatggttgttagtagcgtgcctaattgatagggcgttactaatgatttgagtcattttactagtgattttcttgagatttttacacctcatgtcaaaattgaca

SEQ ID NO: 159681 - DNA, 551 bp, Cannabis sativa
accagcaaatgacacagtttaattgctgcaatcctgccaccaaatgaaaagatttactacaacaaggaaaagcattgtgaacacagtcattacaagccttgtgtatcacatatggaaggctagaaatgaagctttatggaatcaacaattatggcctacaaacacggcagtgcagaaaaccaagcatcttagtcagctaagaatcaaagcttggccgcctaaaaaagcaaaggatgaagatatagattggattatgagaacatacactacaagaaaaccaacttttgccggtgcatttttgcgccggaaaaagtatactgaatgcgctgttaaagctttgccggcgcaatactgcgccggcaaaacttgtctgggaatcttggtcggtaaaagactttttacctgcgcgtagactaaatgcgccggtgaaactctgttttaccggcgagaaatcacgccggtgaaaagaagcgacgctattaaaaaatacccttatccgctatggacctgctttgataaccttttgccggcgctatatatgcgccggcaaa

SEQ ID NO: 159682 - DNA, 880 bp, Cannabis sativa
actttaaagtttattttcgaaacttatgagttgtcatataatataataagctactatttttgtttacgaattattttatacatttttattactttcaaacttatgtgtttatttttagattatattaaattaatttattattttaaatacttttactttacttttttattttgctatattataaaaatatttgtcacttagactatttaataaactaataagttacaataaagttaaaaagaaaactcacataacttattggtaaaattactaaatatttaaattgctaattagttattttaaagttatattttttgttacattttaagtttacagtaaaaactaactagttttcatatagtataacaaataaacatagatatgaaataattttatttagtatattttatagtattataatttcaataatatacctattggttactttttataaaatgatctactttaaataaaaatatctcctgtagataatataatcttatggtaattaattagtatatgattggtagtatgtgtaagtgtaactcaaatgtttcttttagttttaaaaaatgataaattatatgtttcccacctattaaactgaccacattgaatagtaaattatgattgtaacttttttaaacataattgagcagaataaaattttaaattagatataaaatatagagataaaggaaaaatataatatatatcaacatacatatatatatatatatatataaataaggggagagtggctaaaagagaaaagccaaaaaaaaaaaaaaaaaaaagaaggggggggcagaatgaatggctccatgagctccagcaaaggaaagtggagctggaaaaaaaaaaggggtggaaccgattg

SEQ ID NO: 159683 - DNA, 510 bp, Cannabis sativa
tgaaatatggcacaagcggcttggtcatccttcccataatcgcctagatttacttaaagatactcttggttgtaatactaatgatttgcacaataaggaaccttgttatgttttccctttagctaaacaaaagaaactcccttttgttaataaaactaaattttctgctaaagtttttgatcttattcattgtgatatttgggggccataccacataacatctcacacaaatcacaaatatttcctcaccttggtagatgatcactctaggtttacatggatttatttaatgcaacataaatctgatgtttcttttataattcctcaattcttatcatatgttcaaactcaatttaatgatatgtttaaagttttcaggtccgataatgctcccgagttggtttttagagatcttttctctaaatatggcataatgcatgaatttaattgtgtcgagacacctgaacaaaatgtcattgccgaaaggaaacaccaacacttgttaaatgt

SEQ ID NO: 159684 - DNA, 514 bp, Cannabis sativa
  modified_base (442)..(445): a, c, t, g, unknown or other
ttgtcaacttatatgtgttttttttttgtaatatttttttgaaaaattattttatatattattttttaaaaattgacggtttgagttgttttggtagtttttagttatttttatgtgtgttgctatgtgaaatttagttgtaatttaagttgctccgttaattcctatgagatttttatgtagaaattcttaaaaatacaaaaagaaaaccgttttgaagtgtaacaataaaaaaaatttctatttgttctagaagtgtaactgcattgtaaataggggtgtttatccagtcatatccacactattttgctcattgtgcatccgatccacactaagtgcggatttcattttttagatctaatccaatcggcataataactcaaattcaattcgcaaaagtacagatttgatcaatttttttggattagttactttttaatannnnattatttaatatttataaattttttttttcacataactagcaacagaataaaataaattattattattt

SEQ ID NO: 159685 - DNA, 571 bp, Cannabis sativa
aaatgagttattcaagtcaaaatgtaacatcctactagtttaggagcgttatcgtgattttataatattgtgcaatccattgctaatcaatgggtttattgaaaattgtgatttattaaaacttttacttaattaccctttaattgaacataaatatcttttaacataactaggatcccgtattcaaaacatttacaatcgtaatacaaaatatttgatacaaaagttgtcacctagcgaccatttaaaatacagcctactattctaaagatcgtacgctctaggcctaaccacctcgacatgtacaatcctcattcgctcgctctcacggctgctcaaccttagccttgccttacctacacatgcaaacaataactatgagtaggtagactcagtaagaaaagcataatcataaacataaatataactcggattacaattaggcgcttatacactcaattgtaatcatatccccgcatcctagacggtacgaagtctaaaacgtttatacgacaatactatggaccataatatcagtctatactccgtactctagtcatactctagtcat

SEQ ID NO: 159686 - DNA, 704 bp, Cannabis sativa
  modified_base (159)..(163): a, c, t, g, unknown or other
tgttgcccttaattttgtccaaaatgcgtgaaccaatgcgaccgcgacacgtggatttgaggagtatggttttgagataatttgactaagtcttcttaaatcaagaggatcagtaagaaaaatgcctcctggagaaggtatgaggggtccacgtactcnnnnngggcaaagccatagcaaagcaccttcgggaggtatcaaacctcatttgaacagtcacctcacatttaatgccgcatgggaggaggcgtattggaactgccataagtattaagtctgacgctgtaaccccccttctgcagctattacgctatgattaataagtctagtgacaactactttatgagggatcacatcagtcaagaagggatgatggattacatcaacctaactcctaaaatacctagggtatagaccatgcatttcttatgttacactggttgggaatgcgtgcccccactgaaaaacatacagaaagacatgtagctcggttctagggatcaccccacaaaaaaacattataaatatcccccaaacacattaaggcgggggacgagaattctgggtttcaaaagaggcaaagagagaaaagctaccaagaacattctctgtaataaatactctcataaataaaaaagactcatggactaagtgtaatgaccgctttagtaaattggattagaaaaggcaattagcactaattt

SEQ ID NO: 159687 - DNA, 589 bp, Cannabis sativa
  modified_base (437)..(443): a, c, t, g, unknown or other
gagcggagtgcgaggggacttgtccatttatccctgaggaatttccaaaatgggaagatgcgggggccaaggcctggccttggctatatccgggagtagtagaaaaatgtatgacgctcattggtggagttgctgctggcacagtgcctgagagctgggctccgggcacatatcctgctattccggtggggtagtatcctccataggccactatttgggcctcttcaaggttaatgtatttctggactctcttctggaagtcttaaaggtttgaagctccttcttgctgtaactcgttccagaatggagtcctcgtacgaatgcctgcttggagaagagcaagctgttgtccgtcatctactttctttgttttagaggcttcttcccggaacctcttgatgaaatttttcagtgtctccgtaggcagctgcttgatnnnnnnnaaggcgctgacctccagattgactttccttgcggcgacaaattgtctccataagttggtttgcaacttattctagcaatccacggaccctggttccagtttcttaaaccattcctccgcggatccgcttagagtaagtgggaagca

SEQ ID NO: 159688 - DNA, 721 bp, Cannabis sativa
  modified_base (45)..(46): a, c, t, g, unknown or other
aaatgttatttctgatctttaaaaataagtaaatctgattatatnnaaatgagttttatttggggcacaaaatccaataagaacacaccttaaaaagacaacacaggcataccatataataatatagttccataagcacgtttttaaattaatttcactattttacccatctcgggtcaaaattactgaaatacccctagctgacaaacggggtcttaacatatcaaatctcatattaattcacatatattaaattatataataatataatttcacaataatactcaatcaactagtaagagttttgctaatctatttccttaatcctagggtattacaattaccctctccctattgaaatttcgtcccgaaatttacctaaaacacaccagatatttctgctgcatatctgtcttgagttcccaggttgcctcttctactgtcccgaaatttacctaaaacacaccagataattctgctgcatatctgtcttgagttcccaggttgcctcttctactttactgttcctccataatacttttaccagtgcaatcgtcttgtttctcaagactttctccaaattgtcaagtatttgcatcagttgtttctcatatgataaatttggctatagttacaatgcttcataactcaggatatgggacgaatctgagacatactttcaaagcatcaaaacgtggaacatatcatgtacagctgccag

SEQ ID NO: 159689 - DNA, 593 bp, Cannabis sativa
tttatgttgttttaatattattttagatgatttttttattaactaggttattgttatgtgcaattgcacatatagttagggatatttttaatttttatttttgttatgtttatttttaaaattttataaataaaaaggaaaccaacaaaaatggttagataaccacattttataaataaaaaatcatgtgattttctaattatttttgtgttgtttttattaaactctgtaaaaatgtaaaaaaaaaatattttaatgtaaattataaaaaatttaccaaaaataatattttgtatagagattttttcatttttatactttaaaattgttttgttttacatttttacggaattccacacaaaactcttatagcaactgacagaacaacttaaatcgtaatcaaaattcatataacaatccacataaaaattactagagaaactacaaaaacaactctaaccgtaaatcttttaaaaaaatttaaaaaataacatatggagttttcctttccatattttttaataaaaaaagtcatttttttttctttcacaaagcacccataaaaaagcttaaacaaataaaggaattgagga

SEQ ID NO: 159690 - DNA, 623 bp, Cannabis sativa
gtcttttataatgtaatcctcattacatagtttttttctaatgtaatggggatttccttgtataatgtaattatgattacaatgtaatcccattaccttatttttaaaagtaaagcaaatattgtaatggataatttaattccattacgattcccattacaacaaaccaaacatgccattagatgtattaatataaatatacaacatatataagaatatacccataaacaatttattgtgatagttaaccaaatgacgtcttaaaatttaagattatttacactacatactgaaatttttaattttttttacttttttttattgtggaacgaattttttttttcaaaaataatgtgtactgtgttaacttttcactgttgttctacaattgttttttagttttttttgttttgttttctattgttattttataaaaacaatagtattttttaaaaaaattccgtgtaacaatatttttatagaaattaacttaaattttaatatttttgtaagttcctttaaaatttattactaattcaataatgagattatttcacaaaaacataaaaacaacaaaaaaaaaattacaaaaatacggttttacagaattttaaacattttta

SEQ ID NO: 159691 - DNA, 799 bp, Cannabis sativa
  modified_base (49)..(53): a, c, t, g, unknown or other
  modified_base (138)..(143): a, c, t, g, unknown or other
  modified_base (193)..(205): a, c, t, g, unknown or other
  modified_base (289)..(301): a, c, t, g, unknown or other
  modified_base (772)..(774): a, c, t, g, unknown or other
cgatatagatatgctataaaaattaaccatcattctaatcccaataatnnnnnatcctctatagatgatttacaccgagtaaggataaatttaccgttttacccctgaatgtgatttatccttaaaacacttagcttnnnnnnaatgatatttcagtaaactaatatcatcactaaaataagagctcttccannnnnnnnnnnnnagccaagctcaaagaaaatcatcatttcacttctatctccagatagaagctatagatttcaaatctatgattagcgctcccacnnnnnnnnnnnnncatgttcccaaaatgtacgttcgacccgaaccaaatggtaggctttaactaaaaaatcaaagaacacaataacactcttgagattgaacctaaccatgtgaggattaagatcttttgatctaagatcaactaatgatattgacttagaaagatacaactgtaagattataatatctttactaagatcaatatcagtctcagtccaatgtatactccatacaatcaatactagcatactttgccaatgttctgtaaagaacataacacttatccaaggtgtaagtaagctttgtttctgattatcacatcaatataaatccagtgcactgatgaatcaatggacattaacttttgaagcatataataacaattaccttccactgtgttgacatcactgtaattgtgaataactatatgttcttgacttaatagaaattttattcatcaaaccataaacatgaaaactacatnnnaacataaatgacttctaatctttta

SEQ ID NO: 159692 - DNA, 604 bp, Cannabis sativa
catagtattatttattatttagtataatacgacccttatacggcgtaccaaacgagcccttgatgatttttcccccgaactttaacgtgtactaaattatattcctttaattcaagctattaaaaattctttttgaactattgagatcgttagattcaaagacttttgttcaattttaataatgacaatcagacatggatgagagttcaggagctacaatttagtacatataatttaacaaaaagaaaaggcattaaatagttaaataacttttacaacttttttttttgttatatgggtaaatatatctatatattttatgtatcattttcattaaataataataattataatattggattgttcaggatcaaaattctgttgcacttatacaacaacaagagttatttacaaaaaaatatgactctattgtaatgctgattaaattttttattattatgttgttataaaaaaaaaattatatgctgtatttatttatatagtcttacaaatttatatatttatttatattctaaacaacaaacatatattaaaatattatttttttctaatattttttaaatagtgtaattttattttactt

SEQ ID NO: 159693 - DNA, 512 bp, Cannabis sativa
gactatgggaaagagggaatagaaagacagagggaaagtaaagaagagtcgatgaaaaagagggtggaaagtgaagaagatggacgaagagggtggaaagaccgcatgatgttatttaataatcacactcatctgacatattatgacccaactgacatattgaagtgaaaattttaatttgcacttgtttttaaaataaataatttataatttagaaatatctatttggtggttggaagaacaatttaatttggtattttctgcagacgtggcgtgtgatcattagttcgtattctctcgcttcattgcgaaaagagagtgtgtcgcattgtagactattcctatttatatatttatatatgtatgatcattatcatataatatacgagcattgctattaggtaccagtagtgctttgcactttctcgacaagtggcgttgcgattggctagcgatactccataaaagctattgtattaaattatatgggactcgatacttagttggaccaa

SEQ ID NO: 159694 - DNA, 625 bp, Cannabis sativa
catgatcaagattgggtgggtttgttgtatacaagttgtaattaatttttgagccgagttttttgtgagttaagttataaaaagttgtatttattttgtgtttaatataaaaaaaaaaagttcatttatatatataaaaaaaaaaacaataaattaataagagtacatcataaaaatatattaaaagaccgtattttttgtaaataaaattataaaataataaaaatgtttaaatttcgtacaactatatttttttaattttttttttttttgttatttttgtgaatttgtgaaataatccctaaattaaacatatatttattatgtattttcttagaagaatttttacatgaaaaaatacaaattgatactttctttacaaaaatacctccataaggtgtgagcaacaattttttctttgataagcttttattcaccaaaataccactcacacatattcattcatgtcagctcaaatatcaacttttcattttttttcctcgtttttctttcatttttaatttcaaatttagcattcagtttcttttttcttttttttttctcagtttttttatttcaaaattaccttccagccattactctttcaaaacccacaaaaatcacc

SEQ ID NO: 159695 - DNA, 963 bp, Cannabis sativa
  modified_base (576)..(583): a, c, t, g, unknown or other
aagaaaaagataaattattaaataaatgggaaaattaaaatttagtggggtccactaagtggccgaccccttaagtgaattttaagctatttttttttctttaatccatataatttaaatctaaccctagatgaaagtctataaatagaacatgatagactcatagcctgataactcttcataagtctattgtatcagcaaattgaaaagagaggctcctctctaatttttgagttctcttcttcttctctctctaaattgtgtccctataaagatagagtaccttgcccactcaaatcaagtcagtactcaatcatagtgttgaagattgtgaagaattccaacacttgaaggagatccaagctcagatcttgttattactctaggacacaaagaaacaagagttagagatctaagcggaaggagtcatattattccactgccaccaaggtaagattttctacaactttatttgtgtttaattcattgtttcaggaaattcatgtttaaggtgttagattatataatgcaatcaacatacttgttagtaaatttagatcctagtaaaataaattnnnnnnnntggcctcagagtcatggtaatgatttactttcatgatatatggatttataacgatgattttgatgatttggatgcgttcatgttggtttatgtgcttaattgatgaatgtttgtgaattacaaatttttgacaaaaaaaaattatttttgtactagaagtatttttcctagaaagtagatgaaaaattaatcaatttagacttttacaaaactcaatttggatttaaattgaattagttatgattttttgaaaattcaaaaatatctttgctaagtaggggtgttcatcaaaccgcccaaaccgtccgcaccgcaaaaaaaatacggtttgaaattctttgcggtgcggttgcggtttgaatttttcctaaactacgcgg

SEQ ID NO: 159696 - DNA, 681 bp, Cannabis sativa
aagatacgaagctacttgatctttaaccaacagaataaacactttcacaaagttgttctacatttagcaacaaaaaacatcaaactgaatttatacagatatttaaaacataaatacaattgttgtattgtattgttgactaaaaaagaacatgataatgtactacaatcagaacctcctttgacaatgagtcaatgactacaataatgatcacaattgttcttttattcattaaaacccaatagccatattgaaatgtcaatgttccagaaccattcctataaaacacacatagattacctacataaatatttctctcaaaagactcaaatcttgaagcattaaactgaatcatttatcataatccaccaatttttagagtttctaaacaatcaaaattattaatctcaatattaagtatttattgagattaaaagaaataaaagattgcaaataattgaaacacaaagagttaagcataagaattttaaaaatattgaagaatcattatttgacttcaatagatccttttgtttctgtaaaatatcaattaaactaaaacattaatgttccatgattatacatgtatatatatatagtgagagagaggggattttcttagtctttttgttttccttctcaaccttttcaactttcggtttgaactaaaggcaccgttca

SEQ ID NO: 159697 - DNA, 618 bp, Cannabis sativa
aaataactttttataatagaaaaatatatataattatatgaaaataaattattatatatatatatataaattctagaatggggctgctccttttgctcttatgttatagggaaataaattgacctaattacaagcttaagaaaatagagtgtagataaattttataaaattaaaataggagattatttcattatttaattgatattttactgtttattttttttttctgctaactatttatttagatgctttataactgatcagtccaaatcttcttctccttataactgatcaccaaacacacacacatatatacatatatatagtatgcttatattaggaaaaccaaataaatatttaaatatgttgaagggtaacttcttatcccatgaaatggaagctaaagcactattttttggcttaaacatggctttacagcaccaactgccacttcattatgttgaaaccgatgctcttttggtctcaaatgctctacgagctcccttcaattcaatttcatcttttagtgacttaattgtagatgttgctagtcttttatccttttttccaaatgtatgtgtttctcatgtcaaacgtgatgccaatatggcggctcat

SEQ ID NO: 159698 - DNA, 568 bp, Cannabis sativa
ttcgggactttgctagggccgaattagagagtcagggtaggactagcttgattacttttttaagtgtttactgcttgtatagatattttaacactcaactcttttctcttgttgcagcaactaatcccatggaggcgatcttggccactcttgctggagcccacagtcctgatcctgcttccattcctcccacttcttcccagatcgtcacccccgtgaaggcttcttccagtgcccctccaaacactattgacttagtggatgaggaggaggtacttcttgaggaagctgaagaaggtcaagaagagcaatgggctcttcctgaggaagttttagaaggtgaagaagagcaagaggttgctctggtgcgcaagcgcaaaggcaagatggtagtggaggaatcttctaaacggccgaggagggtggacacttcggccccgagtcatgattctgggatccctcccgaggcagaggagtttgcagtgcctcacgacattgtactgactccggtccccgaagatgaggcgaggcaagagcttcagatagccaagtataattatgcccttga

SEQ ID NO: 159699 - DNA, 522 bp, Cannabis sativa
ttaaacttaaaataaaattaaaccttaccttaagcttcaccgctctgaaaattcgctatcctgctactactggagcttagatcgctcagtttagggttgaaaatcaaagaaaattgatatagggggagaaggttttgtcgaagggggaggaacatgggttttttcgcttacggttaactgatataacatatattatataacatacctaatatatatatatataagaagagaacgtctttttcgtttattttaacgttaatttttataataataataataatattaataaaaaaattattattaataattattttattattttttagctactaagaaacttatacttctaaggtgctacattaaattttacatactcctaattaccccaatacctatattatgaacttatcacaatactcccattaattctatcaattaagcctgttatgatatttctggctcccgatcgagtctccaaggtcgccaaacctgaaaaatatttttattccacatatagttcat

SEQ ID NO: 159700 - DNA, 838 bp, Cannabis sativa
  modified_base (806)..(811): a, c, t, g, unknown or other
gttgggatcaatattcaaaacgtgggaaatgatagaaggatcaattccaaccatatccgcatgtgaccaggcaaaaatatctaggttttctcccagaaattttatcaattttgattttacttcgagcaacaaaccctttctgatctttagctttctggtcgggatatctggatcgatctcaatctcttctaactcttcacaggtccaacattgcagcttgggtcccaaagtcgaggatccacatcttcattcccgccttgggaagttccctacttggaaatgtttttccccttatgctctagctggaggatacttccttcttagccttggccactgcaaggttataacatttccaagcagactgttggtttcctctcagacaccctaccccattctttgttggaaacttcaggcatgagtggaatatcaatgtgacagcctttaagtcatacaaggtcggtcgacctagcattacgttaatagctgaaggaacatctaatatcaggaacttttccatgatagtcatgcttgttggagcttgcccaacagtgaggggtagacaaatttgtcctaaaggtgcgactccttgaccggagaaaccatagacaggcaggagacatggggttagatcctttatctggagtcccatattttcataagcagttttgaacaagaaattcgaagaggctccattataaatcatggttctggccacaattttattggctatctggacttccaccaccaacagttcgttgtgcagaaatctaattttgacagcatcttcatcgttgaaggttatggtnnnnnntcctgctcgtggaattttgggcttcct

SEQ ID NO: 159701 - DNA, 672 bp, Cannabis sativa
atttttacccctgaactttcaccaatacaaaattttgcccccttttattaaagaaaattaattttaaaaattatagtatagtattctatttttcaaagaaattatattaattcataaaaaataataaaaattattaaaaaattagataaaaaaataattttacttaaaaaaacttaaattattttttaaaaaatattttcaaactatattttatttattgttatacccaacattcgactactattttgatggaaggcacgtgttaaagtatgaagaatatggatcaatgcgtgtaacgataattatatttgaaaatagaataactcattaaaagccaacgtgacagagtatatttacaacttgctaactatatagtcttatgcgagataaagatatacaaactattgcctcatgcattaatgagaaaccatacagcattggatgcacaaggcgagacatcaacctcgtgacacatgagtagacgtaagcgaggtataatgactgtgaagacacgtagcatataatatacagtatacaaaccaagtataacagtcaggtaaactcgatcaactaatagcgaggcgcccatctcgctacaggaaagcacactccttgtactttcaccaatcagcttcagacatcttttagtgagatttatagtcttgacaagtc

SEQ ID NO: 159702 - DNA, 530 bp, Cannabis sativa
ttttacactatgacgtggcagcacatgctggtgacacgtggacctgattcctcatatctactagagagagatgtttcgaataggacacagcatacacctgcacggataatgtcttcccagccgagcagtggataatccgagcagcacatcaacacttagcaattccagaatttgcatcgtgaagcataagagcaatccctataaatctgggatcgtatcacaaagatatggcaagctatccaaatcccacattcagtgtattttaaatatataatatatgttcttaccaattctaaatattgtaagcaaaaagggaaaccttccctcaattatttcgccctataaatagtgattcattatcactaataagggggtcaaaagaattactttagagaaatctaacagagcgtactcagaaattttattgtgagagcttcaagagaggaaacgatgtgttctttgttcttgagttaatacaaatttaggggagtaggctattaccgaactgaacgggaccgaacctctttaaa

SEQ ID NO: 159703 - DNA, 632 bp, Cannabis sativa
ttagccactacaaatatgcactggcaaaactttaacctttttgccaacgcagtttgcaaaatgtgttggtaaaagtgacatttcttgtagtaatttatataataaaaaaaagctacacatgtaatagatatgtttggcacttggcctaaatttgtaattatacacatgtcataagaattgaagagtataattgagacctctcaatcacatcaagttacatagtttaccgtgtaattacctgattgaatgaacatgtcaattcttgtaattactctaaattacacatgattccaattacacaagccaacacaccctaaccaaagtgttttgagatcttgtgttaaaatcttatcaaaaatgttaaaaagggatatgtggtgtttagtgtgttatatcgttattagtattattggtacaattaagtatttgatccacatatttcatttaatttaataactattaaatatcactaatcatttacaaaacatcacctcatgatatattgggtatcacattactgtgctctaggggtgaacatgggctgggttgactgggttagagatattttaataggccaactcaatgattgcggtttggataagctataaaccattcaatttttttattgtaca

SEQ ID NO: 159704 - DNA, 608 bp, Cannabis sativa
attgatgatagggagttaagtgccgacctaatagagatgattttagtagattttgatatgattctaggaatggatttcctatccaaatattcagctagtatagattgtaagaggaaggtggtaatctttcaaccagaaggggaagaatcgtttgtttttgtcggttcggttcagggaactcggatccttgtgatttcggccctgtcagctaaggaattattgtgtgatggatgtctagggtttctggccgtggtgttagacaccactcggtcagactctgttcagccagaagatatcaacgtggttcgggaatttctagatgtttttccccaagaacttctaggtttaccacctcagggggaaattgattttgttattaatctagcacctggaatagaaccggtctccaaggctccttatagaatggctccggctgagcttaaagaattgaaaattcagctccaagggttacttgacatagggtttatccgacctagtgtgtgaacctggggagctctcgtattatttgtcaagaagaaggatgggtctatgagaatgtgcatcgactatcgggagttaaacaagttaacagttaagaataaatatcc

SEQ ID NO: 159705 - DNA, 517 bp, Cannabis sativa
aaaattttaagtagtttacaatatcaaaaaaatattatatttaaatattttattgcacgcttgattatttttttttatcgcgtggtaagtaattgtttaaatcttatttttcaactctttaaagtattcataattgttgaagtaaacctccacttacactaatattagactcaatacaataaatacaaaggacagaaaaggaattacaagtaaaagccctaagttgaccttcggcctctaaaatccctaacagaaattagttagaatggatttggttaaatccacacttaactaatttctgtaactacctaactatcacatgcagaaataaaaccagaaaccctagatctatatatacctgcactcaagcttagatctacacggttgagagttcacttcaagatccaagagttctgagcttgaagaagaagaaggatatgacctcgcatgtacaagaaaaacaaacagagagttagaaattgttagggagagggattaaacacttaaacttgtaaaa

SEQ ID NO: 159706 - DNA, 531 bp, Cannabis sativa
tcttttgttggagatacaatcaggaatagaattagaaaaactacttaaatattcagctgccttattctcatatcgtttgataaaaaaactaaaaataaaaacagatttaaaaaaaattgcaacattacaattaaccttaaaaatacttatatttattttcatgtgtcgctcagaagacacaactacaaaaattattgcaacatgttcgtttaacctcatagcttaatagcttgagtattcaattattgtgtaaggtatgtaactacactactaacaaccccttcaattttcagtcataaataacttgttatttccagccacaaataacgatttgatggtgagtcatcgaaaaaataaagaagaactaataacgaaaaaaaataaaataaaaccatgtcacacaaacaagactaaaacactcaaaattatgtaacaaagacaagactaatcgtggtagcaaaaattgaatcgcaatagcaaaatacaatcccgatcaaactgcatctgtgcctagggaaggccactgaacct

SEQ ID NO: 159707 - DNA, 625 bp, Cannabis sativa
tgacatccacttattatattagggaattatttaataaaatttgacattgcaattgttgttggtaacttattcgaaatagtgtaactaaatgccacatattcggttaacatagttctattccaaataaaatttaagtttatagttagaaagacatacccaataaaacacaatttgtacataacctttagccaacttttgctatgtataaccttggaaatgaaaaatacctcaaaataccttgtgtttccaataaactttttaaacaatgtagctgatattgtttgtggttttcaaagagaaccctaaaaaataataaacattttattaataaacattttgtattttaaaataataaacattttattaatatgtgccaccatcaatccatatacgatcaaatcagtaggttgtactatgtacttgaataacctaaaaaaaatacttacgtagaaatatgttattactttaaagagaccttcattatttgttaattaattatgataaaccattttttaaatgacacagttatattttttgtgtacagaagggtgcaaagttacgtgatgtttgatttgaggtatttaattaggatgctttatttgacactgtaaatatagattgtagt

SEQ ID NO: 159708 - DNA, 574 bp, Cannabis sativa
aaaccttattattgttatttttttttctttaggttgttcaattgactaattagactaatgcgtatcccttagggatagctgaagatgtttctatggatgcttatggatttgtctcactccaagtgattcttacataattgagatggaagatgaggatgatcccaatcctacatcaattttttttgggggactcctcttactcactactaagaatttggatatgaaagcatggatacctacaatggagtttgacgatgcagtaattaagtataatgtgttagattttattgataaatacataaggaatgagtctttgttagaagaccctacgtgaagatttcatgagcacaacatgcagtcaaactaacgatgctaaacaaagtaaatttatgggagtttttcttacccttttctttttattttgcactgagtttatttaattgagccttgcggacaatgcttctagtaattgtggagggagattaactgtcgtgtctatcattttttttttctttagttatttatttttatcgtttttttagtttatattaatttttcttgctttaattttagt

SEQ ID NO: 159709 - DNA, 763 bp, Cannabis sativa
tcggaattggcattgtcgccgaaaaaatcaccggaaaaattactaaaaaaaaaaatcaccgaacgatttttccagtgcttgccgcagctccgacaatgcaaattctagcaacaatgccaattctaacaatttttccagtgctggcagcaactccgacaatttttctgacaccgacagctacttcgacgatgaaaaaaaagatgctaatctaaaacctatacaatctattaatcaataaaataaaaagaaaaatagagattctcattccaactactgatatttttattgtaaattcttgagtgatccaatcactttgtcataataataataataataataataatacatgcaaaattgataaaaaaaaatgacttgatcaaaaaaatctctaaaattcattaatgaataaaagaaaaggaaattcccctcacccccaaaaaaaaaataatataaaaggaaaaaagaaaagagaacacactagtatacatatatatatatatatattaatttacttcactcaatttattaaagcccaattcacaaaagccctcgctcaatatcttaatcatgattaatgagcctacacttattctaatcaagcccattttaaaagtagcccaatacaaataataaacaaaataacaccttattaaaaaacaaaagaatactattgtttgacattaacctaatcctttgccttatcttcacttcttagttcttctcactcaattcacgccgacaagacaagagagagagagagaga

SEQ ID NO: 159710 - DNA, 658 bp, Cannabis sativa
ttcaactcaagcgtgaggctaagtagaagggtgatgcgagagccaagcagtatgcttaggaatattctgagcgagacaaggaggctcaggaatattgagagcaagagaggccgctcaagaagaagaaaaccctcccgaccgggcagaggcccatcgaacatactatccggatcagagagccttatctacctgctcggccatccacccctgtagaaggaaaggggaaagctgtcttggaggagcaggaagactcttcagacgatgatgccccatctgtgcttgttcgggaaaatgctcctgccagcgtgtagagtacttcatcttgcatttatttttcttaattttcatgccttcgtatattttatactttcttctgactatattatttttctttcgtgcagatgatcaaggctttgaagaagagagtgggaggaagcttaggcttatcccctccagccaagaaacctaagggcggtgaaactccatctaaggataaagtaccagctggagaggtcattgatctctctgaagagcaaactgctgtggaccctcctaccttgaaagttactaaatccaaaggttctcgaggagggagtttgcacgaacctgagcaggaaaaaggtggatccgagctgatcagaagcgggtctgaacaagt

SEQ ID NO: 159711 - DNA, 504 bp, Cannabis sativa
aataaatcatattaatactataaatcaatatcaaacaatatccatctaaccctaatcaagtgtttagctacacatgttcatggaagtaaaatcacacatattcactttgagaaagagaagaagatagagaataaaataatgctgaaaaccctttgtagaatgcctccagtattgactttggtctctgaaattcgtactcctttttctctctaaattgcttcactcaaatcaactccagttcactctttatataggctttcagacactaaaaagatataaaaatgcacatgttaaatgcctattagaattagaaaactgcccaaacccacgtgagacaaaaatacgatttttgtgctgtttaggggggcgggccgcggcccgtgttggagttcgacgatgatttttttgctacgtggactgatagtattttggtcataatgctctcgatattgcttggaattggatgattcaagatgttcctgaaagataaaagagagatctaga

SEQ ID NO: 159712 - DNA, 830 bp, Cannabis sativa
atttaggctctatgcttgccattaaaatatatatattgttaataaattttatagtgctaaataaatactatttaatgataatttgttcaagaataaaaatttgacctataagtcattgaacaaaacttgatactttttttaagctataccatgattagtttgtataacttttttgaaggattaatgtaggtttgggcaatacaattagtgttatgtgtataacatactctttatgtgaatgcattatgcaaatgatgtattttcactcaatgctacgtattaaaataataagaaaaataagaaaagctagaacaaatttaagagttaattttagagaaaataaaaagaagtttctaatactatacaaatgagtaaaagacggttatattttctaaatcacaaataagtttaagtgacattttatattcatttagttaaaattttaatattttgagaatagcacatatatttggtctcaaaagaaattaaattgagcttgcatgcttatattaatcttgtaataacaattcatttgtatactacataatattttttttcttttacatattttatatacaaaattgtgtattttttcttctatacggtcctattagcttggtttataagctctcgttttattatattatactttaagatataaatttcatatttatataatttgttaaaattaattctataatctaaaatttttaatacttatataataacaagctatcttaataattttatagatatttttttttttgttcatttatttagtgagtcaaacatatcatacttagatagtttcaacatcattctttgtagtt

SEQ ID NO: 159713 - DNA, 580 bp, Cannabis sativa
tgccggacaccgaaaatgcaaaattatgaaattttactatatgacataaaaatgcattctgaattcaaaaataacagcataaataatgatttaattatctataaatattttccataattaaacatgattaactgctaattttcaaattaaactacgcggtctttacaaggtatttgatgaaagttgaggtatattatagagtcaccttgctaaacttaaaactttttatcatcttttggtttaaattaatgcatatttagtttacacatatcgttaatttgtttttattttaacagtcactatattccatcagtagaaagcttccatatttgcaataatttttttatatcatatcggaatgtaattatcgggagaggaggagcagaggtgatcatcatatttgaactctggagaagtaattgattttattttttccattaagctaagggcaaaatagggacctgacttataaaagtggttataaatgaaataatatgaaaagaacggtaaaaatgaaatgaactaagttaaaattggtatacggtgaaattttcccttggtcaaatgatttggatgggcc

SEQ ID NO: 159714 - DNA, 529 bp, Cannabis sativa
caaagtttgagccattggcactaacacaaactcgaaaaatgaaaccctcgttggaatgtcaatctgggcgctaagtgaaaaccctaggcgtccggtttgactttcaaggtgttgtttcgtctattttcagtttccaagccttggacttagattcttcttctcttaatggttcaaaatattgaaagatggtgagttggaaacaacttggcaggatacaaacacccgttgtggagtaacctgggtgcaggactacggacccctcccaggtcgactgctatgactcgtgactactcaactttgggatgttttctttcttgtcatgtgtcaaacattgaattccacgtcaccaaggttagttttcgtgtaaacatttgcccccaaatcatcttggcacttgtgcgaggctgacttcatgacatagactaagcctatttcataaaaaactaccaagtgggcatcaattttgacaatattagcaatcggcttttgattgtcttgagtgatatcctttgaattgggagacttctaa

SEQ ID NO: 159715 - DNA, 859 bp, Cannabis sativa
aagtctgtgatccaatctttaccttcttacaccatgagtgtctttttggttccccttgaaatttgtaaagacattgatcgccttatgggaagattctagtggcattccaagacttctcaaggtggtggaattcattggaaagctgggataagatgtgtcttcataagcataaaggtggtttgggctttcgaaatttgagggattttaatttagctatgttgggtaagcaaggttggcggctattaaccaatccgacttcgcttgtggcccgtgtttttaaagctagatattatccccaagattcttttctgaatgctgggttgggagctaatctgagttatgcgtggcggagtttatttgaagcgcaggatgtggttaaattgggtgctagatggcgtgtggggtctggttctttgatttctgttcttcaccagccgtggctcccttctgtggataatccctgtgtggtttcttctcatgaggctcttcagggttgttatgtttctaatcttcttcagcctgatcgaatgtgttgggatttggagcttttagaggatttatttgagtccagagatgtggatctcatttgtaaaatcccgctgcctgcattgcctgaacttgatacatggtattggtcgtttgaaacttttggtgattattcggtaaggagtgcctatcgtgctttacaagtgcgtaatggaagatggaattcgcaggataattctggcttttggagaatgttttggtacttaaaacttcctcctaaagttaagaatttgctttggagggctcttaccaattgtcttccaactctagtctctcttcaaactaagcgggttcatgtttacagtatttgttc

SEQ ID NO: 159716 - DNA, 593 bp, Cannabis sativa
ctggtaaaataattccaacactcgatcctcgcaattagagtcagaatcatccccttttttgtctctgggagaccttagcaatgtctttgcgtagttctgccaattcagctaaaattccttcgttcaaggtgccttcggagactggcgatgcgtgttttttcttttcaagatggtttcttaaatcaccatgcttctcgttgatattctgtcttaaatcagccggagaatacctccgacttttccccctttccatgggttcttggtgcacggatatgctctttcggttctctcgatcctgaggaccaagactcgctcgagggagcttgcccctctacggacctttccctttcgagaaatcagagcggacttttcgcggaacctgtgccttattttttctcccagagatcgaagtatgatttttctcaaggttctcctcggaagggtaccgtatagggcttagttccctggtcttaggcctctgagtgcttggcgaggattctccttgtatttcctttggtcctacggggatggccttgggatgtacatgtattccagccatttctatagctttttgcatggcgaccattatctct

SEQ ID NO: 159717 - DNA, 1669 bp, Cannabis sativa
  modified_base (1460)..(1463): a, c, t, g, unknown or other
tggttaaaaacttgtcaacctcttgttttagtgacccttgcctcttggaatccaagggcctccttgcaccagcattttctttagagtctccttataaaggatatttaccgagctcccgttgtctattaacactctcttgatcattttattggtgagctaaatggttatcaccaatggatcgacatgaggatatctcacgtttttctcatcttccttcgtgaatgtaatgggaggttgctcggttttcaccttcttggaaggttttggggcaaagaccgactgctcgttctttatttccttcacatatcttttctggatgttattgctttcccctacgatatgtggccctcccgaaataaccaggatgtcctctccttccacaggaataggttgtaacccctgattatttgggttattgggaatactgggctggttgtatccctggccctgtcttttcacgtactacttaaaaaggcttcgggcggtgagactttctatctcgtctttcagttgacaacattcgtcagttgtatgcccaatatccttatggaatttacaatatttgttaggatctcttttgctccttgaattcctcataggctcgggtttttcgaaggctaccttctgctcatgtgcgaggtaaatattctcctgagtttcattaagctcggtataaataatatacacgggcacgtatttgtcatgcttcttttgtttctttctatccttcgacggttccttaatttcgtcatttctttttggaccagaagcccctgagttatcaattctcgtggaagcagttcctgttgaatcattactgggtttacctcccgagcttgttttcaacaagttcatttcctttcggacttctttcttccagacaaacacctgagccctcttgttgaactcaatgatgcttcttaccggatgtccttgtaaatcatcccacaactcgccccctgcggttaatggatcagtggagatccccgcctgaagggctgtaagctgcgtgctgtcatccaaatttctaaccctagcggaagctgtgctaaaatgacttaaatacgccttaagtgtttcgccaggctgttgttttatattggttagcgaggccgcttcgagtcgcctatccttaggagcctaaaattgctttttgaaattcctggacagctgctcccaggaagttattgaatgatgagtaaacttgttaaactagctactcgttgccccaacaagcgaggtggagaacaaaatacagcgtaaattgttcgtcacattactcgctcgcattatcgtgttaaagttattcaaatgcgagaccagatctgtggttccgtcatatgacgagacatgcgggtttttgaatctcgaaggaaaaggggtattcataatatctgggtgatacggctcaagctcctcatcagagtcgtatcctgataatttccctaattcccccactnnnnatctcctgaacttgtcctccagcttgtttattcacaattgaattagatcctcttgctttggaccaagctgttggtgaaggtcaggtttcttctgattcaagtgctctcgtagatttggttgggagtaattattgatagatcttgtcttacttatagaccgcgtcctactcatagactttgtatttgagtgactcgcagatttactg

SEQ ID NO: 159718 - DNA, 529 bp, Cannabis sativa
ttttttttttacatttttaaggtttccatacaaacaacacaataacatgaaaataacatctaaataacattaaaataatatcaaaaaataacatacagataacaaaaaatcaataacaaattaaaaagagttaaacataaaaagaccgtattttctgtaaataaaattaaaaaaaatcgtaataatatttaaaatttcctgaaatcgtatttttgtaatttttttttgttgtttttgtgtattgtgaaataatcccaaaaattattttatggggaaaggaaattaagaaatgtggaaaaatagtttagggtaatccatgttctactgttttttttttccatattttttaatttcttaaaaaaaaattcccttagaataatttcttttgataaaaaactcataatttgcataaattatataaaagctcacaaaatgtttaaatttttcttttttgatcaagaataataatctttctattaatcaaacaagccatttacaaccaaatagggactacacccacaaatttaca

SEQ ID NO: 159719 - DNA, 719 bp, Cannabis sativa
tagtgtcgtgtcttgtaagcatgaagatacataggatatatctctaaagtttttcaactcgcatcccctggtcaatgcttatgagccacctgcttaacggaagttggtcgggtgtcttcgagtaccctgctcagatattacaacttctgtttatgaccttgagtatcaaatctccctgtacgacttattaggaataggattgcctgtctaggttatgaaattagttccacgtgtcacctagatggatgccacatcatcgtgtataaatttggataacatctataaccactttttaaattcaaatatttatctaattaaattaattaaataattaattaaccaaaaaatataaaaccaataggagcaccctacactagggtaggcgcctaccttgtcttatttaggaaaagaatggtatcttttatcctgataacttttgtctcaacaaatataatcttgataatttttgtcttaacaacttttgtcttttctttatttaattaatttgaaaaattatttatttttttataggaataaataatcactattttgccaattcaaaatagatttttcctgaacggtattatacaactatgtatccctttccatgattgtattttgaggtggcaattcggggaccatagacttatattctaagctccaataaactaaattatttattgagtctcatcaaacaaataatctttgtttattaattc

SEQ ID NO: 159720 - DNA, 508 bp, Cannabis sativa
ttctaacatcttttctgtggttagttgcatctgatttcgctaaatcttttttagtgccatgtcagctttctggtgtttgttagattgtgccagctgtacttagttggttggttagttagtctatttttatctccaggatatatattctgttgtgtctgttgttttaactaactctcttcggatagaattatcttcttgattcttgctctgctagggcacaatatatctttgttttgttttgttgtttgcagagagagattctagagatcttcctgaggttgaagatggagtttgattccgctagcttgatttgaagggagttcagattactgtgctgaaggtggttcagctgtgtgtatgctaagtgttcttgtgtacagagatctaaacgagtttagatctcatagcttgaggttgttcaagtgttaggtaactttgtataaaagtcaatttagattacattgtttgatttgaagaatcagaactggaatttgtaattgaattgatt

SEQ ID NO: 159721 - DNA, 563 bp, Cannabis sativa
  modified_base (323)..(334): a, c, t, g, unknown or other
  modified_base (518)..(535): a, c, t, g, unknown or other
gtctttcttatctatttgtcacccactttttctttctgttttaattatgtaaaaatatttagaggaacagaaaagtaaaaaagtgaagataatgataattatgatgagctagatggaaaagacgagaactagaaagaaagcttctatatttataaggcaagattatggtatggcttagaaaaagttttttaacggtagggaacatttttttaaattttagatcatgtggttattatgatataaagtgtatactcttatcttaggactgcttgtatacaattaaaacattatacatatcataataatatttatttttttaaaannnnnnnnnnnnttaataattaaaaaatttattattttttattttgaattattaatatttttaataaagttaatttgaattatttttatattggtatttattttcaaaaaataattgcttctcctaaacttattttttctagcttctcatttttgggcttttcaaaatattctattggtttttttttttttttttnnnnnnnnnnnnnnnnnntttttttttttttttttttcactgttag

SEQ ID NO: 159722 - DNA, 534 bp, Cannabis sativa
attcttgtaaatagtaaatatataatttaatacatatttgatattaattacattgcacatgtggtgggttttaaatttcagatttggcattacattaaataataatatatatgagaatttcgaaaattgtttaatatttaaacatgcatagaaaaagggagaaattattatggtgaacttttttcgataatataacaagagtaagattcttgtaaatagtaaatatatacttgttcgtcattttcaaataggggccgaaattaatacaaaatagtaatacaagtagattatgaaattatataaaggatggaagaaacagtaccactaccatctccacttctagtatcgcaaaagcttctattgatttatggttatttagattttggtaaagagtatgatgatagagatggtgaacatggcgtggagaagaactcttgacgatactcttggattactactttactataaagatattattgtattatattttcatcaatttcttcttgttcccctgatatttataggaaatacaag

SEQ ID NO: 159723 - DNA, 518 bp, Cannabis sativa
ttaattattaattattttttatttttttattttttattgttttattattaattattagttattgttttattttttattgttttattaattatagttttatgttttattgttttattcttaattattatttttaaattgttttactttatcattttatttgttaaaaaagtaaggtgtgtggtgtctaacactttttcaaaacaatacaaaatatttaattattggtttttttttttttttgcagagacctgcacatctaataattccagtgtcggagcattacacaggccgtgtcacatggcgcggcgttagttattactacccaaagattaaggccaaatttgaagaatttaatttatgggatagggtgagggaatcctttcaaacagttttttgagagagagcctttacaattttcaggatcattgattcatgagttgatgttgcacaaaatcaaatctgacaagccggacgaggtacatttttatgtgggaaggaagagatgtagatttggtggg

SEQ ID NO: 159724 - DNA, 511 bp, Cannabis sativa
gtaaagggtacatataccatatgggaagactaggtgttgcagatatccctgatcttaaggagtccattttgattgaggcccatagatccaagtttgctgtctatcctggaagtacaaagatgtactaagatttgaagagataatattggtgggaaggtatgaaaagagatgtggctagctttgtagctaagtgtatagtttttcagcaagtaaaggttgagcatcagagaccttcaggtttacttcaacatttacctataccaaaatggaagtaggataagattaaaatggactttgttactgggttgccattgacacctttaaagcatgaccctgtttgggtgattgttgatcgtttgactaagtctgctcttttttttttccaataaaaaaggattgcaagcttactaggctagctcgactttatgtagacaatatagttcgactacatggagtgccttcaagcattatttttgatagagatccgcaatttacatcaaggttttggaag

SEQ ID NO: 159725 - DNA, 570 bp, Cannabis sativa
tatgcaccgaacatgatcaacatgactctcatcagtataaccaaagcaggcaattaataagaataacaaaagaacatattcttttttattttctaaaaattcgacagcataacggctgtatatttaataaactcaaaaatcataacctgcataaatttttgtacacaaaaatatatttggcactcagtgccccagaacagtttagaaaaatatacagattaagtttttaattttttaaataatttgcaaatcataaaaatttagaatatgcctaatgttatacaacacatataaaaattaagtccaataatcaagttcagtccctacctctcccaaattgtccaaaagacgatcttaagctctcaagtctcgagctccaattgtttagtccaatcttagatattactctcacctataccatcaaatggttaaataattatcatcatcgaattctacattcaaaatcgattccaacgacgacccaatggaggcttgaaacagggatgttacaaatggtatcagagccttgacccaaccggaagtgtgctcgacgaggacgtcggaccccgt

SEQ ID NO: 159726 - DNA, 509 bp, Cannabis sativa
atctgatccaatggatgtattggattagattggttccaaccattggatgtattaattggttttctattggattgtgttatccatccaatctaatttagttaccatttaaggtgatttcattaaaaaatatatatataaaaaaaaacataatttaaaacctaataatctaacatatataataaacattaatttagcctaacttaattctcatgatctcataataaaattgctaaaaaataaaatttattcaatactgttgaaaattttattagtgtttaggatgatgagaattaatattttagatttaaggtttctctctttaatctcatgcgtgcaggtgcacaataagaataaaattaattaatatttattaaatatataaaattgtaaatgtattttaaaaatataaaaatataattaaatgactattggataataattagatcggttcgatttggttatccattggatcggatgttccatccaacaaccgatccgattgaattttc

SEQ ID NO: 159727 - DNA, 612 bp, Cannabis sativa
taagtcattagacagcatgaatagcgggctgtggaaaccggcactttaaccccctgactttgaccttgtcgtcctctctttctggccaattggccaagaattctaaagctaaggtttggttgtttcgcttagtgacatccaaaaacttagtccaatgcctatttatgattttctctctgataggctcaaatacagcatgaatgtttctagtttgtctagggtcaccaatgtctatacccctatcttcgatgaagggtctatctttaagttgcagaaatcactcttgtgcctcaatattcacaaatctagccctctcaacattagagcgacccctaggtgggttagatgaagaagctccccctctctcacttactctagctcttttaggacccatctctcaaaaattctaacactcaaaatttaagaaaagttcggcagcacttccccttaaaaattcactttccgggtaacaacccaatcacaaatagcacacttctaagtcacaaacaactcttcaaaataatgtaatgaacaatatcccacaaatcacaataaaatttcaagattctccaacaatccaaaattattcactaataattgcatagagagtct

SEQ ID NO: 159728 - DNA, 553 bp, Cannabis sativa
  modified_base (260)..(262): a, c, t, g, unknown or other
ttttcaactttaatcaatttttcaaaaaaaaaaaattcaaaattttctacattaaaaatgtaatttcgaatttatatataaaatgattaataaaataaaataaaatatactttgaaaattattcaaatttaagttattctgaaattaaaatttcaaatttaaaataatttctattaattaaatattctgaaaataacaatatttaagtatcaaaaatgaaatcaacttgaatattcaattttcaatttaattaaatgtannnaatataagaattaaataatcaagtataaaaagaacttaattattaattctaatttaatagtaggaaaaatattcttatttaagttggtttaaaattaattttcaacttaaaatattttcctaattaaatataagaaaatgtaattagctacttgaaattactatctagaatatatctcaattaactaagtgttttttaaaaaaattaactttataatgttcaatgaaaaataaattttatacattttacagttaattatgtttctaattcaattttaattaggttagacta

SEQ ID NO: 159729 - DNA, 708 bp, Cannabis sativa
tttcttgacttttttgttgaagtatcttgttacttggtgttggtatgcggcgttcgtaatttgcgactcagctcgttttttctcaagtagatccaaggacaattttaaaagttcctagttttcttcttgattataaaactctcttctgtgagtcaatatgttcacttcaacaagtagcactgctttcgagccaaatgctagcgagaaaggagtgtgtctcgtggctgtcttcttagtagttctgtgggcccagagtacctgaggtagctcgtcaacccatctgcctttggcaccgtctaacttcttcttgatagtatcctttagggttttattgacggcttctacttgtccatttgcttgaggcctggatactgacgagaagcttttgataattctattcctctcgcagaagtcagtgaacaagtcgccatcaaattgggctctattatcgaatactatcttcatgggaattctaaacctacagataatattcttgacgacaaagtcaaggactttcttgcaggttatggagacgaggggctcagcctccgtccatttagtgaagaagtcgactgctactaccacatacttagctccacctcacccaatggataatgccccaattagatcgatcctccatatagaaaatgggcagggcgaggtcatcattctaagttttgttggcagtatgcgaggtatatgtgaaaa

SEQ ID NO: 159730 - DNA, 534 bp, Cannabis sativa
tgccagcgctaggggcatagccaacctgtacgctacttgccctatcctctcgaggatttcaaaaggtccaatgaaccttgggttaagcttccctttcttagcaaagcgtttaatgcctttcatcggaaatattcggggaaacaccatgtccccgatctaaaaatcaatatcctgacgctttggatcagcataactcttttgtctgctctgagtcgcgagcattcacgctctgattttatcaactgcctcacttgttctctgaagagcctcgggacccaagaattttctttcacccacttcatcccagtgaataggtgatctacattttcttccatataaaagctcataaggggccatcccgattgttgcctgatagttgttattgtacgagaactcgatcaagagaaggtactttacccatgatccttcaaactcaagcacacatgcccgtaacatgtcttctaagatctgaatagtccttttggattgtccatacgtctgaggataaaatgttgtgctaaactttaactgagt

SEQ ID NO: 159731 - DNA, 503 bp, Cannabis sativa
ccatcactgctttgcatggtcccatgaggacatgacaggtattgattctaacattattgttcacaagttgcaggttcaccctgattaccgaccagccaagcaaaagagacgtaaatttgcacctaatcgcaacaaggtgataaatgaaagatacaaaaactcatcgacgagggatcagttagagaggttgactatccagactggttagcaaacgtagtagttgtgaagaagaagaatggaaaatggagtgtatgtatcgactttacgaatctcaacaaggcatgtccgaaggattcgtttccacttcctcacattgacatgatgttagatgcaacatctggacatgaattgttgagtttcatggatgccttctccggtcataaccaaatgttaatgcatcgcaatgatcaagaaaagacatcattcataactgagcgagggactttttgctacaaagtcatgccgtttggactaaaaaatgcaggtgccacgtaccaaaggct

SEQ ID NO: 159732 - DNA, 534 bp, Cannabis sativa
  modified_base (198)..(199): a, c, t, g, unknown or other
attaatttaaattaatttacaatacaaatttaattttctataaatatgtattgcattttggaaattaatgtatttaaaataaatacaatttttgaaaatgctatatattaaaataaaataaatcctaaaatattattctaaatttatgttggtccaaaattaattaaaaaattaactttcaacacaaatataattttnntatttaattaaatatttaagaatattatcaaatatttaagtatcatgatgcaaaatcaacttaaatattaatattctatttaattaaatatcactagaaaaatacttcaagcaaacagacaataattatctagactttcattgacgaattaatttattttctaattataatatattttagttaatttattttaattaatcatttaaatgaaaaatataatgatttaagttggtctaaaaattaaataaatattttccaactttaatctatttttcaagaaaaattctaaattttctacatttaaataaaaaatgcaatttcaaatttaaaaaaaa

SEQ ID NO: 159733 - DNA, 500 bp, Cannabis sativa
gctgacgacgtcgaggaaagaagggagtgcgccttgtcccgaatgcagaattactgttccgcggtggcaaagcaatacaataagaaagtaaggcccaggaatttcctcccgagggaactagttctaagaaaagtttttcagaacaccgaagaagcccgagcgggaaagttatccaccaactgggaaggaccataccgagtaataagaccgacgggaaacagggcgtacagactgtcctctatggacggaaccgagatcacaagaagctggaatgcaaggtacctcaaaaaattctatgtataaactaaatgctaggaactccgaatttcatggaaaccgtcgtcgaactttctctttaaataaataaaacaaggaattcggaaaaatataatccaagtcaaaaacgaaagggataaagaccttttacgacaggcaacaaaaaagaccttttacgaaaggcaataaaaagaccttttacgaaaggcaatacaaagaccttt

SEQ ID NO: 159734 - DNA, 558 bp, Cannabis sativa
agagcaaacaagaaagcacataatacatttagaaagaaacgacaaccattaattgacatgactcttcaataagaaaaatatatatatataaggaacaaattaattgaataagagagacatacctgtatcttcaagctctcaaaggtaaaaaaaaaaaagatgaataatgaggcggttaaaggtagaagattagtatgtaatgtatatataatatataaaatatactactttactattaatatatatatatatgtgatataaataagggaagcctttttatttttttgggctgatgtttttggcccaagataaaatttctaaaaccttaatttctttgccatcaaattaatgttggatttttttgtttttttttttgttttttgtcttttttgttttattggttgatcttataggtcaatgtatccagccacaacctttctaaaaataaagggttcttttaaaaaattctactaaataaaaaggaaagagtgataaaagtgaagggtgataaattaagagagtgatcacatgacatcattcaccttatttgattctttt

SEQ ID NO: 159735 - DNA, 501 bp, Cannabis sativa
  modified_base (293)..(293): a, c, t, g, unknown or other
acacggtcatctacctattactttttgtagatgacatacttattataagtaaggcgagatctcaagtggatgagataagaggcaactcaaggctgagtttgagaagaaagacttgggaatagcatataagatactgggtatcactataaagagggccagaaagttgggcaaattgttcttgacacaagaggactacattcaaaagattatagagaaattttcaatgaatgattcaaagaaaacttctcattaaataaatagccagtacactttaacaaaggaacaatgtcctnagactgaagcagagaaggaagcaatgagtaaagtgccttactcaagtgttgttgggactattatgtacttgatggtttgtacaaggccaaatcttgcctttgccataagtaccttgagcaaatacatggcaaatctaggaaagattcattggtttacaatgaaatgggttttcaggtacctagtaggaacacctaaggttggactcat

SEQ ID NO: 159736 - DNA, 533 bp, Cannabis sativa
ttaccttaaaaaaatttccctaaatttatacttaccaatatttctagcatatgataactttagtgactgggtatcagacccatctgactgggcattggactcggcatcggattgggtatcggacccatcggacttacacatatttaaaccaattgaagggcccatcggacccatatcggactagcatcgaatccaacgggccttcttcttcttcttcaaaattttccaattttacaaatccgacataaatggttaacactttcggatccaaaaaagaaaataaaaacacaccttcgacattgttatgcatggcatgcaccgtgtgggtcgtggatccggtcatcgattgcctcgtcgatagggtcgtgggtttggtcgtcgattgggtccaccgtgcgtcgaatggggtgctgcgcgccgtcaccgtgggtttgagcgtggtttgagcgagagggagagagaggaggctgattggtttgggatttcaaatgtgaggggtattatgggggaaatggtaatgtggtcatatatgg

SEQ ID NO: 159737 - DNA, 549 bp, Cannabis sativa
  modified_base (99)..(99): a, c, t, g, unknown or other
  modified_base (415)..(419): a, c, t, g, unknown or other
gtgtaaatcccagaattgtgactatgattaccggcacttggtcaagagcacccgggaattcggaatctctattattgcggaacatcaggtaagacagtngttagcacgtagagttatgcgcagctacgcttatattggaaatgatatatgtgagtaattagtaaccgagattagggttattaccctaacatgagcgatttaatagcctagggttattaccctagtgatatatgttgtgcaaatgctatggcatgttgaatatatgaatatattgagatttagggttatgtgttcaaggcataaccaagttggactcggtaactagaaccgagaggaacctttctaaagtcttattgtatttagacgtgtgagcgcaacacataggtctacgttacgtagacataaataggcatgnnnnngtaacatgcaggtctgtgtcatacaggcatatgagaatggcattaatatttatatagtgtgataaatatgtttattgacatattatactgtcttgttgggcttggctcacgggtgctctactgtgcagga

SEQ ID NO: 159738 - DNA, 680 bp, Cannabis sativa
tgcggattggattagattggatcgtgcagattagattggatcgaatacttagtgaacacccctaatgagttaggtcgatcttaagagctaagatttttaatcttccatagttacatattgctaggacaacatctaatctaatctaattaactgaatttatccaatccaatccaacaataaaaaaattaaatatttcattacaattgaattgaagtagatgttaaaagttaaattctaattggattggatcagttattggatgtcaatctcaaaatttaattatatactgatccaatttaattatatttatatgcatattaaaaaaattgtttatatttagttttataataaaaaatattaaaaaaataaaaacatatattaattatatttttagtggtttttttttttaatttgtaactataagttatttttgtgtatttattcatgatgttttgttctattttattacttggaaatgttattattttagttattttaaacttttagttacgttacacttgtaaagatgatgtttttttatggagtattaaacatatatatttttatggagtgttaaacttagggtgcgtttgttaacatttttttaatcaattttttgtttttaaaattataaaagtaaaaatatttttcaaagtcatgttctataaaaatatttttac

SEQ ID NO: 159739 - DNA, 698 bp, Cannabis sativa
tcgggttggatacacccagccattttttgagatgtccttctattcgcacacctgcgatttcgtgtcttggtgggctgattggttttcacaagaatctgaatcggccctctaaggagattgtaaatttaatatgcgggtgaggtcacttattttgtttttcccacattcaccaccctgaaaagatcttctatctttcagatgagcgatctgtcggacagccaaatgcttggctcaggaggcaacgcattcgatggcgatcaggaagatagctttattccaacttcgatctcagaagaggaggtccctaatgccggagacacagagctgtgtccgttgtcctctgcagacatcgagaggatggtgcaggagctcgctgaaccaggaactatcaatattcgagacagcgagtctacggtgtcagtccgtgaacaccttattcactccaggcacactcctgacgtcgaagtcgaggagatgggtgaagattgggaggttcctgatcacggatctaacgatgatggaaataccgaagggagcgagtctgatttagttgacaatatgcaactaaatgagttgttctcctctgaagacctagtctcgtgggtcaccaaatctgacctaaccactttttcaagattaaatttattgcgtctcggcaccatgcatcctcatcctacccaaagaccacaccttccttt

SEQ ID NO: 159740 - DNA, 545 bp, Cannabis sativa
  modified_base (44)..(74): a, c, t, g, unknown or other
tccagcgacggtttcattagatatcttacaactagaatccctcnnnnnnnnnnnnnnnnnnnnnnnnnnnnnnnagccccagttagattcaggcatgatacacttttagttattgggtaatatttctggccgaccatgatgaaagattcaaaggcctatctaaggaaatgtgataaatgccagagatttttgaaaataaccgtgcaccgcccaacgagctaactcagatgcaaagtccttggccttttgctatttggggaattgacctgatcagacaattgcctaaaggtaagggcggagtacaatatgcagtggtcgcagttgattattttaccaagttcatagaagccgagctattggcaacaattacatctaaaaaagtattggactttgtggtgaagaatataatatgtcggttcagactcccgcacaaaattgtctcaaacaatggcaaacagtttgacagctaattgttcacagatttctgtacggatcatggaatcataaaaagtttctccgcagtggcacaccctcaatcaaatggt

SEQ ID NO: 159741 - DNA, 620 bp, Cannabis sativa
catgcatctcaatgctctaggttgtaacttatcttgtctaacatgcacaaatgcagtacatccaaacactttcaagtgatctaagtttggaattttacctgtctataactcttgtggggtcttgaagttgtttggcacaaatgatgatctattgattaggtaacatgcttttttaagagcttctcccaaaaggttctctccaaaccagctcatagtaacatgcacctaacactctcaatcaatgttctattcatcctctcagcaacacaattttgctgagggattttaatcacagttatatgtctcttgattcccattttggcacacaatcccctgaactcatttgagcagtacttaagaccattgttagttcttagtaccttgattttgttcccagcctggtctcatctttgcttttcaacaaataaacccagactttcctgctgtaatcatcaattatactcataaattagtgtgctccacctttggttggtatcctagatgtcccccaaaggtcagaatggacataagctaacctttctgtggtggtgtgttctgccttgttgaacttcaatctacaagccttccctaaaacgcattcatcacagaattcaagtctt

SEQ ID NO: 159742 - DNA, 550 bp, Cannabis sativa
aaacatatgaataagaatgagaatctagcgctgtaaccactttagaagcccaaaccgtaaatttaaaaaaaaaaataaaaaaatagcatatggggtaattccctaaaaaaaattgataaaaattttatttatttatatttcttattatgcatcggaatggtctttcttttcattttaaaatggaatagttattctaccaaaatagtataaatgtcattttattggaatgacattgtaatactttaatatgcaaccaaataaatgaatagaatgtaaattattttattttaattttattatatttctattttttttttaaaacgaattttattctatttcattacctccaactaaacgccaatatttttccaaacactcaatcaaccggtgcagccacgtgacttagaatgttagttcaaatcggaactaaacatttagggtttgtttgttacgccgtattacaccgaattgtattgtatagtattatattgaattatattttatgtaatatttttatataaaattttatgtgatattaacttttatgggc

SEQ ID NO: 159743 - DNA, 552 bp, Cannabis sativa
  modified_base (428)..(434): a, c, t, g, unknown or other
agagtgttatgggcctaccggacgacccccagaaccacgactggccactcgcctttttcaatggcgtactgttgtgaagaaatggtctcggtagaaacgttattttcgtcccacaggtgaacgacttatgatccagatacaaaccaagctttattacaagaagtgctggatcaggttgaagagctccgggacgagtcgcaaatacgaatggcagcttatcaaaagaaggtaaccaaatattttaactccatatttaaaaacagaaaattcactattggggatatggtcttaagaagagtcttcccagccaccaaagaacccggagtggggttacttgggctgaattgggaagggccatatgaaatcgaggacgaaatcggctccggaacctataagctaaaagggatggaaccattgtgccaagggcnnnnnnngccgatcacctccgaaaatattactaatagtccaaagacgttaacttaggctttgtttaaaggatttgtaccgtctaagtgtatgcaacctctgaattttaaataaaactgagtgcct

SEQ ID NO: 159744 - DNA, 639 bp, Cannabis sativa
  modified_base (52)..(57): a, c, t, g, unknown or other
tgtaattaatggactaaatttgtacaaattaaggaagggtataaattttgannnnnngtatattattaagggcaaatagtgaaatttccctaaataaataagactagttattttttcaatactttgtatttttcaaatacctatatggaaatatggagaaataaagttattttttcttgccactatttttttgctttttcaaattttattctattagcgtgtattagaaatagtttattttttaaaataataattttaaaaaattagaagtttataaaataggtatatgggtatatatataccttgtaaatgatttctttttcttattagtcatcttttttatttggggtatgatatttgggtttgagagagtttatgggtatttagagttttctttaggtgattggtttattttgcatgtatgagtataggcatagtataaacatatatgccaaataaatttatgagccaaaaatttcatgtaaggcatttcatcatattcaacaagtgcatatattgttatccacgtttattatgtaagacatgagacagtcatgtactttgtatacatccaaatttgatgtctagacttgaaaaaaaaaatagactaattactttgttattttatagcacacattg

SEQ ID NO: 159745 - DNA, 526 bp, Cannabis sativa
tagattaagtttagtatatttttaatttagttctactcagaagaagattagaaaatatcaaaggaataagatgaaaaaaagataagaaaatttcacaaaaatatgacatataaaatagagaaaattgtgtaagaaaataaacccaaaacttcaagcctgaattcgactatcttttgattagattttggaaaaagtctaaacataaaagttctagatctctcttttatcttttcggaacatcttgaatcgtctaattctaagcaatatcgagagagttatgaccaaaataatattattcgatatagtagaaaactcactaccctttctaatcctaagcagaataggttttttattcaacgatttttctatttttttaatcattttttggatataaaagaggtggacttcaataatttttgggagaagcaattgagaggaaaaaaagagtacgaatttcaaagacagaagtcaatattggaggcattttgcagagggttttcaacattattttattctctatcttctt

SEQ ID NO: 159746 - DNA, 840 bp, Cannabis sativa
tatattagttaattttaattaattatattaactataaatataatttttaccatagatatataaaataatattgttttattgtgtaaattataaatgtgagaatttcgtcattaatgggagataggagacattaataatgaattgaaattttttgattttatcctataaaatgctgaaataaatggacaataaagcttaataagtatgggttttattattttttattgtattgaaagatactaatatgaatagctatatatagtattaagaaagcattaagatatatattacttacagttttcctttcctcttacatctatttatcttaatactactttaagtatattataatttatttaaaatgcagtcaactccaatagagtcaaataatagtgtttatcctgttgataatgtcaatcaagaaagcttagaagttttcgcagttatttctggaagatctttatcaaacaagacagtcaacttctattattgatataatagaaatggatcaagtggtaatttcattatacatatatggtagggtttatgttcattgttttttactaaatcacatactaaaatttattttagatgatatggtcttagtaaggtatagtgactttaagaaggttatgaagtagagtgttataattcattgctactagccaaagggtataatttttagtggggtttgggttgcttagttcttgttgtttggtagattcgggttaatttgataattttttaataaaagttttattctgattttctgctatttttcatgtatatatatttcaatgagctatgagcattgtttgaagatgttatagctttattgtc

SEQ ID NO: 159747 - DNA, 500 bp, Cannabis sativa
  modified_base (274)..(285): a, c, t, g, unknown or other
tttatttctaagtagtcaccgtaaaggagagtctaatagaaatgaaaacttacaaaatacatatcatacaagatcttacggtgttcaatgctttaaacaaataacaatctataagggggacggagtctagcgtctcgaagttatattgaaaacaattaaccattgtaagaccaacagtggcgatcgaatatctctttgattaaagctcattatttaaaataatatatttttaattaatcatttattttaatctatatattttaataatgaaaannnnnnnnnnnnagttgatccaaaattaattaaaatctaattttcaactttaatttaattttctaacaataatttcaaaaatctatacatatataaaatatttaatttcaaaatatatataatcaaatacaatagaatcaatttctgaaaaacatctaatttaagttgttctaaaataacaaaattttcaacttaaataattttcaaaaatttaattaaatatcaaa

SEQ ID NO: 159748 - DNA, 590 bp, Cannabis sativa
  modified_base (369)..(376): a, c, t, g, unknown or other
gtgattcggtactagtttttgtttttgttcttcatttgatgaggaagaaagagtggatgagtttggtgtcgtcggagttgtactgttcaaaacctggcaagggaacagtcaatgaaggtggaagaggaagcggtaccggcggcggtggcagtgacaacccaagtagatggttattattgatagggtcaaatatcagcatattattacattattggacttttcttcttgtaaaggaaagtagaataaagatgaacaaaaatcttgattattattattattgttattaatactgattcccagtaaatttatggaccataaagatgatgcttgttgttgttatagcgtaatactattattattattattatnnnnnnnnttattattattattattgaaatgatattcttattctactaatactgcacctgctgttgttgatgaatttgccataataatcgaattattgttgttgagcacttctttattttccattaatttagattaataaaaaaacaacacatattatttatattatttttatttatatattattatttctatatatttattaatttatttttttttatttt

SEQ ID NO: 159749 - DNA, 709 bp, Cannabis sativa
atgtgactctcttatgtcagggtattttgggtacaatacacataaaaagatgtatgtttcaaataaatataaaaaaataagtaaatataattaattgattaataaaagtagtatttttcaacttacgagttgtgagaaaaaattataaagtatatatgtaatggaagaagaaggcagcgcagcaggaggcgtgaaaaacaacttgaagcaggcggcagtggtgcttctagtccagaaaaagagaaaaatgaggaaaaagaagaagaaaaagaaagaaaaaaaaaaagagagagacatttttgagtgttatttagggttttagttttgcattttatttagagattgacaaaaatcaagaggaagaagaagagaaatttagagaagaaacttagagtgttatgacaactctaaaatgagtttttatttttatatccctttttttttaactttgtaatttttgcactatctattatgagttaatttttcttttgctagaattattttgttgacttaaattgtgatttggtattttgttgctatatttagtgaattgattttgttcatttaagagtgtttattgtacaattgcttacttttgcttggtcaccattattaaatagtagctaatcttgattttggaaaaaatagggttagtggaattgcttgaatgatgcatgaatatcaacttggaaaagtgtgatttttaaat

SEQ ID NO: 159750 - DNA, 566 bp, Cannabis sativa
tatcttttcgacaattttcttgtcataatcagtgacaagtttcattctcttggtctgagatttgatccaaacacggtggcatgggaaatcttgaacctcaaggtccctgttttggccgaaaaacagtcaagatttctttttaagggttcttcttatttttttcagttcctaatcccatttcttttacgtgatccttctttatatatcctctacgtcttttttgcttgcatgggttatttttcctttgccattattttgctgacacgtgttctttttcgttcattctttttgccctttgccacgtattcatgttttaatagcttatctttcttgctacacgtgttagcacctttagtggatttttagagttataattctttctaacttaggtgttgtgtccgtcggcattacagccatgaatgtattggtttcatattttgcgcttcagtttttctccatcgacgctctcaggtatttcttccgtcggaaggatatccaggtgcctcttctggtcctgatatactatttttccttagtcaattcttggtccgtcggtgtctctttcc

SEQ ID NO: 159751 - DNA, 523 bp, Cannabis sativa
  modified_base (442)..(445): a, c, t, g, unknown or other
catcaccaagtgaaccattatgtcaaaaaatgctggtgggaaatggttttcaatttgcaaagaatgtctagaatacttttttgcatgatctgaaagtctataacattcaatgttttacagaatactttcttcaagaactttctaatgccaccgggcatcaagcgttgtagcaagacacgacaatcgtgagacttcagaccagaaattttgtcttcagtctcattgacatttttctctaaatttgaagcaaatccgtctgggaactgcacagacttgataaattcggaaaattcacgtcgttcaagaagagtaagtgtgtaactagcatgtagtttcctcaaattcctgttacggtcttcaaataaccacaactcacgacgtattttaaggtcctccatatccaatcttgccttgactgtgtccttagacttcccctcgatannnnacaaagttccaagtacactgtcacacacatttttctcgatatgcattacgtcaagattatgtcggagagacaagtcct

SEQ ID NO: 159752 - DNA, 626 bp, Cannabis sativa
tggttttttctcccctaaagaagccgaagcattggctattccttatgctttagaatggtgtttggaattaggcttttccgtttcttttgcggagagtgatgctgaaattattgtcaattcagtcaattcttctttagaatgtgcttccctatggggttgtattgttagatctattaggtccttgttatctgtctttccgggtgcatgtcttcttcatgtgatgcaaaatggtaatactgcagcacatgagttagcaagatatgcactacagatggaaaacgaggtttcttagttagaagaaattcctccttgtataatgaccaatgtattgtttgactctcagcaataaaattggttattatgataaaaaaaataaataaataataaaaaaacacaattttagttatataagtatatatatatgtgataattaccttttattattaaaataatagatttataaatttttaaaattgttgaattatatacattcacttacatttttaacattaatttgacacacttagaaacaaactgatttattgatgtgtgagggccatagcctttactaaaaaaatatcacacttaaaaaatatatgtattttttaatttcataattgtaaagt

SEQ ID NO: 159753 - DNA, 584 bp, Cannabis sativa
ttttttttacttgctagctaatgacacacaaaaaaaaaaaaggaaaccaagtagacaagctttatgaaacaattttgggaaaccaatgagaaacaaaataaagaaacatatttgtgacacaaatagggaaactagaatttagcaataacaaattggagtatttttttttaattttcgaatttgaataacaaaaagggaaactaattaacagaaaattttggagacaagaaatcagcaaaaaaattcagagttttgaactttcgatttttttttaagaagaaaagaaaagcaaagacacgatgtttgacacaagaaaattatcagaatgtggttgtaatagttttcagatttcacaaggaaaaacagaagagatgaaacacgaattcacaggaaaatagaacacaaattaaacaagattatagaacatgaattgaaaagaaaaacacaaaagatagataggccaattctgatgatccaaagctctgataccaaatgatacgaaccacaccaacagttgtgatgaaacccgataccaattatggcaacctctaagaattctagaaatttagatgtggaaccgcgac

SEQ ID NO: 159754 - DNA, 623 bp, Cannabis sativa
tcacatccgggacttaggttttaacaaaaaacctatctactgcaacttaatatggcaataccctaaactagcagggaatcaaccaaccagaaacctgaaactaggacgaatcgacgagctgaatttttcgggaaaccctactgcaaaaaccggttacccgattttctagtgaaaacccaaaaaattacaaagccaaatcaaatcgattccagacttaacgaaacttcccaaacctgcatattataccccaataaatcattttcaagcaataaaacagttacccaagctcaaaatccaaaataaccattaaagctccaagtttgagttctaaaactcaatacttggttaaagtaactaacaaccattaaaacaagcttaaatcaacatatccaagcatacatgaacttctgaaaacaaaaccaaacaacaacagcaacaacaaaagctagaatcaccatttcatgccaaacttatttcttaaaactcaagaaaatcaaggagggagttactaggagcttaccttggctaggaaaacacttagagctgttgaaaattgcaagaattgaatcacaaaattcagaaccctagctaattctaggaattttagagagagagagagagag

SEQ ID NO: 159755 - DNA, 716 bp, Cannabis sativa
  modified_base (374)..(381): a, c, t, g, unknown or other
gaggatgacacgtgtcaaccttggagaatacgaatcaacgaatataatgacaattacattaaaggatattaaaatagaataactcaataaatgtagagttgatagagcatatctataattccctgactgtatagtcttaagcgagacaaggatgtacaaactattgattcaagcattgacgagaaaccatttcgcgttagaaaaaacaatcataaggataacatctataatgcatagcgaggcaccaacctcgctacatataaaaaggtgttgacgagacatgttgtctggtagaacacttagcatataatatacattgtacgaagtatcacagctggaagaacctaactgacggatagcgaggcatccatctnnnnnnnngaaggcatactcatggtaccttcattaatcaactacagacatctttcaatgagatccattgctccttcaagtaagctctctcatatggaagctgacattcaaatgatgttaactactgaagttcaccttgtcaccaataactgtgattgtccgatggagcgttatgtcttcaatcacagaaacgacgggatttacgttatcaacatcgaaaaaacataggaaaagctctagctcgctgccaggattattgggctatttaagttctcagcgagatagactttgcagcgtatctaaatccacatcagcaattaacccagtaaaagcggataaatcac

SEQ ID NO: 159756 - DNA, 540 bp, Cannabis sativa
  modified_base (77)..(84): a, c, t, g, unknown or other
tatgtgttaattgatgaatgtatacgaattttttccatgaaaatattttattttcgttttgaaaatattttatttgnnnnnnnngtgaaaaattaagcaattttttttacgaaactcggttccgatgaaaaatgattaagttatggtgttttgaaaatcggggtccattgagtgtcaagggtcgagcatcgcacgcacacgcactcggacaagaagaggttgttcgcgcggatgcttcagacaaatctgatctgaactcggtcagcttggcatcttggacaagggacacgcgcgcacatcaccctgcaagcaaggtcttccgcgcgtggatctgcccattgaacccctcgtgcactcccgtaaagggctgctggcagcctgtctgggctgcacgtgcagcctgctgctgggcagccactcaaaaatctaatttttgttgattatttttcaacaaattttgattttttgcaattttcaaaccctaatttcaaaataaaatattattttcaatatatataaacttaaatatcaattttaaat

SEQ ID NO: 159757 - DNA, 554 bp, Cannabis sativa
  modified_base (420)..(423): a, c, t, g, unknown or other
attttgtgttaaaccttacttgatttatacttattgatatttgtagtacccaatatgactatgaacaaccccatggtgtcactattgactgacaacaggctctctagagctaactttagcaaagggagagagaacattaatattgctttcattggtgaaaatgtcctgtttgtgttaactgaagaggctcctgagcagccaggtgagaatgcgaccaaggcagtcaaggaaaatttcgagcgttggcagaatgataacaacaaagctcgatactttatgctgtctagcatgtttgacaccttgaaaataaggtttgccaatactctcacggctgtagaaatcatgaactagttacctgaactgtttgggatggcgtcaattaaagctcattttgaggcgaccaagaatttcatcaatgcnnnnatgaaacctcatcagaacgtgcatgatcgcctgctcgaaatgactagttacttccaagaggttgagaatcatggagctgttatagatcagacaactcaagtgagtttgatcttgaatagtttgactccagc

SEQ ID NO: 159758 - DNA, 517 bp, Cannabis sativa
tttggtatcagagccaccaagtttatctaccgaagcttgccaagacatgtacaatcttcatcagagaaagctcggctcacggttcagtaatcccgtacatgtttagtattatatttgattattaaagcatgttaggaagcatattacattatgatcatttattttaagtttgttacctttaagtccataagagcggtattaagttttatgatcactctctaaactgcctggcttacgggttcccaggccaagtcctatttaatggacgcccagtgaaatacaagaagtcagggtaatatggttgaccagaggcggtcagggaaatcaaattccccaaaatccccgtggtcgctgtcgtggcccgtggcagagtttagggtgctcgtcttgtaaatcaaccacaagctcctccgaattgggagtaggggtttgcagaaatacaagatcgaatctgccaacaagaagaagaaattctgagatgaaggcagtagggtcttcctgccgtgcctccacaaca

SEQ ID NO: 159759 - DNA, 557 bp, Cannabis sativa
ttttcaattttaaaaacagttacaaaagtgtcttctgtaaagttcatttttatttttatttttttatttaagtcgggtctaggtcttgggcgggttcggatcagaagccgggttcagcaccagggccgtggggagggatttgggtccgggtctggtcataatctaaaagattgattaagaaaaaaattgtttaaaaaaatattaaaagtgattttttttatttttaaaattttgatttctaattataaaattaaaaagtaaaaacaattttacagaacatgtttttgaaaaatattttcactttttcatttttaaaaataaaaaattgattaaaaattgttaccaaacgctaccatagtttttagaaattcctaagagatcagaaatcgtatttttatcataacttttgactcgggtgtctgttttggacattctatacaccgtttcgaagcttgcaaaaagctctacaatatggtatatattttagagccaaaatataagttttaatttagtgtatttataccacggcgtttggtagaaaaccttagattgtctta

SEQ ID NO: 159760 - DNA, 652 bp, Cannabis sativa
aacaagctaaataacatttcactcattaaaaaccaaagtttgagtttaaaactccatacttgcttgaaatcatcaaacaaccataaaaacctatttgaatcatcattttaaaacataactaaacttcagaaatcaacaacaaacacaaacaacagccacatccacaaaattctcaagcatgcaaaatttctcaattcttaaaatttcaagaaaacaaagaggagcttgatcaaatattacctcaactagaaatacaccaaaacttgttgaaaacttgctgaattgaagaacaaaatcaaccctagcagcccctaggattttcgagagagagaaagagagcttgagagaggaagaaatatgatttttctcaacttttctaatttttgagtaaaattaaataaagagtggattttcccaattaataaattacttcagccaactaaacaataataaaaagatttaaacttaataaaaacaatccatacaaacaaagcaggtcattttgcccctccacaccaaaataacataaaagggttacaaagggtattttggaaaattccgaaattcccgaccaatcccgacattcccaatgtctaaataaaccttcccattatactaaaaatactagattgtgattctactaagccataca

SEQ ID NO: 159761 - DNA, 518 bp, Cannabis sativa
gaaatattcagtagcgaccttgctataatatccgagtggtctcgcatcaacccaccttgccgatccattatctcacttatcttgttcttcttttttctcgtcgtttccttatgatggaagtatttggaattattatcctcacatttcatccatagagctctacttcgctacctccagtatctctcatgtttctcaagaattgcattaaggttattttcatcacctttaagaattccccaattatcaacattcattctttttgacaactcattcaccctccttgtaccctcctggactctgtgtttcagttcttttttcttttttctattccaattgtttaatctactcccacacctttgagttttacttttgaaatcccaatctgatgagcgaaaagcccccatgttccaaccgtccctaacaatctcacaacactcttcctcttctacccaagcctcttcaaagtgaaaccgggatcgaagagccttcccctcttcaatggaatcccgtcccccctc

SEQ ID NO: 159762 - DNA, 611 bp, Cannabis sativa
agtctttcttggattcccttaatcttttcagtggtactagtgataatctgaggtccaatagtgacatgctcatctggttccacctaacacaatggcgatcttcatggtctcccatataaggcctcataaggagccatgcctatactggcttggtagctattgttgtatgtgaattcaaccagtgacaagtgttctccccattacctccaaaatccaaaacacaagagcgaagcatgtcttccaaagtctgtatggtcctctcagactgtccatttgtctgaggatgatgggtagtactcaagtgaagttcagttcctaaggcttgttgcaaggccttccaaaaccttgatgtaaatcgaggatctctattagaaataatgcttgaaggcactccatgtagtcgaactatattatctacataaagttgagctagcctggtaagcttgtaatcctttctgattggaataaaattgacaaacttagtcaaacgttcaaaaaacacccaaacaaggtcatgcttcaaaggtgtcaattagggttgtacagaaatttttgtaaaccgcccaactcgaataacccgcccaaaccaaaccgacaaaactgataaaaaa

SEQ ID NO: 159763 - DNA, 517 bp, Cannabis sativa
aatgataaaataataataaaatagctaaagaataaattcatattaaattcagtcttgatagccattcactcttattggtgtcaagtataaattttgcctaataaagtagtgaccaacattgaagcaatatgcaggaactttctatggaatgccaaagctgagtatcatgggctaggtgcaattgcttgggattttatatgtcaaccaaaagcagctgggggcattggattcaaggatacaaggtctttgaataaagcggcaatggggaagtacatttgggctattgccaacaaagaagatagcttgtggatgagatggattaatagtgtctatcttcatgatagtgattggtgggcctatgaaacaccaagccaaaccagctggtattcgaggtatttagtgaggctcaaggatcaatttaaagcaagtccacagtctattatgttgcagcaatataacatcacagctgggtacaagatcctggtgcaaactccaccaaagattcaatggacaaggc

SEQ ID NO: 159764 - DNA, 648 bp, Cannabis sativa
cgtctataaaataatatattaataatatgcttctatattaaattatgagattttatagtttttcaataaaaaaaaaataatttctcatgaataatctaatttagttatgcaaaaatgtgcagttacctttgagattcagccttaattgtcatgaaatttcgagtaatctacttcccttgattggaaatcttagattcactgatgcatttgttgtacaatccaaacctcatgtttatttaataaatattttacaaatacataaatatggctgctttggatggacaatagcagaatcatgataattgaaagtggcagtactaagctctgaatatgaatttggttttgtctgagaaatgatactgacaccgataattgcagctaggcacattacgagagcttcaaaggctctacgatgagcttgttgattcagctaatgtctgtcgattggatagatacacagcttctgagaaagttggaaggtaactcttttgttctcactctcactgttttgaacaaaatttcctgctgctttttgatatagagtggttgttagtattaaattatttttcaagttcccttcccttcattagttgttccctgtttcaaatgttatttatctttctattgcaggagtaggtggctatggtc

SEQ ID NO: 159765 - DNA, 525 bp, Cannabis sativa
  modified_base (291)..(296): a, c, t, g, unknown or other
gttaagattcgggactttgctagggccgaattagagagtcagggtagggctagcttgattgctttttgttaagtgtacactatttttacagattctaacacttaacctttttctcttattgcagcagctgctcccacggatgagatcttggccactcttgctggagcccacagtcctgatgtttcccctcctcctacttcttcccagttggtcacccccgggaaggcttcttccagcgcccctccgggccctactgtcttagtggacgaggaggaggtacttcttgaggannnnnnagaaggtgaagaagagcaaggggtacttcttgaggaagctgaagaagagcaagaggttgctcttgtgcgcaagcgtaagggcaagatggtagaagaggagcattctaaacgcccccagagagtggacactacggccccgagtcatgactccgggatcccctctgaggcggaggaatatacggtgcctcatggcattgtgttgactccgatccccggagatgaggagagg

SEQ ID NO: 159766 - DNA, 507 bp, Cannabis sativa
agctccggtagtagcaggatagcaaatccttgaagagggagagcttaaggtatcgtttaatttcgttttaagattaaaaacaattggtttcatacaggggttttgtgaattagaatagttatgaaggttctcaccttataagattgttctcgggtagtcatgggactatttttgatcttttcttgttgaatttgaggtgaatttgagttagaaattgagtttaaaactttttaaagtttagtccgaacattagtggcgtttttcatttaagggctcgatttttatttctgttacgtaaagatggtaatatttatagtatatatgcgctctatgaagtttaaagtgatttggataagtttttgtagtgtgtgcaaaaattaagattttcgagttttatagtttttagaaattactaggagatcaaaaatcgtatttctgtcataaattttgactcgggtgtccattttggatgttctatatactatttcgaagcttgcaacgagctct

SEQ ID NO: 159767 - DNA, 584 bp, Cannabis sativa
aaagccataaaaaatggcacgaaaatcgtaaaaggcacaaaagtcgtaaaaagcacaaaaaagctcgtaaaaggcataaaaaccatcaaatcattatgaagattattgaataagaaaccataaataaaataattataatcaatatactttaatatatgattttaaaataatttaaaaaagataattaatctatatactttaaatatttttatttgatcttatttataattacggaaaaaaataaaagtaaaaatactatagatatagaaataggctcaaaaacactataaactattttaaaaaagtatattataaaaacaaaagattatataacttaccaaaaattaataataatactactacataatagattagattttaaaagttaaaaactaattaataataaaataatactattgaaccgtcaaataaacaataaaatatagaaaaaattataaaaaatgaaataatataacgtctcatgctaaaaaaccttaataaagaatcttgagactatttaatatacaaaataaaaattacaaaagtttaaaaaacagatattaaaacaatagtaataaatgcta

SEQ ID NO: 159768 - DNA, 610 bp, Cannabis sativa
  modified_base (318)..(321): a, c, t, g, unknown or other
aagaatctagtttgggggaattttgttaggttatatttagcctatgtctcgggtctaatagttaagcattttctcggttattggtgtcttttgaagtggttttacacttgattttccttgtttcaagttcccgaggcattacagttcaaattcagtcaattgacgaaaagacgggacaaactggtgaaaaatcggccaaagcttctcaatgggagtcagtagtcgcgaccactgtggagcctagtcgcgacccttttatctggtcgagaccatggtcgcgacttacgagatttggcagaaactcagttttttgagttnnnnttgtggtcgcgaccagcctttaagggggtcgcgaccaggtacggaaaatgagatttttgacctaatttagattttttcccaattggaggcacatctttcattcctatataaggaacacgattcagaaggccaaagcaagaagaaataggccttaaaagtgaatgaaagaggaaaggacggaatcttgaagacccggagcgatatcaccatctactttctttcttttaccctctatttatcttttatgtctagttttgtttcagaattaatcgtggatgtttttattatt

SEQ ID NO: 159769 - DNA, 625 bp, Cannabis sativa
aatttcgttattgtttttatttcacggtagcctaaatcaaatttttacaagtttttaaagcatttttgaaaaaagaataagattgaaccattttctataaaaatattaaaataatttcgctttgaaagaaccccagaactaaactatttgaataaactgaggagagtaaaattaggtcttccaactctctttcaataatcaacattaaattttagatagttcaatgctattactattttggtgcattctcaatagcctatttatgctcatctaaacactctcaaatgattagtgtgcaataaatagtaaagttatttctgataaacaaacaagtcaggaaagaaaatcaacttaacgcaatcaacattactctaaggtgtattcaccattaactcaatgtgagtgttcatattggaaagaataaaaaaaatattataatggaagaaataataccacccatactaaaagcagattgactacataattaactattcactatttttttttccaatcatactaagaagcaaagagaaattagataaaaaaaatagtgaaataactagaagaggcacaagaaagatgtaaagaccgcttagtttagtttcaaaattagcagttaattatg

SEQ ID NO: 159770 - DNA, 631 bp, Cannabis sativa
gggatgttgagtcttttcctcttcccggacaaaggctgcgctaaccgcattctcggagacggccaagtatagtaacaagtcttctccgaggacgggttttggtaggatgggaggtttagccatgtgttcttttgattttttgaatgcctcctcgcattcttcggtccattcgaatttttggcatttcttcaggatgttgaagaagggaatgcacttgtctgtggatcgggaaataaaacggctcagggcggcgacctttccagttaggctttgcacatctttgtgcttcttgggagaaggcatgtttaggagggcttgaattttttctgggtttgcctctatcccccgctggctgacaataaatcccagaaactttcctgatttaacctcgaaagtgcacttcttctggttaagtttcattccatatctctgaaccatttcaaagcattcctcgaggtcatctgcgtggcttgcacatgcttttgacttgaccaacatgtcatccacgtacacctctatgcttcgtcctataaggcctttaaacatccggttaaccatttgttgatatgtggcaccagcgttttttagcccgaaaggcatgactaggtagcagtatacccccttatcggtc

SEQ ID NO: 159771 - DNA, 754 bp, Cannabis sativa
  modified_base (693)..(710): a, c, t, g, unknown or other
cttcaaggttttattaatagcttctacttgtccatttgcttgaggccttgagactgacgagaagctcttgataatttttttcctttcgcatattacagtgaataactctccatcaaactgagttctgttatcaaacactattttaatgtttattgcaaacccggagattatgctcttcatgacaaaattaagaacttgcaagttatggaaactagaggttcgacctctgtccattttgtaaagaagtcaactgcaaaactgcatactttgttcgcaagttggattgtgattacgagtgggtcgacgtgtggatacctcacgtgctttgtgtcttcctccaaaaacataattggaggttctttagtcttgattttcttagatgattctggaacgaaaactgaccactcatttttgacttctttgatatatctcttatggacattactgctttctccagcgagatgcaaccctcccgagatgaccaaaatgtcatctccttctaccggaggaggttgtaatctttggttgcctgagttattgggcagatttggctggttttgtccattaccttgtcgttttagatactgttaaaattaaccacgcgagataaggttctctatctcgtctttcaactgacgccattcatccattgtaagccctatgccctcgtgaaatttacaaaattttgttgcnnnnnnnnnnnnnnnnnnatgtctcatgggctcaggcttgcgaaatgcaaccctgtgctcat

SEQ ID NO: 159772 - DNA, 520 bp, Cannabis sativa
gagagggataaaagaagggttgggcattaattcaccggaaggtgctataaattacttggggttgcctcttttcaggtctcgttagaaggatgctgactttaactttattctggacaatctcacttataaattgcagggttggaaggctaagactttgtcgaaggccggctgtgctaccctaattaagtctgtgggtttatcgatgcctatatatgccatgcaaaccacaaaactatctggtcgaatggtttcgaggattgatggtttagtccgagatttctggtggggttttgaaagaggaaatcatggtctccatctaaaggcttgggataagttgtgccttcctaagtgtttgggtggattaggtttttggaaaacgaaggaaatgaatctgacattccttgccaagtggggttggaatttgtcatatagatttcaatccttatgttgcaaaattttggaagccaagtaccttaaggggaaggactttctcagatgtagctacaaggactcggattct

SEQ ID NO: 159773 - DNA, 506 bp, Cannabis sativa
  modified_base (29)..(30): a, c, t, g, unknown or other
caccatttgggataagatgaatgaggttnnatctcaaaactaattggcaatagaaggtgttgctcattcatcttatatatgacaatttatttctatgtgagactaactctaatgcaccctcctcacgtttgggcttggaaagtatgggtataacgaacgacctatcatagggccgaacgtgacatttaaaagaatctcacaaagccaaatattgagaaatttgtgagtgtacacgtcgagaaatttgtagattttaaaataagtcaaagattccaatactagaaattgacacacattggccgaaaggtcccaaatagaacttaaaggggagacaacgaaagtatatctttttgaaccgatagcaatttggctcacaacagatcacaaacagatttttagaccgcgttgggctcacaatgtatcacaagtggttctgataccatgttagaatttgggataaggtgaatggggttccatctcaaaactaattggctatgggaggagta

SEQ ID NO: 159774 - DNA, 646 bp, Cannabis sativa
aagtttgagtctttgtgtccaaaatttcaggtgagggatattccatgtggtactaaaggcggtgtcatgattacttttgagaagatagaggtaaattgatgaggcattatattttgttttactacaaagcctaaatttagcatctttataatttgtgaccagctggaattctttcttcaggttgttaaccgccttcgtaaggatcatgtgtatgacactctcatgaattatggagtgcattacgataacacatggatatatgacaagattcatcatgagatcaatcagttctgcagctcccatagtctgcaagaagtctacattgatgtgtttgatcaggtaattaagaaaatttggtaaaaccttttatagatgataatgtgggtagatcattttaattttcactacagttttgtttgcttaggtattagcagctcaagccttcaagtttgttctctatttgttacttgaggtcaattgttaagaaacttattggcagtctaatgttgaatagtttgttaggatactaggttgaccaagtatgagattggtagcaatatgtaactacttgggcaccctcctctcttagctagcttttgggagttagttctgcccaagtggctgtatcaagtggtatcaaagccat

SEQ ID NO: 159775 - DNA, 549 bp, Cannabis sativa
catgggctactccactcattgctaattggttttgagatggaaccccataattctcaacatggtatcagagccatatctaaccccataatcattctactatctacatcaaaaacaacatttttgaacttttgagtacgaatgttataagaaaccatgttttttgcacccaagatttcatattcaaacacatccattagaatctcatcgtccttccaaaatggcagtagtaagtaactgtaacacttctctagtggtccaatcagctcgtatttggtcgaaccacctgctacgcttttatccatggtgaagacaaaaaggaagctcttatcaaaacaagaatctacaacggcaattaaaggttcaaaatctggaaaatctatcatacggaattcctcactactcatatcaaaactgagtatcttttcaattctaggtcggcaaatataccagtaacaaacacctccaaaacatacagcattgcatagttcagcatgcactatataatccattacgtcttgagacatgttgatctctctccaagaatcagaa

SEQ ID NO: 159776 - DNA, 533 bp, Cannabis sativa
aactcggataactattaactaatcctttttagtagttttaaattatttattaacttatgggatgtacattgtagtccctttgcttgggttttttttaggtaagaccatctctaatggaagatgtaaaagttaagctatattttgtacaaatagtagttttgtgatatttttacattaatatttactagaggtgtacgtcggtcggtttggtcggtttatactacattttattcaacccaatataaaaatcgagttacaaaaatctaagtacaacacgtccaattaagaaaaaagaaaatagtaacacgcccaataaaattggtcagtttagtcgggttaatccgtccaaaccgaccactaatattttttttttaatttttttatttttacatttaattattatatttgtaataatgagacaaacatatatagattgaactttatattttttaaatagtcatataaatcatatgatatataaatatatttcataaaaacatacatgtatataaaaaaaaaaaaaaaaaaaaaaa

SEQ ID NO: 159777 - DNA, 523 bp, Cannabis sativa
tttatattgcttaagaaattagtttcttttcttgcagagcctcagtgactcacgggatgtaagaatacgtgtttatagggatgtaaaattagagtgctttacaaggcacagaaaatatgtgattatgtattgaatgaatatttgattagtgtaatgataaagctattcacggtaagatgctatgatatttttatattatgtaatatatgattcgaatagacgttatactatatatgtaggttgaatagataatgaattacgagtatgtatgttatgttatgataagaatacttgcatttttattgcttttgattttatagcttttcttgctgagtcattgtgactcacgagtgcttcatggtgcaggtaaaaaggttaaaagttgtgttcagccatgagcttgaggtcttccggcagtgtacatatcatccgtggtgtcttggcttttgggaagcaggatcaacctattttctatgtttggaaatgtaaccttatttttgtaatagtaatttagtaacctact

SEQ ID NO: 159778 - DNA, 576 bp, Cannabis sativa
agggaccaacggacttacagaaagtgtgaccttagggattattactgccaatttttaaggttggggactaatcggtatcaacctcaagtttttgggaacttttgccccaattatccctaaatatttaaataaatttatatttttaaaattttataaataaataatcgttaaatattaaattattatttacatgtcatttttttatcagtatatttaaattatttttttaaaaaaaataaaaattaataaattaaaccaataaaaaattatcccatgacaatttacttaacacttaatatctaaatacccatagaagttatagaatcgtaattataaccgctaaaaattaaatttaaaatatttatttataactataagttaaatttaaatatttatgccgtaaattactttttatttaattataattctataattttttgttttaataattaggtgtaagaaaatataatcagagatatataaatattagatagatgttacgtgctaagtcacttatgttaattttattttagtttttagttttttttaatatcataattttaaaattaataatat

SEQ ID NO: 159779 - DNA, 541 bp, Cannabis sativa
tgacccttcaaggcaagtttgtgaatgatgagttcatgtcgagggttgaggcgattcctaccgaggagatgatgtcgctaggggcagaactggccacacagtttatgactgtgttctcgagggcgtttgtcgctggctccaaagaatatgatcttttgaaaaagcagaacgctcttctccaggagaacgtgaagaagttgaagtaggacgcgaactccaaggatcaagacatcgaggacctccaaaaagccaaagagcaggcggagactaaggccaacctttctcagtcgaaggtcgaggaattgactcgcgatctggagactgaaaaggaaaattggaagaaatagtacaaacaagatgtttctaactacatttatacgaccttattcaagatgccagacttcgacttccctgttcttagagtagaagcggctgagatggtcgaggcttttcacgctatttcgcctactcagactcaagggtgcggaggaaacctttttcctgaggaggcagagactgcagatgcggaggaagtcgctga

SEQ ID NO: 159780 - DNA, 595 bp, Cannabis sativa
ctagatctaggtccaatttcagttctgattccaagtccaagtcctagttccagtcccggtcaactttaggttttggttccaatttttggtcacaaggtacctgttcgagtctggattcagttctgggtctatgtccttggtcctgatccttgtttgggttctagtttgcttctgcgtctaggtctagctttgggtctgattctaggtgtgggtttgagtttaggtcggagtttgtgtccgtgttcatgtccaggtctaggtttgggtccaggtaaaagttcgggtcctgagtgtgggtccaagtttgggtcttggtcaggatctcgatccaaatctaggtccagcatttcattcctattctaggtcttggtccgagtaaaggttcgtatccggatccctatctaggtcgaagtctgtgttggggatcgggtcccagatttttatccaggtccgggactcatttccgctctagttacatgaccgtgtcttggcccgagttcgagtctcagtttgggtctgaggctaggtctgtgttttgttctaggtctgggtccgagtcgtggtgacggtcctagtcttgttatagggtcctggt

SEQ ID NO: 159781 - DNA, 503 bp, Cannabis sativa
gactctcgccgcgacgactggagcttccaaaaaccgtgtttctgttttggactttatggccgcggccatgatgatctcgcagcagccagaagtgcgctgagcctgaatttggcgtttttcttggctccacttgtcttttattgcacttttgcatcctggtgcttccattactccgagaaacctgaaaacatagaaaacaagcataattccgtcctaaaacatcgaaaaacgaacataaaagtgatccaaaatataggctacaaatagcctaacagtaattctgcaaaagaaaatcgaatagagtcaatacacttcttcacatctaaagtgaggttattatgaaccttctcatttcgagtgcgccagatggtgtcgaccacaagtgaggcatacaagaaaacctcctccacatcagtccccttatgtttcaggtcccaaatgaatttgacccaatcccacatccggataccagtgtcacagatcggataaataccccaaggaga

SEQ ID NO: 159782 - DNA, 520 bp, Cannabis sativa
  modified_base (354)..(361): a, c, t, g, unknown or other
ttggccaaaagcgaggtcaactgagagtatacgaggatgtcatcgataaacactatgatgcagttgtcaaggaaatccttgaatactctattcatgagatccataaaagtcgttgtagcatttgtcaatccgaatgacattaccaagaactcatagtgaccgtatctggtttgaaatgcagtctttagtatatcttcttcccgaattctgagctaatgataaccgggtcacaagtcaatcttcgaaaacacagtctttcctgaagctgatcgaacaaatcatcaattctgggtaacagatacttgtttttaatcgtcagcttgttcagatctcgataatcaatacacattctgnnnnnnnnatccttctttttcacaaacaaaactagtgatccccagggcgatacactgggtcggataaacccttagtcaagcatcccctgaagctgtaattttatggcacgtttactatacagtatttagaatcggaataaatcaatggagaaatgtaacgaagtaaa

SEQ ID NO: 159783 - DNA, 511 bp, Cannabis sativa
taagaaagaaagatggcaaactagaaaagcgaactgaggttttcatgtttgttggaaattctaaggagactaggcgtggactattttatagtcgcaagggtgatagagtgttcgtttacacaaacaccactttccttgaagatgactatattaagaactttaagccgcaaagcaaagtaatattggaggaaatgctttcagatataactccaactaatgttccatcgtcttctactcaagtaaaggacaatcccactccctcggttgaacctttgcaagttgatacaaccgagaaatctaccactaatgttcttgttcagaagatcacgactcctcattgtagtaggagggtttccacaaaaccagcttgttatgacttggatggtgaaattaatatggttgttggtgatggtattaatgacgatccattaacctataaacatgaaatgacaagtccgaaatggaaacaatggtcagccggcatggatttagaaatggattccatgaaaaa

SEQ ID NO: 159784 - DNA, 500 bp, Cannabis sativa
ttcgtttctttcttggtcttgaggctggtcgcacaaagaaaggcatttcggtctctcaaaggccttttacccttcaattactacaagatacaggctacattagtgccaaacctgtgtccactcccatggaaacaaatctcaaattaagtaaagatcaagggaagcttcttcccggtcctacagcctatagaagtctcataggcaaactcatatacttgacaataacaaggcccgacatctcctatgctgtaaaccacctaagtcaatttttaacttgtccacgggtttcacatttccatgctgcccatcgaatcttgcagtacttaaaatcaaccccgggccaaggactttttttcccctcaaacacaacatccactatctcagcatatgccaaaacaagcctttccccatccaatgttcaagtatccttcttttcggatgctgattggggggcttgtcaagacacaaggcgatctatttctggttattgtctcttcctt

SEQ ID NO: 159785 - DNA, 530 bp, Cannabis sativa
cctccatttgttgaagccaacataccttcatagtcagggtggttctcattaggagtttgctattaaataaaataaactgagattagtcatcactgttatattaaaatatctgagttgaatgattaagttaaaccaaaaatacatgaatgggtggctgatgtctagcaagaactttcataatatatattaaatgaaacagaatattctactgagggtttgatgacaaacatgctcatacaacatcatgactaacttgaaaattttctgatcaaacattataataggtactcgtaaaaatcaagatgagagaaaagtttcaagaagacctgaagattttgatttaaactacattgacaggaacaacattgcatccacatctctggaaaatcatgaattaattgcaccaccttttcaaaaaagagctccactgaatatcacaaattctagagatcatcgaaggctagcattttctgatccaatttctaatctcatggactctacacacgtgatcaaggactccattcaaccac

SEQ ID NO: 159786 - DNA, 620 bp, Cannabis sativa
tattatgaaaatttaaatttttatgctttgtttttctatctaattaaaaaatctttcatttttatattataggagtcggaattgttccatcggctgaaaaaaaattaagaaaaaaagtttttcgagaaaaaaaaatgaatttgacttaagtattttgtatataagcatatttttcatatagtgtaaaaagtgacatttttttatattttttttaattaagtagctaaattaagtataaaaattcaaatttctcttttattatttgtcattagatcaaaatcttataatttaatatttttaaaactaatatttatagttaaattgtttagtaaccatgaatgagaaatacccattaagaagtgttccataacatatatatatatatatatatatatataatttctcacaaaaaggatatatgtaataatcttaattctgccatgcccattggaaaagttgtatttatttagaatttttttttttaaaaaaatatcagtatcaactatttttttacaataatattaacctttatatttaaataaattattgaaatgatcaagtgaaagaaatttaacataaaatacattaaatactatttaacatcaactaaattaaaaaaa

SEQ ID NO: 159787 - DNA, 512 bp, Cannabis sativa
tttttttacaaaattaaagtcgaccactggcaggggtggcgctactgccaactcaagggtggccatggcccccaaacatttcaagaccccctttagatatatatatatataaatacttgtatatttataaaataaaatacagatataaataaaaagataataataagtaaacatttaaaatatctattactaattaatatatatagtataaattaagtatttaatttactaaaaataatatatattaaattttaataaaaataaaatagaaactgatttttttagaaatgaattaacttttcaaattatatttatatgagtagaaggtaaataaaataaggtaattgcttattacttaatttttttttttttttttctactatttctttcttttcttttactaataagttagtacattttcttttactaataagttagtacacttattctcgttatattttctacacatttaactcaaaatcactcattaattgataacttttatcattaaa

SEQ ID NO: 159788 - DNA, 584 bp, Cannabis sativa
agttcaggaggcataatttggtatatgtcaaagttcagggggaaaaattactatttagccttaaaaaaaagttgtcaaaaattgagttcaaggtctattttgtcattcaacaaaataaaaagtccaatttgtgatatttgcaaaatataagatctaaaatagatttatctcaaaataattagtatcaagtactaaaaatttgaattatgtttacctaccctacctacgaatcttttgtttctaattaataatataattcaatgcagatctgcacatacaactaattaactcctaataagtacttatgttgttctgcatatgtatcaaatgctaaaccaataattaaggttaatttaattcattgtcaaatgttatacattaaattggagttacttaatcaatttttttaattacttttgattgcataagtttcttgtaaacatacatcatttgccattttttgacctgaattcacattcttgcttaaccctttaaaaagtcaataatttaaactatgattaatagaagaatgaaaaaagagcattgcttactgttgaacgaaaaaaaaaaaaaaagttattatt

SEQ ID NO: 159789 - DNA, 733 bp, Cannabis sativa
taatgtccatcaccgccaaatttgggaaaatattttggatgcttctaatgagacggatgatgttgatgttgtacatgacacaaattcataaaattttacactattagtagatttgggggagttgaatgtccaacgaactaatgatcctccaagaattgtagatgtccctcaaagttctgagatggttgcaaatgttaatgatagtagggatgacgaagatgaaattcaagatgtgcccgcgacaaatttgtatttcattagtgatgatgattgtgaataatggattttagtactgtttgtattgatgactagttatatttttttgcattttgtcttaaggaattattgtataacaacaaatttaagagttaatgagttgttcgtattctcttaagtaaggactcatatgattttattattctatttttagcataaaatgtcagcagatgttgctagctatcatggtggagatggtggcggggatgacccattagatccttctagggtattggttgcatgcgagtcttctggtatttttgttatttttctatctaagtgtttaatttttttaattcaaatattcatacatatacatttttgatggcaacataggtgttgactcgagaaaaggtcgtgggaggaatgtattggtaaatttagaagagagaagaaaaaactctactggcccgttgccattagaagttgacagtgtctcgaacaaaatagtaggctt

SEQ ID NO: 159790 - DNA, 558 bp, Cannabis sativa
ttttgatctaatattttttagaccggattggatccatccaatattaattggattgattggatcaatccaatccaatccaatccaagagtaaaacctgattattcaactaaacggctaatatatacacttttttattttattattcttcctctctctattactatgtaaaattaaaaggaaaaaaaaaaagttttaattattttatagtaggtgaataacacgacaaaaagaaagacctagtggccatcttactatactaataataatcataatactaattctaacactttattttctatctttttcttttatatttttggccttggaaaaggtcacgctacatattttaataagagaattttatgacaaacaaaagtctattggatactcatggacaattcaagtataaaaaaaaagtgatttaaacaaagtgaaagtttgatgtttgatgtttgatgtcaaaggttagcaagtttaatctaacacacaatttaataaaaaaaataaaaaacttgctaatgttattgtgttcctgtatttttctgaatgtgttttcaa

SEQ ID NO: 159791 - DNA, 588 bp, Cannabis sativa
aggaatcaaacaactataattttttatttaaaacctatttgacgggaaagaaaaatcaaaagttataactcgcgtataaaactgaataacaacagttctcgtgacctaagaaagtactaaacgaggcatcacaatgccttgataaaagtacttaaacctagaatatggatagataatataactattcatacgagcaaattaaaaatatacaaagtgatagaatcattaaagtatatttaagttttcttaaggcagattataactgctatagcgaggcagaattgacaactgctcgaaaatcaaaaaatttagtagattactaactacttaaacaggaagattacgagcaatcaaaaaatccaaaagtactgtacatttgatcaaaatatagttgtttatattgtgaataaatatgcaagcaaacacaattgtagtaagctcaaatgaaaatagtacaaagcattaagataaggaaaaaatccatgttgggttacaaacttgtctttacaaaaataccactaggggcaaaccattaagtcatcttcctaaataaaagatgagaggagaagtcgataaactcgagaaaga

SEQ ID NO: 159792 - DNA, 572 bp, Cannabis sativa
atcccaatacaagcatgtttactttggtatttttattttactttttgaacctctaccaataatacttatatttaatgtcttaattatttaaccaaatatattgtattgttacttttttactttatagtatatttaataataaaatataaatttgcattaatttttaacatgttatgtgtaaagacctcatatgattaataccttggattattaaataattagggtttatgtatgagattttgttattatttataaaaatacatattatgggaatttatttgagttcgtatatgtttattatgctatttatgtaaatttctcaatttctgtgattgtgttcggaagctgtggaaagcgacgttgggcctatagagagtcgtattttatatgatttaaagtttattcggggtatcattgttagatatttgaagcgttggagttaccgggggtttgaaaatgacttaactacccttatgggttagtagctaattagtaaatagctaaaagggtatagtggtctttttgagttaagccttgttttgtcttttatggtgatatatgctgaatatagg

SEQ ID NO: 159793 - DNA, 585 bp, Cannabis sativa
gacttgattaatttaatattataaggaagacaattataaaataataataataatgaaaccatcattataagaacataatcacttttagaaataattttcccttgtagcatagggatttgtaattgatataatcatgttgaagattttgcttaaacgacaaacggagtctcttattagcattttgtggcaatcaaacagtcataaatggcaaagcttagtaaccaaaactaaccaaaaaactataatacaatggcggtaccaccaaaccagagaatggagaaagagagagagagagagagaattacctctggaaagctaccccggcacttgcagcgtgagtgatcgatggaagaagacgaaaaagacggtttgtcacaatagttaatcttcagtttgctagcgttagggtttgttgggcttgggccatggctagagtagaagagagatatctgctggaatggaattataattccgccacataaaaaatggaatagcaattccattagtttgggggaatagcattactatggaattcttttccaaaattgttatttttcaaccaaacaaaataatcaggcccattag

SEQ ID NO: 159794 - DNA, 503 bp, Cannabis sativa
ttgttattgatctcgatagtctactagtgagctattattatgacttatccttagtcagctaaggtaacacttgaatttataacagtgactaatattttttgaggcaatatacaacatatttaattctttaatattcaagctagttcattttccacctcttgtatacatgttgtaccatattgcttcctaaaatatgagcataacaagaatatttgcaactatttacatagttcggtgaaatttttgcaactaaaaaaaaatcaagaagaaattttttacaaaagtcatagtttagaagataaaaatcatatttcatccaaaaaaaaaaaaaaaaaagataaaaatcatatttattcaagaaaaaaaaaaaagatgacacataatattattaaagatttctcatggtacccaatatcagatatcatactcttattaaatgcaattcagatcaaatattaacattcgatttcaaatattttaatttgattgataatactaaaaat

SEQ ID NO: 159795 - DNA, 584 bp, Cannabis sativa
  modified_base (47)..(49): a, c, t, g, unknown or other
aaaattcagggggcaaaaatcttaattagcttaaaaaaatacaaaannngggtcaaacccgcgcgaagcgcggcttagttccctagtatatatataaaggaaggttctgaggagtttatgtggcatgcttaagattcttatgaccttccatacctatttgtcctttttttttaatattttaataattttgtatttttctatatgtagaccaaaagtcatatatgtatcatatcaatactatacttattgctaaaaaaatttattttcagaataataagatatctcttcatatatcatctttgttatttattatcaattataatataaagttaagaaaaataaactttctattttttatttattttttatactaaaaaatcacaaaagtttacaagtgacattttaaaatcaaaaactatcatttctatcatttatatatattcattaattaatatcaatattaatatatatttatataaaaaataaagcattttaaaatttatgtgacatgttctccatcttttttttttctaatttatttattttatagttattttgaattttaatctcatattttaattttt

SEQ ID NO: 159796 - DNA, 555 bp, Cannabis sativa
taagtgttcttctcttatacttctaaatgtctagtaaagagaacaaacacaaacttttatctatcgaagagatcaaataggaacctagtaacgaaattactccagaaatgcaagaatatctagattggtataacaaatttgaaagggaaaggatcgcaaacgaatggaggctcctacaacttcaaaaacaattttacaaaacaaatgaatggccgccaacagcaccaggattccccgaagggtgtcgtcattacagattaggttattttaatggcgaatcggtgaagcctggatctttatgcccgtattgcgagtctcacacccacagtacagacttttaaattgttatgttatgattgtttagtggtcagttttaatgtttgtttttttaataaactttttaatgttttaatgtttgtttagtctttatttatgtttaaaaaaattcatttgttttctgtcaactgtttgttttaatttttttttatcttaaagttgacaatatatcgacattccatcaatatattgtcgacaaatattgtcgacatactatga

SEQ ID NO: 159797 - DNA, 504 bp, Cannabis sativa
tttattttgatgcttggctctaccaagcgttccacgggtactacccccagtttcttgatctcgctgtctgaggctaatttagccaggcagtctgtgtgagcgttcttttctctggggattctttctactttatagtccgtaaacttgtggagcagttcctggactattgctacatacgcggccattctttctccgcgcgtctggtattctcccgacacctggttcactaccagttgggagtcactatagacttctactcttttagcccctacggtctttgctaatctcagccctgctatcaaggcttcgtattcggcctcattgttcgaagccaaaaagtagaatcatagggctgcctggagtcgaagtccactcggagatatcattgcaacccccgctctgaatccattctcgttcgaggctctgtccacaaatactttccatgctgggaccaacggtgatggtatgttcacggttgcttcggcttcattacattcggtgatg

SEQ ID NO: 159798 - DNA, 503 bp, Cannabis sativa
  modified_base (148)..(159): a, c, t, g, unknown or other
tggagattttgttgagccccattttttcatacggtgtttcgaacaggatatttgctaaggctccattatctatcatagtctgggccactgttttgttagctatctatacttccacgactaatggatcattgtgtgggaagcgaacatnnnnnnnnnnnncttcagtgaaagttatagtgggttcccctatccgtggcatttttggcttcctttcctctacggccagaaccacttctttttgttcgtgttgtaaagttcgggcgtacctatcacaagctttgctcgagtatccaactatatgtgggcccccgatgatgacttgtaaatgcccgtccactggtggaggcaataacaggtctttgttattgtctgcttgggcggccctttgattttggtctgccgtgacatactgttgcacatgcaggttattttttcttatcaagaattcaatttcccgcttcagattgttgcattcattagtgtcatggccataatctccatga

SEQ ID NO: 159799 - DNA, 566 bp, Cannabis sativa
  modified_base (27)..(33): a, c, t, g, unknown or other
aaaatagattacattgaaatggagttnnnnnnngggcataaaacctaacaaatagttcttattttagtgagcaatcttccctaatggaagaacgttcattagcaatttaacgccgtggaatctcgaaagatatgtattatttgtaattattttatttttactatggatcaccctaatggtggcgactattagtaagacttacaaaagtatgaaacaatggtagaagctcataagatagaatggccttgaccctcgcctaaacggacaacgctggattctcatcttgatcaaataaaaggttgctagaatatttatcattttagatgaactgacaactctattcaatggatggtatctttgactctcgcctaaacgagacactgatatcagtctgttgataaccttggaaattatttgggattgtatgtttttttagtattttcacctgtcatttcattttctaagtgctaataatttctgaatgtgattttgtgttgaaccttacttgatttctatttattgttatttgtagtatccaataagactatgaacaatcccatggtgtc

SEQ ID NO: 159800 - DNA, 558 bp, Cannabis sativa
ttgggggtgccaaaagaaaaagaaaaagaaaaaaaaaagaattgaaaaaaaaaatgaaaaaaaaatgaaaagagaaaaaattctcaatgtaggcaccccaagaaagaaaaaaaaaacaagaaaaaaaaaagaaagagatagaaaaatttagaaaaaaaaagaagaaaaaaaaaatatattatatataattagtaaataaatgtcatggtgaaattgagaaattgtttcatttctttgtgcagagaatcaagtgaagaaggcaaattcaaaattgggcaaagaaattaagtttggggtggaagaatgttttccagttgctataacaagggttcagcaattttatttggcagcaagaggtgttttggtactgggctgatcaaaggaagtggagttttgaaaaaaaaaaaaagtacttggtctgataaagatgaacatgtgaaaaaatgtgtttcaatgatgcaatcattggggaagtgtctttatcagaccaatcatttggtcttgttgattggtcttggtactttgtattttccatatttttgggctgagattgtagat

SEQ ID NO: 159801 - DNA, 563 bp, Cannabis sativa
  modified_base (162)..(171): a, c, t, g, unknown or other
  modified_base (383)..(387): a, c, t, g, unknown or other
tagaggcagaaaatgacttgtacagtgaaaaagagaaaatatatatatcttaaaattaacaaaattaaatcaatcaattaattatatatatatatattttaaaaaaattacatttaaatatttgaattttttcatttttacacttgaaaataattttttttnnnnnnnnnnatttttacggaattctacataaatctcttattgcaactagccttgcaacttaaatcgcaacaaaaaatcgtatagcaacccacataaaaactagcagagaaaccactttagaaacccaaaccgtaaattaaaaaaaaaaatatatggggtgattcccctttaatttatttatttaaatataacttaaataattatttaaaagtatcaacaannnnnaataattattttttatatataaatcttaatttaaatttaaattaaactttgatttaattaaatcatactttttaataaatttattaattatgtttaaaatatataaatttatttatttattttattatttaataaaatttgttagatatatatattttaataaataaatttaaaat

SEQ ID NO: 159802 - DNA, 510 bp, Cannabis sativa
  modified_base (26)..(41): a, c, t, g, unknown or other
  modified_base (154)..(155): a, c, t, g, unknown or other
  modified_base (186)..(193): a, c, t, g, unknown or other
aacacagggtccaattggtaactttnnnnnnnnnnnnnnnncaaaatggtatttacccaataattaatattcacacactaattagtaattatacataatgagtatagagacacaaaaattttagaggaaattacattatatactcactttattnnatttgttttaatttttacctttattttcatnnnnnnnnagatatacctacttttatagatgatgtctctattatatcccttagattaatgtaaatcatatgtacacttaagtggagggtaaggatatattaggcaatttactcataaaagtgggtagattttaatgaaataaaatatgagggtatttttgattaatgaatataaaaaagaggtattcctcaattcatcccaaaatttcacatactatttatatttatataagactaggaaataggccgcgcttcgcatgcgacagttaaataattatataaatattaattgaacaataaaattagtatcaaataattttaaattt

SEQ ID NO: 159803 - DNA, 678 bp, Cannabis sativa
  modified_base (33)..(42): a, c, t, g, unknown or other
tttctattctacagctctatgcggtagcattcnnnnnnnnnnatttggtcacctcgcaccactcccacacctatctcaaacttagggataagtgcttaattgaactaattgcccctagtccaactaacgttggtcgacccaatagtatgttgtaagccgatggcaagttgaaaactaaaaagtcttgcattattgtggtggaaaaaggcgcttcgcccacggttaatggaagctcaattattccttgactaacgacactgttgcctgtaaatccacatagatttaccatgtaaggttttaatttggctttttcaagtcccattttcttcagtgtatccttgtaaaggatgttcaccgaacttctgttgtccaccaacaccctttttatccttttattggcaagctggatggtaatcaccaatgggttgacgtgaggatacctcacatgcttcgcatcctcctccataaacacaatcggatgttcctcggtcttagctttcttagaaggttctggagcaaaagcagactgctcgttcttaacttcctttacatatctcttttgggcattattcctttccccataaatatgtggcactcccgagataaccaaaatatcctctccttcaagaggaggaggttgtaatccttggttgtccgggttattgggcagatttggct

SEQ ID NO: 159804 - DNA, 560 bp, Cannabis sativa
agactcttctattgagtctttgaaccaaaggttcaaaacgacacagagttttgtgtcgtggggttttgaacggtgccgtttagtctaaggatttacttagactaagaaaggtcatttttgaccctgatgctgatattgttgtctttgttggtgtagggttaaaacagtgaaatcctacacatatcttagaaaatggtatccctatgacgttgttatgattattcaatttattaaaacaaagcacccaataaacataattgtacttgatcataatcatattttaaacttccactaacaattcttaaataaaaaataatcttcaactaacaatatcacccaaataggtatttttaattaaatcgattgccccaatcatgtctattaatttaacattaccctaacgtacgtataaacattttgagcaaaacaaaattaaatatatatatattaaacaaatatgaattatcgacaaatctattcaaaatgatattcacatttacatttgtttataatatatatattataaacaaatgtgaattattgagacccgaaaactacaa

SEQ ID NO: 159805 - DNA, 680 bp, Cannabis sativa
  modified_base (492)..(492): a, c, t, g, unknown or other
cttctagaataattgctccacccccagagaaaccaccatctcgcattggttattagttggtgtagatataaggattctaatataaccgctattatctaacatataggagtcttgttaaatttgtacatagaagtacatttaacctcttactattgtttctgagggatatcttattgtgacatattatcttagtctgaaactataagtaccttctagactaagtcatcaacataacaatctagtacttatattaatataaaatacttgcttaagattaagtaatcattagacataccgtgaaatattttatgaggattaggaattttgcgtaagtcattcaaatagactatgcaaaattctactatcttatcctccaaatttgattagttatttctctccatatgaattgttagatttactttctcagttgaattctaaagttcctatcacaagtgtaatccaaatgaagatgggcttagaattttaaaattntcccactcaaataaggtactgtgataatatgtccaagaacttctattggtatcaatttctattacaacagtaacatattaattgaaacaaaattaagatcaagaatatgatctaataatttgcttatttgttcattatattacatccatgtttaattaaaaaaaatgtgtgccatatagatattgtgg

SEQ ID NO: 159806 - DNA, 658 bp, Cannabis sativa
atagaaaaatatctagagttttttatatattcacaaaataataataatattcaaataataataagagcatagcatcttgtttccggacaaaattgtgtacggcataataatctcatcatcatcgttctcattactgtatcggcggcatgtttgtggttaagcaattgaagaaaataataataatattcaaatatctatttattatgtttcaaaaaaaaaatctatttattattatatttaagcgtttttttttgaaaaataatggtcatgaaaaatttttaataaattaattagtgaattttctccctcattttttgttgctagtattattttattctctcttattttcgacatgatattatttgttttatctttatttttaatattgttaaatttaaatcttaaattaatattttttatgaacagaataattttttattatatataaaatgtagaagaaaaagaatatacaacacatgtaatataatacatattaatttttttattaataaacaaggtattgcacattttttttcaaaagcttattaagatgtataacactttttacactcttaatgttggtgataatggtggaggttactcatagtaacaaataactccccaaatgttacataaagataacaattgtcatatatta

SEQ ID NO: 159807 - DNA, 583 bp, Cannabis sativa
gctctgtaaatagtgttgctcattgtattgcaagggcatctcattctcattatcatttaggatgtaatttgagagtagataatatagcttctttttttttttagagagagagatcagaaagagcttttgatttaaaaaaaaaaagtacacaatattgtattgaagttacgtgcaatgcacgtatacttagttacatttttatttttttttattattataacttttaattattataatatacaacattattcaaaaaaaaaaatatagtgcaaatattagaaatagttctcatatcagtagagtgaatcaaccaaaagacaataatgagtaaaaaaaaatggcaagaaagagagcaatgaaaaagctgttagtggacagcaaattagtagaataatttataatttttttgaaatgttattattggcctttataataaggaatattataagatggaaatgagaaaaaaaaattgattgaaaaagaaagtattatagataaaaataatagaatttgtaaagtaaatgccatttctatgtatggatgtgtaaaagaaacctaaaagaaggaatatgattatgttgaa

SEQ ID NO: 159808 - DNA, 500 bp, Cannabis sativa
  modified_base (30)..(35): a, c, t, g, unknown or other
tgtataccgaccaaccactacgacaaatannnnnnaagccagatgcctctggacggttactcaagtgggctgtagaattgggtcagtttgaaatcaacttccaaccctgaacagctatcaaaggccaagccttggccgactttgtggtggaatgcacaggcaaagcagaaagaacaccagaaagagatctcgagccaataccacagccaagtaatattgaaaaaaaactgacctggaagctacatgtggatgggtcggcaatagatcaactatctggtgcaggaattgaccttgtcacagctagggggcaacacctgcacgcagcggtcaaattcggattcaaagcctctaacaacgaggccaaatacgaagccttaatcgctggacattgagatctgtagtgattcacagctagtggtaaatcatgtatctggcgaatagaaggctcggggtgacaaaatgatagcatatctgagcaaaatacatgatctgctcgcaca

SEQ ID NO: 159809 - DNA, 542 bp, Cannabis sativa
  modified_base (505)..(513): a, c, t, g, unknown or other
atttacaaaaattgattgttcggtaattctatttttcttttcggatttttacaaaaatactaaattttgagcaaaagcttataattttactgttatacgatattttttacaaaaatattgtctttttataaaacaacctaaaataacaataaaaaaacaaataaaacaattgaaaataatagtagaataactaaaaaataaccgtaaaatagtgaaaacttaacacaatacaaagtataaaacttatacagtatttttgaaaaaatacagtacttttaagaaaattctgctccacgataaaaaaaaatataaaaattttagtatgtggtgtaaattttttttatttttttaggagccctcgattttcttgatacaggatacctcgtattgtctgcgtgttttattttcaaaagaattacagatcttatggttcagggccgaccctgaattgaaatgggctattagcaaaaaaaaataaaatttgggcccttactataaagataannnnnnnnnttaaaaattattaaaaaatatgtatattt

SEQ ID NO: 159810 - DNA, 600 bp, Cannabis sativa
  modified_base (539)..(545): a, c, t, g, unknown or other
caggaaggctgaggggcacatagaaaacctggacgaatgcttcaaagtcctcagaaagtataacatgaaactaaatcccttaaagtgttcctttgcagtcagctcaggaaagtttgtgggcttcatttaatgccagaggaattgaagccattccagagaagattcaagccctcctagacatgaagtcgccaactaaaacaaaggaagtgcaaagtttgactggtcggatcaccgcactcagcagatttgtcccaaaataaatagacaagtgtgtcccattcttcaatatcctgcgaggaaataagcagttcgagtggacagaggaatgtgaaaaagctttccaagagctaaaagcacatctcgtaaaacctcccgtactgtcaaaacctctagacagagaagagcttggaatatacttagctttcacagagcacgctgtgagatccatgctaatcagagaagagaacaacatacaacaccctatctattaaatcggtgaaaggctcattgaggccaaaggccgatacccattgatagannnnnnnggttactgccttattctagcaacaagaaagttaaagccctattttcaagctcatc

SEQ ID NO: 159811 - DNA, 758 bp, Cannabis sativa
acattatcacatcggtatgactagactaccgagtataggctgatattatggccaatagtactgtcgtatgaacgttctagacttagtaccccctaggatgtagggatagggttacagttgggtgtatgggcgcctaactgcaatccgggttatatttatgattataattatggttttattactgagtttgtcgactcacagatattgtttgcatgtgtaggtaagaggcaaggctaaggctgaacagcagtgagctcgagcggataaagattgtacatgttggggtgattaggcccggagcgcacgatctttgagacatcagactatattttgtaatgtcgttaggcgacaacttttgtatcaaatatattttgtaacttagtcgtaaaaaaattaaaatacgggatcccagttatatacaagttactttcttttaatattaaggagtatttaaataaagttttaaaaaatcacaattttaataaacctactgattagcaacggactaaacagttattataaaatcacgataacatgcctaagctagtagggtgttacaacaccacatcgcataaaaaatacagtttaaaatcttttgcggtgcgattgtagtttgtattttttccaaaccccgccatacagcgcggtttgcagttttaaattaataattgcggttcaaactgcaccgcactatatattacaaagttatcaatttttacaatataatttttattcttttttcatataagaacaaatat

SEQ ID NO: 159812 - DNA, 639 bp, Cannabis sativa
  modified_base (333)..(334): a, c, t, g, unknown or other
aggtccaggttcgagttcgggtcccaggtgcggttccaggtctgggtctaggtcagggtctcgttacagatctagcttccgagtttcgatcctcgtctaggtccatgttttggtccgggtgttagtcttggtctgggtacacgacgtgtcaaggcccgactttaggtcacggtttgggttttgggctaggtctgagtttggttctaggtttgggtccacgtcctagtcacggtcctagtcttgttcgatggtcctggtcttacagttcttgtttaggctctattttcgggtcctaggtttgggttaggggccgggtttgggtcctggtctganncccaaatcaagttcgggaccgagattggggtgcggttctaggttccaaccccaattttgtgtcccgagtctggttccatgtttgggtctgaggtcgggtccaggttcggcatcgagtgtaggtttgtgttgggatctaggtacgggtttcggttcgggtctaggtctgggttggaatttgggtcctagttcgcttacggttccaagtctaggtctaggtctgattatggttccaggtccaagtccaagtcctggttccgaacctgttcccgggtcccagtctacttcaagtttcggttctaattt

SEQ ID NO: 159813 - DNA, 821 bp, Cannabis sativa
taaaactctattattttataaaaattaaacttttacctcttctaaaatatatttttgaataattaatcaataagtttgagaataatacgaaatactagaatatgagtattcatgatttatacatcatatctaaattttaatttcatctgtatatcttcaagttatatgttttaaacacaacttgaaaacaaccaacttcaaatatgtatatttttatcagtaacacatattcgagatcaataaccagtaaatgatgtactaactttgttgatgatacatagtcaaaattaataattaataacattagttgttaagtttatcaagaatacatgttcaagattcataaccaataacaattaataacatttaaaccttaaataatacatattcaaagtcaataagtaataacaattattaactttcaaactttttcaattacacatattcaagatcaataaccgataatagttagtaactttcaaacctttcaataatatatattcaagatcaataactaataataatcaataatttttaaacttttgtaatttttcttttttaattccactctgatcaattgatacatatatattaatttagaacttaaagaatgaaggataaagtgtcttcctctctgagagagaagaattacatgacagatggtggaatgaagtacagatgtgtcaagtgcggcaaaaaagttatctttaactttataattgctataaaaaaaattaaataacttgaactaatcttagactgacacacttatttgacacttaaagtattgataataagatttactgtagaattatatttaa

SEQ ID NO: 159814 - DNA, 968 bp, Cannabis sativa
ttttgtaaaatgattttttttgggatcccgaaacatgtaattttgattgtaaagttaaagttattacaagttttaatttcattatgtattcgtttaaagtttaaattttgtcgcgcttatcttactagtaatctcgtttaggggattagggtttcttaatcacctcgggtagcgtgcctaattgttagggcgttacagtttggtatcaaagcgccaaagtttttaaacttcctgtagaccggccaaacatgtacaatcatcattggagacaggctcaactcatggtgcagtaagtgttgagagtaaatgctcaactgcttatatgatcatttatttactgctttccactttaggcaatatgtgagcatctagagtatttatgtgatatatgatgccatgcttagaatgttatttgataaatgtttatttaattggaatgaaatagttgagttagggttgtaaggcaataagtgcataagtgtggtattagtgcttaactcgctggggttgttgattatagaggtacttgtaaaaatgaaccttccgcaatcatctagaccacagggcgagcaagtagagcctggtgtagaccaaacctattcaccggcaccgcctgcgcctctgtagaattcgggggataatgcgggggttggcaatgcgaggtatcatacttcgtcaagaggaagatctgcatcggttaaggcaatcggcacgggatgcccctgttgagcaagttttaccaccagcacctgtgtcagtggtgggtaatcaggggtttatgttgtcgcatagagactcagtgtttgagcggttcatgaagctgcaacctctaatttttctgggaggtactggtataattaaagctaagcagtggatgagtacaatcacctgtatcctagacaatatgggggtgacgggaatagagagagtgaattgtgcagctttcatgttactgttgggttttatgc

SEQ ID NO: 159815 - DNA, 620 bp, Cannabis sativa
  modified_base (578)..(588): a, c, t, g, unknown or other
atcccacttattacctgattaactcataatataaatataaaccctaattatctaccattagacttatcgggatattacagtttggatccgtgttcaggtcttgagtttggttctaggttcgggtctggattcgggttcgggtctcggtcctgtgtttcgatctcggtatgggtatgggtcttgagttttagctcatgtcttgggtcttggttcgggtttcaggtacaggtttgggtctaggtttgggtcttgggtcttgagccatgggttcgggtccccgattcaggtcagggtcctaggtcccggtctgggttagggtcctagtcttagtgcaggtcccggtctgtgtttggttcttgtccttgtcttgggtcttggcctggtctgggttttgctcacggtttagttcttaagtcctaggtccgagtatcgggtcccgggtcttagtttaggtcccggtcccagtctaggttctagtcctagtcgaggttcaggtctcggtcctagtccaggtctgggtcttagccttgatcttggtctgggtttgagtcccgggtttgagttcgagttctggtatnnnnnnnnnnnctaggtcagagtctgggtctaggtctgggtct

SEQ ID NO: 159816 - DNA, 523 bp, Cannabis sativa
  modified_base (50)..(50): a, c, t, g, unknown or other
  modified_base (406)..(418): a, c, t, g, unknown or other
ttagtgctctttatgctattttggtgggaaggggcaaaatggtcattttnccccatttatgttttgtcctctagtggacttagaaattagagatttaatgttatttttatttatttctttggctgaatatagtgttggtatgttcattcatcttttattttcaaagttagaaaaaaatcaaggaaaaaccaaaaattttctcaaacctctctttctctctttcttcctctctctttcggttttgagcagctgggtttgggggggattctttgtgtgtttcaagcaaatttatcaaagtcttgtgatcttaattcttggtaagtcctttgctctttagttttcttatttttttttaggaaaaagaattggtttgcagactttgtttaggttgttgttgttgctgtgnnnnnnnnnnnnnttgcagaggtttaagcatgattaaggttaattaagctgcttgtgatgcatgatagttaggttgtttagagttgtggaattttctattcaaaaacttaagtttcaa

SEQ ID NO: 159817 - DNA, 682 bp, Cannabis sativa
tgtctagtaattcatcaggagaagtcatacccaacaattccaaccaagttaatggtaccagtcagctaattggcctaaccaaccagtcactaagacagcaaggcgtttccgtatttgataggttggggacaactcatgatctcaaaaatgatctgaataggaggagaggagtagacgatcagcttgacacgacaatcgtgcagcccggaacccgcactcaaatatccaattgaaaagatgctgatgtgactcagatcggccaaaatgtcaaacaagttagtccaactgtgcaggcacagttggacgaactaaaaagtatgttccaagacattgccggtcagaggaacaacgatctcgagttggaccgagcatgtggaacccctttctcccccaaaatcaatatcctggagttgccccacaagtttaagatgccaaccttgcagatgtatactggtaaggaagatccattatcccaccttaagtatttcgagatgcaaatggatttgcaaggaatacgaggagatgtatgttgcagaatttttcctaccaccatctcagaagcctcctagcaatggtatttcaagttgggacccgaaaagttcaactcgtggaaggctttctcctcggagtttcatgcacaattttcctcctcttgccaagcctacatcagcagattcatgac

SEQ ID NO: 159818 - DNA, 628 bp, Cannabis sativa
  modified_base (239)..(241): a, c, t, g, unknown or other
  modified_base (442)..(442): a, c, t, g, unknown or other
tatagaatcttagggtaataaccctaacttgtatactaaataatcactcatataacatattacagtatgctcaaaataatatctattgagggtaataaccttgactcatgtcttcactggattaacaatattaccatacatcatcgctttcttactttcataatattctagggtaataaccctagaccgcatttaattaaactcaaggtattagtttaccgagtctagcttatttatgnnntaaacgcacaattcataatctcaatatacatacatatatcatggcatatcaatacttattaataattcactagggtaataaccctaggccaataaactgctcactttagagtaataactctaatcccggtttctagttactcatatatatcatattccatataagcgccaccacgaataactctacgtgctaactactgtnttacctgatgtcccgcaaatatggagattccaaatctccgggtgctcctgaccaagtatcagtaatcctagtcacaatcccatgatacacaagtataggattaattcccaaatccatttccaaaatatataaaattggcatttaaattatagatatccacatagagctcgaaacgagctttctaac

SEQ ID NO: 159819 - DNA, 514 bp, Cannabis sativa
actcgctattctaagggagtactcgcatatctattttttggtatccaagtagcccttgaatactcgcacaaaactggtgttgtcgaaatttgctcgacaacataccagaaagagaaaggcacatacatggtatgagccttatcctattgagacgatagccaccccttcgaatcttgtttcagaggaatcggaccaaaccaaatggacatcttcaaaagaaaaattctgtattggctctggggatgatgcttcgaattcaggaaggagtatcactcgtggaaggaagctaaaaggcaaaactaccaatcgtacagtgaatcgcaattcgggagtgaaaactagaagtggaagaaggaggggcactgcggtaggggataatagtggaagtaacaatatcaatgaattactcaacaactgcattgaggttagtattgaatatgctagtattcaaaattttcgaaatggcgaggagacggccggaagcatgtccccacctgttgggttttgtgcccta

SEQ ID NO: 159820 - DNA, 617 bp, Cannabis sativa
ttggattgaatctaagcatcatattttttccaaatattttttgggacattggtagcatgctcttcaggatgctcctcagttaggaaaaaattgtggttctcacaaaccagcatcaaattcaaattatgctttcatttaagaaaacttttaccattcaatttttcaattgctagtaaagcagtaagaggatttgacatagtagacatgattgaaaataaataaagatagtgaatgaataagctttaaaaataaatatcttttagaattagtgtaaatatgatgcaagaatgcatacaactaaaatacataaaagaatgtttaagttattttatgataaaacccttatacaattaagtgtcgccttaaggttggctaaattaattttattgggcctatgagacgaatctcatctttattattttgaaacctaaatatctcatattatcctttttaaaatagaaagtattagtttttggtcaagttagcaactattatcccaaaaattgcccaaatgacgtggcatgcaataagatgacatgtggcgttaagtggaaggttggtcgtcacatgataaagctagaaggatgaaagttggacgtgttggaatttattttacc

SEQ ID NO: 159821 - DNA, 543 bp, Cannabis sativa
gaatactcgcatttatcatctctcaaattattctctctttttccagttaaattgtactttttggtgttgcgaaatatcagtaacaacattatgttaatgttgtatgataaggtttaattttgggttttttttttgagttattctgctaattattgatgcttccatacatattaacgatgtctatcgatatcatcaacctttggttatgaagtagtgttaacgcagattttcgttaactaaatttgagcctaaaagtgacagtctcacacagaaaaaataaaagctgtaaaataaaaagatatgaatgcaaaggattttttttaagtgattttgcagttaaaattctacatagtccacgagtcaatcttattagatttctgatagtttttcagggcctttcttgtatgatttttccgtcccctttatcttgacacgtgtcctccactgagatggtagccgaattttgggtatcacaattgctgtcggaagttattttaccaggaacttagatctactcagaagtatgttgatttaacaacctaa

SEQ ID NO: 159822 - DNA, 724 bp, Cannabis sativa
  modified_base (276)..(283): a, c, t, g, unknown or other
  modified_base (386)..(405): a, c, t, g, unknown or other
aattcaatgtaatacaatacaatacaatacgacctaatacagcgttccaaacgagcccattttttttttttatatatatattatgtgatttttttcattctaattggttgcaacgtacagagtcaaatttcccttatgaggttttatttttattttttaaaacggtatactctcttcaatatttttaaacttatgtttagaatattttactttgtatagaatgcgatatttaaatgggatattacataaggtattattttttttttgtaaaaaaannnnnnnnttacgtttaaatatttttttttacatatttacagttttccataaaaataacacgaaaataataagaaaactacataaatataacatctaaataacatcaaaannnnnnnnnnnnnnnnnnnncagataacaaaaaatcaacaacaagttaacatgagtacaacataaaaagaccgtatgcatgtttttgtcaataaaatctaaaaaatcgtaaaaatatttaaaattccgtaaaatcgtatttttataatttttatgtatttataaaataatcactatttcaattagactcaaataagtattatatattgtggaaattgatcatctaaatcaacttattatccaactcatttgaaccaactaacttaactaactttcggttatgttagttagttagttggtgctatccttgtttgagttgggactatatataagtctagtc

SEQ ID NO: 159823 - DNA, 800 bp, Cannabis sativa
aaaaatgcaacttgcaaaacctctgtactctcaaaacccttggatggagaagaacttggaatatacttagatgttacggagtacgttgtaagtgtcatgctgatcagagaataaaacaacatacaacacccgatctattacgtcagtaaaagactcattgaggctgaaggccgatacccattgatagagaaactcgcttactgcctaattctagcaataagaaagttaaggccatattttcaagctcatcctgttcggttgtacactgatcaaccgttacgccaaatattgcaaaagccagacacttctggacagctactcaagtgggcagtggagctggtcagtacgaaattaccttccaaccttgaacaacaatcaaaggcaggccctagcggactttgtggtagaatgcacaggcaaagaagaaagcatactagaaagcaaccccgagtcggtacaaacacctcagccaagtaacaatgaagacaagccgacttaaaaactacatgtggacgggtcggctacagatcagctatctggtgcagggatcgcccttcttacgcctgggggcaacacctgcacgctgcagtcaagttcggattcaaagcatccaataacaaggccgagtatcaagctttaatcgttggcctaaaactagcccagaagatgagagccgaacacattgaaatctatagtgattcacaactggtggtaaatcatgtatctagagaatacgaggctcgcagaaaaaagatgattgcatatttgagcaaaatacatgacctgctcgcacaattcaa

SEQ ID NO: 159824 - DNA, 507 bp, Cannabis sativa
aaattgtaaaaagaagtaaataatttatgtatatattaatatatattattgtgtgttaatataataaatatgataattaataattaaaacttacagctttttgatcgtttatataatggttaaagttcgcacgtgtgacaatgtcagtcatgtatttcaaaatataaaaattacattcctagttcttaggttgtcttggacaatttgctagtgaaatttcaggtaatgccccaaaaaatggattaaattctcctataattaagagtgtcaatgggtcgggtcggatctgatccggctatgatctgacttgatccacatcatgtaaggatctgccccgcccctccccgctagattagatactcagatcggatcggatcctaccagacctattcggatcggatctaatcagacccgactatttttttttaagaattttaatattaacttataattttatatccattttaattttgtattaatattaaatacaatactatgtttggtatt

SEQ ID NO: 159825 - DNA, 771 bp, Cannabis sativa
ttcaccaaattttctcaagttttccagagagaaaagaaaccctcaaacaccatagatttcttacttatcttccttcgtcgttgccaatcaactttcttccagcgatcaacaccaacacctagttctcaagctttacgtaagttcttcgcatcttgtactctattttatttgttgtttacatagcatgctttactgttcatctgccttttctgggtttaatgttgagtttctgggaatttctgttttgagtttttgtgtaacgcgctagattcctcttttcttttgtgtttgaactactccttttcatcgtatttttttgtcgagggcccatcttctccttacgcagtggcattcaagggtttagagtagactttgtcttctcaatttttaccctttttccttttctttgcttattcgtaatgtcaccatctgtgggattcttgcactcgattcttgtcgaggaaaaccttctaaggctttctttttgacaagcgtctggaggggggctctttcaagcggttaggggacccccattcccttttttgacttagggtttggtttggggcctgactgctagatttttttttcaatctttttcagaaccaaaatgtctgcatccggttccaaatcttcaaagaaaggggggaagcgtctggccaccctggaggaagttatgaagggcccggtggcccaagaaggccacaagtcccgtgccaacaggtgggaagcggctgagcttcactctaccttaacttgccctcaccagctgga

SEQ ID NO: 159826 - DNA, 666 bp, Cannabis sativa
gtgttcatgttggtttatgtattatttgatgaatgtatataaaattacgaaatttttccttgaaaataaatttatttttgttccgaaaatattttatttggattccttatgaaaaattaagcaacttttatttttacgaaactcaattccgataaaaaacgaaggagatatgaattttaaaaaatcgggaaaggaggtgtgaatcgtgggcgagatccttcggtgagcattgcattccgcgcgcagaagggggtccaggagcgaagttttcttggtggatgctgcttggacatgcgcgcacatggggaccctacaacatcccctgtttccccctgttttcttctgaccgtgtgcgtgtttctcgacggatgctgttggaacatgctagattgcatggtatccgattttcatgcatattttgatcaaacattcgtttttggaaaaattaaagtaaaagtttattagatttttatgtagatttcaaaatttcaatttgaaaaactaaaatatcagaataaaaaaaataaaataatttttatttattttaaataataaaagttatttttttagatatttggagtttactaatttgaaaattgatttttttccacataaattttaaattatggtcagattttaaaaatttgttaatttctttaatattta

SEQ ID NO: 159827 - DNA, 503 bp, Cannabis sativa
ttaaatcaccaagcatgcacttatttttcttcaaacaaatcaagaacaccaagaaggtttcaagaaccataccttcttagcttgagatcactaccaggaagctgaaataaacaagaatttcaaagcaaaatcccagccctagcagccccaatcaaaaccgaaaagagagagagatagctcttgagagaaactgcaaaagttgcttcttttctttgattttttcttatttttgcaaagtgaataataaaatggtttttacatacatttattcagcataaaataactattaaaatcaaattataaactttaaataaaatttataaatgacaaggcacagatggtaaaatgaactttttgccctcacacaataaaatgatatgaaagggtactagggggtattttgggaaaactctaaattcccgactaatcctgacatttccaatgtctaaataaatcgtcccactatactgaaatactaaattgtgattttactgagccataca

SEQ ID NO: 159828 - DNA, 540 bp, Cannabis sativa
ataattagtatatatataaacctagaatattatatatttatgccataaatgctcttaaattttctagtatgcaattactaattagataaataataagacttttacaaaaatatagaattttgaacaaaaatttataattttactctcacatagaatttcttacaaaaatattctctttttatgaaacaatcgtaaaacagcaaaactgaataattaaaacaacagtataacaactaaaaaataaccgaacaacaatgaaaacttaacacagtatacagtaaaaaatttatacattatttaacaatgaaaacttaacacagtatacagtaaaaaatttatacattatttttgaaaaaaattctttcccacaatataaaagtaaaaaaattaaaaactttagtatgtagtgtaaaaaccactaaataatttaagaatagaatataaaaatagcacaatagaaaatattatttataccttatgaatattaagcccttagaagttggtcgagcagtaaaagtttcagtaatattttcaaattga

SEQ ID NO: 159829 - DNA, 510 bp, Cannabis sativa
gcatgatcttgctgttcaagtagctggagaagaatgtactacttttgtaatttcaaatggtcaaggaaatatcaaggaaactactcttcatgtgtcttttgtacccaatgctcacttgggaagtgaactttcagcttcattggctcatgcaaaaaatattcgaacatttcttagtatttcaaactttaaggaggaattattttgcgatgccataacatcaaattgtatggttatacgttgtttggatttgaacaattcaagttggaagataatatcaaattctattggcaagttgaaacacttgagatatttagacctttcacggaattattatctcaagtcacttcccaattcaattacgaatttggtgaatttgcaaacgttgaagctgaataattgcttaaatctcaaagaactaccaagagaatttgagaaactcatcaacttaagacatcttgaactttctcattgttgtagtttgaattttttgccaagtggactaggtaagtt

SEQ ID NO: 159830 - DNA, 584 bp, Cannabis sativa
gattggattggatcggatacttagtgaacacccctaagttaaaaggagttgtatttatcgcttttttttttattttaattcttattaaaaaaaaattatcagatgttacaactactttcaaatcattctttattgtactttatttgttactctttttttgttttaaaaaaaaattgattttatttaaaaaaaaaaaaagggtttgccaataagcaacatcacatatcaaacagtttactaattctttttaattaaaaaaacacataaaaaagatgaataaagtgtacagtatataaagacagtataaagacagtatatacacgcaagttttagactattttaaaaaagacaatatataaagtgtacaataaaaaggaaaaaactgtcatgtggcagtataaaagtaataaaatgccaaaatacagtatatcatataaaaaaactctaaaatatacaaactacaaaaatgataattagataaaggactagttttttttcttttttttttttaaaaaaaaagaagataattatacaaggctccatttttttatttatttatttatttattttttgtaaaaaaatta

SEQ ID NO: 159831 - DNA, 656 bp, Cannabis sativa
  modified_base (569)..(604): a, c, t, g, unknown or other
agttgcacagcaacaaagaccaattaatgaaaatatcaatatttatattcattctgtttattgtgtctatgaacacttgctcacagagtaacttcttaaagttgttctcttagttttacctgcgtactatggtaccctcgaaagacagaatccaggcaaagtctgtgaaacttggtgaatagcaggtgaccaagagacttgtctgaatggtcacttggggggcacacatactgtacaatgcattgaactagcgcaaaaaacttatgcagagaaattttaacgcttagtataagctattaaacccgcctttaagtcgtgcaggcatacttcagcttggcaaagtaaatctgaacccttacttattaaggccataagaagatagccaaggattaaaaacctcctggtcggtcacacaatccatgataaaaaagcaacaaggccaaatactagtaatgtttaaaaacagagggctaatggcaaaagatacgaacatgaaggccctagggctgaaaataaagtaatgttctaaaaagacctcaggctacatagtgttggaattaattttaccnnnnnnnnnnnnnnnnnnnnnnnnnnnnnnnnnnnncaacctaaatatgaacttctaaaacgataaacaaaacacataaaagttaaga

SEQ ID NO: 159832 - DNA, 729 bp, Cannabis sativa
  modified_base (226)..(227): a, c, t, g, unknown or other
ttacaactcaaatttaattttctgtaaatatatattgcatttcgaaaaattaaagtattcaaggatacatacaatgatttagcccccaactttacccaattcttgaacaaaaccccctaaacatttagcccccacatcctacatacagacaaaaaaaaatatgtgcaaatgttccttttttcagaagacaaaggcataagattccctaacagcctttgactacttnntttttacccaaaagtgcaatactttaatatctcatctacccacttaacctgtgtatggaccacaattcaacaaacctcacaacctaactattattaactccactaccagaattaaaaactactataaatccaacacactcatacccaacatttttcaaaaccctaaacactattacaagaaaaaatcacttaccgtagtctggaggagcatcatcctcattctgacgacgaaaggccatttcatgaacgagatctagtttctgagtctttctcttcaacttctaatccgtgtttctgggtttcctttgattttacgaaatgggtttggggttcttacactcttttcatttgcttactcttcgatttccaaaccgtgtttgtgggcttctttcgattttgtaaaaaacggtttgggattcttacactggtttgggtttcctttctcctcgatttacactgtgtttctgggttgtgtttttcttaaggttagttcattttgttt

SEQ ID NO: 159833 - DNA, 680 bp, Cannabis sativa
ttaattgatgtgttggatatgttgcatttggtacgttatactgttctgaaaatacaatttaggtctgtgatggttttggttcgagctggggaagaaaacccagaatttttttggtctgccagcaaccggtcgaccagttggttctggtgtaccagaaccggtcaaccggttacctgcaggggaaaattttcgggttttctctgaaccctgttttggctggagctggaacctggtacctgtctttgattgtttttgagttatttgatctattttgaaattgtttagggctaagtattatcggttttaaattagggttttaatccagaaattttgagttaaggtattcattgagttctaattgtcgtgacataggaccgggatcgcctagcttgttctccactcaggttagcccgtacgttggaattctgaactaaggtaagaaaggtggtaagcactgtatgtggctaaatattaattatgaatggttatggccttgattattatcaagactttgattaatgtttgttgagcctaggttatgacctagggtgggaagcggttaatactattatgagtaatactcttgaaactgcggttagatttcttacttatcgtttgcttcatcgggcaacgatagtgacatattcagctcgtggttaacgagtgataaaggggtactt

SEQ ID NO: 159834 - DNA, 546 bp, Cannabis sativa
gttattaaggtaaattttgagaaaaaaattatctaaggagtgtattattgtaatatcccgataagcctaatggaaataattaaagtttatatatattatgggctaatcatgtaataagtgggattatgattctactaatctatttcaacataaattttaaatctattataagtggataaataagcgtaatttatttattacggagatttatatagcatgtatgaatataacatgagctatttgtgaaataagaatatttttcgagtttggcgaccttagagactcgattgggagccaaagtgtcataataggtttaattagtgactttgatgggaatattatgataaattgatagtatgcttattcgggtaattagaggtaaatgaaaattaacctagtgctctagaagtagagattttttagtggctaaaaatagtaaattaacttttattaataaactttttattgatattattattattattataatactattttatatatataaaacttatcagaatcgataagtttaaataatatatatat

SEQ ID NO: 159835 - DNA, 534 bp, Cannabis sativa
cataaaacccaacaaaaacaactatgaacaagatacaaatgccatagatactaaaatgtggttgtggtcttttgatcacttaggtctagttactatgaaaaagttcgtagaatagtccaagtggatcctggtcacagaatacaaactcaaagtccatacataaacatacagtttggatctattgacggaaaatggatattaaaaacttgtgaaagtcatactgtattgcccaatgtattctaggaaactgaaataaaaatttctatttggaatctaaaatttatagtcgaagacttaaatttatactaaatatacaatgagcgattgttctagcttcgaccaccactactaatctagctctaagttcaagttgctataagtaggcatatacaaatataataggagatttctataaggtcaaggatttatcatttcgggatagaatgtcgggaatatagtcatttgtaccattcaattttataagagaaagtagaataacatcataagcagatgatttataaactattcatccaa

SEQ ID NO: 159836 - DNA, 560 bp, Cannabis sativa
  modified_base (27)..(27): a, c, t, g, unknown or other
tttacttggtaaattctagatttgctnattggaagctcagatatataggtccatggtccccatactaatacaccttatccagactaagcataacagtcgggtaaatccaaacaactagtagcgaggcacccatctccctataggaaggcacgctcatggtaccttcattaatcagcttcagacacctttcaatggggttcacaactccgtcgagtcagctctcttagatagaagttgaaatacaaatgatgttgactgttgaagtccaccttgtcgccaagaactgcaatttttaaatagagcattatgtcttcaagcacaggaacgacaaggcttacaccattaacatcagaaagacatgaaaaaaagttccagctcgctaccaaggttattattaccatgttcccagtgagatatcccagtacgttatggtttacaacatatttaatacccatttaccttgacccgtaaaagcggatctatcacagctgtgtgatttttaaatattaaccacatttattttacgtggtatgtaatcaaaccccacgatttcaggggat

SEQ ID NO: 159837 - DNA, 665 bp, Cannabis sativa
atagcccatttgctcagtcctacaatccaaatttttcttggagacaaaagtagcctccaatgaactaagggcaccaatacaactcacccaataagagtcatgcccaacctaatatgtctaatcctcaacaacaatgaaaatcatctttagagaataccctataatagttcatgcaaagcacccaacaatccctgttaaagcttgaaacacaaatgggtcagcttgctactgttgtagttgaaagggaaaaggaaaaacttcccaatcaacccattcccaatccaaagagctggtatgaggtaagtacatctaaacctatcgaagaagctaattcaatttctatccttaggcctggaaaaattattgaaaaacccaattacgcacctcaacctgatattgaaatgaaaatgaaaagagtcagcctaaaacttcacattccaaagactcagttgaagaattgagtcaaactttgttgttcattccaaaagctccattcctacaaagattgatcacgatcaaaagcggtagtcagtatggtaacatcttagaggtattcaaacaagtaagtataaatatccctttcttagatgccattaaaaaaatacctgcctactctaaaatcttgaaagatttgtgtactgcaaaaagaaacacaaatgttccga

SEQ ID NO: 159838 - DNA, 599 bp, Cannabis sativa
accagggatagacagaaaagacaaatcaaacctcctatgagatttgggtttgctgatattatacattatgctcttaacattgagcaatgtaataatgaacctagaacctatgctgaagcaatgaagtcagtagatagagagaagtggaatgttgcaatggatgatgagattttatctcttaaaaggaataagacctggattttgatcaagaaactgttaggagaaagagtaatcgggtgcaaatgggtatacaaacacaaagatgacattctaggaggtgaaaaaggcaggtacaaggctaggttagtggcaaaggggtatacacagagggaaggggttgattacactgaaatattctctcatgtggtgaagcatacctcaataagattgatcttggccatgacagcaatttttgacttagagcttgaacaaatggatgttaagacaacctttttacatggagaattggaggaattctgatgcaacaaccagagggttatattgacaagggaatggaggatagagtgtgtttgcttaagaggtccttatatggcctcaagcaatcacctagacaatggtacaaacgttttgatgatttc

SEQ ID NO: 159839 - DNA, 660 bp, Cannabis sativa
agcggctccgcagaggaatggttcaaaaagttaaagccaggatctgtggactgctggaacaagttgcaagtcagcttctggagatagttttttgcagcgagaaagaataatcttaaagtcagctccttgactaacataaagcaactacccacaaaaaccttgaagaattttataaagaggttcaaagaggaagcctcaaaaaccaagaaagtggatgacgaataacagcttgcacttcttcaagccgggatccgtacggggaccccattctggaatgaattacaacaggaaggagctgctaatctccaagacttccagaagagggtccaaaaatacatcaacttggaggaggcccaaatagttgcctatagaggatactatccaacaggagtatcaggatatgtacccaaagcccagctctcgggagccctacctccggccactcctcaattgagcggcatacagttcttcgctacaccaggatataatcagagcctagccttggctcccgcatcattgcattttgggaatcccttaagtaacccctcagggatgagcaaacaagccccgtctcactctgctcctaccgcaagcctgacaagacctcctcaaagctcccggagcaagaggtcctcaaaaggtagcaaccagacggaggac

SEQ ID NO: 159840 - DNA, 537 bp, Cannabis sativa
atatcaagtcgtttgcaataatcagagagaaaattcttatggaaactttaatttaaggctaataaagcataagcaatcaaccgattgtccccattaccctttcttattaatacgtatggaatacctaactagactgtcatctaagaatctctaaaagatttgagtttaaattgttagaaaaattaataataatccctaaataccaattttgtatataatttataacacaacaataatatataataatttatgcgtacctaattgatctataacaattatctcaatttaatagtgcaatattataacctaagtcttccttcctaggtctctaaatcagatcagttttatttatttaattatcaaaagtataaaattatgatgagacagtatatgtttatagagttaaggaggggacttagctacaaaccctagtttgctcatcaaaggctttagttaactagaaaagctcacactcttgtttcaactagactttacacacacaaatgctaagcccaccaactattgatcactaacaat

SEQ ID NO: 159841 - DNA, 582 bp, Cannabis sativa
atagggcatacaaccgaagagtgttggcaattgaaggacgagataaagagcctaatctcgcgtggatatttcaaacagtatgtgaagcatcaagggaacgagccaaactagcccaatcagcccaacaacccaaataaccaaagattgcaacctccccctgttgagggcaaggatatattaattgtctcgggagggacgcatctcgctggagagagttataaggcttaaaaaagatatgtcaatgaaataaagaacgagcaatctgtgtttgctctaaaaccactaaaaaaaagcaaaaacagaagaacctctgattatattctcaaaggaagatacaaagcacgtgaggtattcacatgttgatcctctcatcattacagtttagctcgccaacaagagaataaaaagagtgttggttgatgatgggagctcagtaaatatcctttacaaggatacgttgaagaaaatagggctacaagatgcaaagtttaaaccttgcatggtaagcttgtgcggattcacaggtgatagtgtcgccagccaaggcatcatttgactcccattaactgtaggagagccacc

SEQ ID NO: 159842 - DNA, 511 bp, Cannabis sativa
attcccattcccattccctagcccattccaatttctattcccattcccatttccattctcattgctattcacattcccattcccataccctgccccattcccattcccattcccattcccatccccattccgaatcccattcccattcccatccctattcccattccctggcccattccctttgcattcccattccccgacccactcctattcccattcccattccccagcccattcccattcctattcccatttgcattcgcattcgaattcccattccaattcacatttccatttccatttatattcccattcccattcccattctcattgctattcacagtccagttcccattcccattccctggcccattcccattccaattcccattccaatccccattctacatcccattccaattagcattgccattaccatttcccaacccatttccattcccattcacattccttttcctatttgcattcgcattcccattcgcattctaat

SEQ ID NO: 159843 - DNA, 536 bp, Cannabis sativa
taatagttgtaataaccctaccatccgcttgagtaggaataggacgtgaagagtattttcttaaaatttcaattgcctcctctgaacgtatattaccaaactggtatctgctcaaggctcgaggtgatacagatcttgtcctccttcctctgaatatctctcctgccgtagcctctgtcctagtcattctttttgtcctggatccttctcctttctcctgagtattgtccacaactttcaaattatttccgtaaacagatcctgggttcttttcttttactctgattactttcttcaatagcttccctctcataatagcctcctctgtctgctttggagaaacccccttgacaagtccctttcctttgttttgaccgtttgtacctctccccagagtaccaagaatactggctgccggaatcaggattctggtgctttctctgaggatattgttgtcgcaagaatttcgcaacaccaattttagaagatattattaatagcagaaagaaatgactatgaagaacaagtgcgagtat

SEQ ID NO: 159844 - DNA, 733 bp, Cannabis sativa
ttgtcccaaatccagacaccaattgggttcggtccaagcctcgggtccaaatatggatcccaatgtcaggtcttagtcttgttccatttttggtgccgggtcacgagctgggtttaaggtttaagtcccaatctgaaaatgggtactaggtcccggtcctagttccattgcccagggcactatcccaattcgggtctaggtcccggttctagtctgggttagggtcctggtctaggttcaggtttgagtcctagtctcagttcggtttttggtctcggtcttggtatttatctgggtttgggttcgggtttaggtccttgtcctatccttagtccagttccagtttcagttgcaattccgagtttgagtgtgggttcgtgttcgggttggggtttgagttatggtccaagtttgggtttgggtctggatttcggtctaggtccggatcaggctccgggtgtgggttcaagtcttgggtctgggtcagagtcccaagttccaatctcgatctaagtccttgtttagttctgggtctaagtcctgggttccgatcctagtctggtttcgagtttgggtccgtgtccaagtctatgtttgggtctgattttatgtctgggtttaagtttggctgggttcaggtctgattttgggtttgggtccaggtttaggtttggtcccagtctgtgtcaaggttcctgacctagtttgggtctgggtctaggtctgacttcag

SEQ ID NO: 159845 - DNA, 886 bp, Cannabis sativa
  modified_base (483)..(494): a, c, t, g, unknown or other
aggtaaatttgattaattgatgaataaaagaggcatttttcaagttacccctaaaaaaatgataatatacctcatttatattacttttattggagtactaactagttactatgttactgataaccactatggaattgaaaatgttagtagccagttactaaattagaaaaataacgaaaattcagtgtttttcagtaataaaagaaccgtttagtactttttaattttttttgaaatcaaccaattagtacttgaaaattagtaaccacatactaattttttttaaacaatgaaataatgtgtttaacgagcaaaactcaaaacaaactcctaggctactcaaaattcaaaacaaacaccccctaaatgttgtgcaatgagcaaaaaagaaaagaactaaaatgtgtgtaatagaaagggtaaataccattttagaccatgtgttttgcgaaaattaccaattggactttttattttgttaannnnnnnnnnnnaccatgtattttctaaaattgtacaaataggactctgaactggtttttttatcaaaataaaacttaataataatccgatctagagatgttatgacaaaactgattatattttctgtatatgttagtattaaaaattgttttaaagttagttatattaaaaaataaaattgttaaaaagtgagctcagggtcctatttttaccattttgaaaaatatagggtctattttgtcattaacaaaacagagagtcaaattaataacttttacaaaataaagagtacaaaatgacatttaccctaatagatattagataatagaccaaaaatagagaagtataagggaaatttgaaaaaatatgcataaaataccttaatattttatccctaaactaa

SEQ ID NO: 159846 - DNA, 506 bp, Cannabis sativa
ataaagtacccttaccactcgttacccatgagctatatatgtcactatcgttgcccgatatagcaaacgattagtaagaaacctatccgcggtttaaggagtaactactcataacgataatgaccgtttcttttactcgatcataatcgagtcacaacgataataatcatttcatatcattatcctcgattataatcgagtctgaacgataataatcgtttcctatcattcccctcgatcataatcgagtcacaacgatgataatcgtttcatatcatttccctcgattataatcgagtcacaacgatgatcattgtttcctattatttccctcgatcataattgagtcacatccaattcatatcgttaacctcgattaagattaagtcacaataacgtataccgagatttcgatcttaatcaaaactgtaacaatcataacattaaccttatacaatatttaatacttttcttacctcaaattctggtttaggtatgttggccga

SEQ ID NO: 159847 - DNA, 512 bp, Cannabis sativa
gacttgaggtaagaaaagtattatgcaccgtttatggttaatgactataattgtgatagtctcgattgtgataaagattctgacatgtgtttaatgtgactcgattatgatcgagggaaatgttatgaaacgattatcatcattgtgactcgattatgatcgagggaaaaagatatgaaacgattgtcatcattgtgactcgattatgatcgagggaaatgatatgaaacgatattatcattgtgactcgattatgatcgagtaaaagatacggtcattaccgttatgagtaattacttcttgaaaccgcggataggtttcttacttatcgttcgcgttatcgggcaacgatagtgacatatatagctcgttgataacgagtggtaagggtgctttatgaagcactgagtttaggtgattatggtattgtataagtagagtgcttaataaagcactgaaattatgtgattacaatgatgtatgactagagtgctttacaaagcactgagatt

SEQ ID NO: 159848 - DNA, 684 bp, Cannabis sativa
aatttctattgatctgatggcaaagctaacaccagagctgttatcaaacgttgcttcaacttttgaaaacttttttcacacttgtctgaccacacaaatctcttatttttctttgtcaattcggttaggggcatagagattttagaaaacccctcgacaaaacgtcgataataccctgctaacccgagaaaacttcaaacctccatcacagattttggtctcggccaattcttcactgactcaaccttgtttggatcaaccataatcctgttctttccaacaatatgtcccagaaatgatacctcagacaactagaattcgcactttttgaacttttacatacaacttgtgatccttaagtcgctgtaataccattcgaagatgatgctcgtgctcctcttctgactgagggtatacaaggatgtcatcgataaacactataacgcaattatcgagtaaatccttgaataccgtattcatgagatccataaaggccgcaggagcattagtcaatccgaatgatattcccagaaactcatagtgcccatatctggttcgaaaagcagtctttgatatgtcctcttcccggattctgtgttgatgataaccagatcgtagatcaatcttcaaaaacactgtctttccctgaagttgatcgaacaaatcatcgattctgagtaacgg

SEQ ID NO: 159849 - DNA, 558 bp, Cannabis sativa
ataaccttaaaaggtaactaaaataataattgtaaaataactatttagcaatttaaatgtttctcaattttactaataagttatgtgagtttttttttttttttaatctttattgtaacttattagtttattaaatagacctaaaagtaacataaatatttttacaaaagcaaaataaaaaatcagtagcgtaaaagtatttaaaataaaaagttaatttaatataatctaaaaataaacacaaaagtttcaaagtaacaaaaaagtatataaaataaatggtacattaaaatagtaacttattatattatatgacaattcattagtttcgaaaataaactttaaggttacccaaatgtattttaaataataagatagcataatataatttaaaataactaattgattatcaagatgtttacaaataaaattttagaggtaaccaaattgtatctcaaattatattatttaaaaataatttttttacgtgaaagtaactaattagtttcttatcaatatcataagtaaccaaaatgttatttttgaaaaccgagaaaa

SEQ ID NO: 159850 - DNA, 516 bp, Cannabis sativa
ttattattaataagagttaatacttgaaatgttttttagttttaatttagttttaattttaaaataagataaattcattaaactaattgtacatttgtgtaaatatgtaaaatctatgttggcagccacgttggacataatggtgatgtgtcactagccacgtagataaaatgacaaactaatagagattataggacgacaccttaaaaatccaaacagtgttgagttttgtgccctaaataaaacccattttaatataattagatgtactaattaataaagattagaaattgcattttatgttgcatggttcacatgatttattttatgattatacttaatgtataaattctattaaggccagaacatatatatatatatatgtatatatgtgttcgtgattatagtgtcgtcagcacagtagaatataatcatgactgtatgatcaaaagtttaattctcatgatttgtcagtccactggatttagactggcatgataatctgcgataaggtat

SEQ ID NO: 159851 - DNA, 524 bp, Cannabis sativa
caaaatggtcattttgtcccatttatgttttgtcctttagtggacttagtaagtggaaaatggatgttatgttatgtttcttttggcagaaataagggtttaatatatgcattttctctcatttcattcaaatagaaaaattagaaaatttagaaaaaaaaaaaaactcaagctttctccctctctcttttcagccctccttgagcagcaaggaagtggatgttttcttggtgattcaagctctttttaacaagatttagtgttaacaagttgattggtatgatttctatagctttcttttatgtttcttagaattttttgaagaaaatgatgatttgcatgttagtttttggtgttgttactgctgttagttgttgttgttgtttttgtgattaaaatgctgaattaagtgagattatatatgttgatatgcatgctagttacccttgttctagtttgagaatttttggttcaaaagctatggtttttcaaagtgaaaatgtgagttttgttgctgtggttgt

SEQ ID NO: 159852 - DNA, 606 bp, Cannabis sativa
ttgccagaaggctttaagtttcactgtgccttgagatttcaattcaacacttcaaataatgaggctgagtatgaagccttgatcgctggtttgaagataactaaagtgttaaaggtcaaaaatcttacataccatagtgattcgcaattaattgtaaatcaagtcttaggggaataccatgctgagggcttaaaaatggcaaagtacccagagaaggttcggaagaacttggaaaagtttgattatttcaaaattgagaaaattccacgagaacaaaactctaatgctgatgccttagctaaattggcctcgcaggatgaacttgatgaattgaacttggtaccagtggaagtgttaaacgagccaagtaaatgtgagaaggaagaaattgagatgataaatagcttgcctacctggatgacacccatagtcaacaatctcctcaacgggcaacttccaactgacaaaaacgaggcacaaacactcttgtattcagtgcctcactgcacgatagtagaaggcaaattgtatcaaaggggtgttggaaattattttaccaggatctagatttactaacacgtctgtttgattaacaccctaatatga

SEQ ID NO: 159853 - DNA, 519 bp, Cannabis sativa
  modified_base (27)..(49): a, c, t, g, unknown or other
atctacttattggaaactcggttatannnnnnnnnnnnnnnnnnnnnnnttgagataatactacttgcagacttagtcaattggtttgaattaataaattataattctaaaattagactcttatttatgaattttcactaacaaagggcttaattgtgaagaaaagaggttttggtgttaatttattaattaagagactttgtatagtttgatttataaataatataaatgacaattttatttcataattattaaataaatagttttggtatttataggattgaaattggaaaacatagtattattgaaagaagaataactagttgaaataaagtggcaaaattataactagagattggtcctttagtggccggctgtaacaccctaactagcataggcgcgttatcgtattttaaatatattgtgcagctcgtttctaatcaacgaggttaatgaaaatcgtgattaattaaaatttgcttatttaattaaaaactgataatatttcatacaaaatat

SEQ ID NO: 159854 - DNA, 596 bp, Cannabis sativa
  modified_base (27)..(27): a, c, t, g, unknown or other
agaaatgcgccccaaaaatgaaatcanatgcggcaaattctcgcgcctaattgttttacgttttaccggcgcatttaatttaacatcgccggtatagctatgttttgccggcgcacatatgcgccggcaaaagtaaacccaaaataaattgggaagtccacacatttctttgtctcgataacttttgtcggtgcatgtgacgaaatgcgccggcaaaaagtccttttcttgtagtgaggtataagctgaatgactgaagttgcaatcttttcacgaacaaagtggcagtccaattcaatatgtttggtgcgttcgtgaaaggtggggttattggcaatgtgaatggctgattgattatcgcattaaatgaaggcaggggctggatcaatgtggagatcgtgaagtaagtattatatccatgtgatttcgctggtggtggcagctaaggcgcggtactctgcttcagcagagcttttggggatggttggttgtttcttagtcttccaagagataaggcagtcaccaataaagatacaaaaacctgtagtggatcgatgtgtcattggacaagtagcccaatcagagtcggagaagcc

SEQ ID NO: 159855 - DNA, 506 bp, Cannabis sativa
taataagagaaatggataaaggcacaagtctcttatgtgtcaatattactattattaattcaattaagtatttggtaccatataatttaatataatagtttttagagagtatcgccagccaatcgcaactcgacatgtctagaaagtactaagtaccactagtacctaatagcaatgctcaattaataattgccacccattttgattttttctacttcatttattaactttttcaaacatatgtaaccttttttgtaggttccatcgtattattccgtttaaatgttaatgtgtctttgtaaattaacaactttgctccctcaattttaaaaactatcaaatcgtacaccctaaaactaaaaatgagaaagattcaatattttttttcaataaatcttcaaaaattaatttagatgttaaaaaaatcatttgaacaattaaaaaaattaaaaaggaaattaaaattttaaaactaattaagcaatttaatttttttttttttatga

SEQ ID NO: 159856 - DNA, 519 bp, Cannabis sativa
tgaatagtatttctctaaagaaaccagagaaacactatttagctataaatattatattaatattttaaaattttctttaatatgtataattattcatttgcttttaagaaacaataaaatatagtaaagaaatataatttttaaataatatagaaaaatatagagaaattgatgtatcatgtaatataaatgtgtgtaataaaataaagaaaattagactttgaagaaatattttaaaggataaagtaaagaaagtgcactcatatttcatgagctaaaatagctcaaaagataaaaatataaataaatgttcctaaaaaggggttctgtcaagtgagcaaaaatagctcaaagttttagtttcaaatattattttaataatttctctttctctattttattcttttttttcatttaatatttaaaaatttttttggtttatgtaataaaaatataatatttaaatggtataaagaaaaaatagagaagttaatgtatgaggtaatgtaaaagtgtgag

SEQ ID NO: 159857 - DNA, 580 bp, Cannabis sativa
ctctcaagctctctttctctctcttgaaaatcctaggggctacaagggtttgattttgttcttcaattcagcaagtcttgtgtaattcaagttgaggtaatctttgatcaagctcctctttgttttcttgaagtttaagaaatgagaaattttgcatgcttgaggatttggtggctgtggttgttgtttgtgtttgttgttgaattctaaagcttaattatgttttaatatgttgattcaagcaggtttttggggttgtttgacgattttaagcaagtatggatttttgaactcgaactttggttttatgagtgaaatgttatttagcttgctgtagttgctgtagttgtttattgttatattcagaggcttagttatgagtttttatgtggatttatgcttgaattagtggctgtttcttgtttgagcaagctttagagttttgaactcaagcttggctcaataatggcaatttttgattctgtttatgggtgaatgttttattgccttgaatatgttctctagggtgtgtagaactggtctggaaagtttggcttggattggggttgaattgattgag

SEQ ID NO: 159858 - DNA, 537 bp, Cannabis sativa
gttcagggggacctgtaacagccggtcgattggttggtccctaaggaaccagacttctagttgagaactggtctgccagttgggccttttttcaaaaccctagttttccccatttttgtgttatatttggggtattgccatgttatttatcaatagggatattcctagtttagattttaagtccccgaaaagtattttagcgtgtctctcactagagttataaatgttgtgatttagggccctgtgaaatgttgagctacaattctacttaggctgaccgacacacctgagcacgtaaacgaggtaagataacataaagcatatgtatgtgaataaatgtatgttattatctgtttacactactagccccgtaaaatgtgttgttataagggtgttagtacagtgtagggttttagggtagttacagtgttaccaacacgagtacgagggggtacgtcatgcatgtgatacaacactcaataactctcgaaagtataataatggccctacctgaaaaaccgtgtttttgcaaatgtc

SEQ ID NO: 159859 - DNA, 554 bp, Cannabis sativa
atcctttgagacttcaaccacggttcaagacaattcaagcacaaattgagaggatgaagtgggggagctatgtggatgctcagggcctggctaatgtgactatggcctgcgaatttcttgccaattggcccgaccgccggaatggggaggtaaaggtgcgtggaaagaaggttcccgctactgctgatgcttttaatgtgatgttctctgtccagattactctagggaagagcaacgcctccaaattattgaggaggaagagcagcttgatatggtggatgtggctgaaacggtgggatttccagggttgaggttccacgacaacgatggcacagatgggtcgccaaacatcttatgccggtgtgaattaaacccagtggcgaaaacatggttgtacttcgtaagtgctcggttggtgccaaataagcacttctccaatgtccaaatgaatcgcttgaaatatgtgtacgtaggcggcaacaggctaaaagagccacatccttatggccagcctccacctgatgcaccacaaggccgaaggcggcaaagagagc

SEQ ID NO: 159860 - DNA, 528 bp, Cannabis sativa
ttggtggggtcgaggtcgcatattggcacttcctcgatgtcctccatgggctctacaatttttttggatcccacaaggggatccaactcatcttcttttgccaattttggctcgataccttcagggaccatcaacattggcaagtgggccgcgacattataacattgtctggcctcaccttgattgcccctcatggttcctactccagcctcctgggtggggaatttcaggcacaagtgtaggatggacgtaagtgcaccaaagtctactagggctggccggccgaggattgcattataaggagttgggcagtccatcaccacaaacgtgcagtacttgaaagtactctggggtgtgtccgggcatagggtgactggcaacctcacttttcccattgggataagtgtggttccgttgaatcccgtgagttggcaatcgcttggcaacagatctcagtccgtgaggcctatcgctgtgaaggcttccttaaacaataaattcacggaactcccattgtcgatcagtatt

SEQ ID NO: 159861 - DNA, 515 bp, Cannabis sativa
tttaataattattattatttttttaaaaggttataaaatcattttttaatcttcttccatgcattgtcagttattatgccacctcatagtcaattttccctctaaaaagaggtgaaattactactctatcctttgctataataccacatcatcaatacaaacggtatttttaaacaaaataaacagaaggagtaaatgtaagcatataaaattatacaaggactatttttaacaagctaaatagattaagaggcataatagtatagtgtcataagtacaaggccgggtaaaaaagctaattattctaaagtaaatgtcattttttactttttgctaccaaaaatacccttaactatatataaggtattatcatgttatagtacatcaatttgttttctaattatagttagagtatggtatctatatataaatataaaggaatgttaaaacaatgactatgtggcagcctatatgaagtttatttaccaatctttattttcttaagcttctttatt

SEQ ID NO: 159862 - DNA, 880 bp, Cannabis sativa
tggagaattaaccatatggatcgatgggctataattaaaaaagaaaataacatacgtagtgggcagaacttgaacggtgtggcctggtgctatgctttgttaaccttggccgtgtaatgtgcggtgaaggagatcgacagaaatagtaaactaaattttaatgctgagatctcaaatattgatatcatcatatatatgatgcaatttattaatgtgtatattctatggaggtgagtaggttattatatatagatacttgaagtgaaaccattagctattagacagccactaaggtgagcataattaaagtgaaatattcttttgcctagctaatttactaataagaatacagagtggtggccacttatagtgtttactatataattactaattaaagcacgaatttcttttttgaatttcacgtttgcatatgtttcatattataataatatccttttcttccatgtgttgctaattattatatattaaaattctatttctatatatgtaactattaatattttataagaaaattaaagataaaagtttttggagaattaatacgtacttttctttactatgtacgtaaccatggatcatgtgagctgcatgtatatcgttttgcaaagcaactgatatttttatttagaaaaattagcttttttgttctctttgttgttaaaaattcttcctaaaataaaacagtaatataattatgtttattctggttttgttatttttatcattaaaaattaatatttttactctctaaattttgattataatataaaattttgcctatttttattaaaaacataattttaaaaattataatattctattttttaagcaattataatattctattaatttttaaaaa

SEQ ID NO: 159863 - DNA, 513 bp, Cannabis sativa
  modified_base (61)..(63): a, c, t, g, unknown or other
tttacttttaaatatatataataaaattaaaatttgtttatataaaatatctacataattnnnatttttaaatatatataataatatgataaaattaataaaaaatatttttttaagtaataatatattctgttaaaattaatgtggaaaataaaaaaatagcgttaactaaaaattcgattacataactatattttatataaaacaaatatatttaaatggtcaaatatataattctaggaaaaactaatgatattaattaaaaattattgtataacctttttcctcttaaaattttgttgtatgtagctccattaacatgcaattatttgcgtagatgcattcaatttgttatcctgaatttagtttgggtgacgtggcacatttctttgggtgacatgaatcatgagattttttctattataaactaaaaatgtaataaatttacatttatgaccctaaaaaaggaaataaacaaaaatagaaactagaaagttgttaattacaaaaatg

SEQ ID NO: 159864 - DNA, 717 bp, Cannabis sativa
aaattatatatatatattaaaaataattccccaaaatattagggggggccatggccaccccataccataacatagttccgccactgtgttgaatgtgatgttggtgctactactactactagtttgtttgagaatgattgccttcttaagtacaaaattgagttaaaacctctgttttcgggtttcgagtttaagctactggcaatgacctctttgaggtcatttttagtattctgtttacctgtgttatgtttagcagttttggctacagatgaagatgagttcttagagaagactcagggtgtaaatcctttcaaaatgtcactcaaacgaatctgtcgtgaggtaattaacttgttattttcattttaaacaatgtaacatgtaatgtaactaattaattattgtttttcatagactagtattgttaccactagaagatttttggaaagaatggttgtcaagcatttttctccacgaatgtcatggaaacttttaaaaggtaaatatattatacatattatatttttgttttattttaattgttgggttatattttaataattcaatatgtgggcttataaattaagataattcattaaggtttttacattatatattaaaatttcttgtttttttatttttttattttggggcagaattttttttcaaaaataatgtattttttttcaaaaatactgtatatttttttatact

SEQ ID NO: 159865 - DNA, 634 bp, Cannabis sativa
catattttagtgggatttttacacttgatgtcttttttcaccattattttacatttttatctagtttcagttttttaaacttttttacgttttttatttttcaattttagtttttcaaaagttcaataattacaaatatacattttaccatgcatgtcatgttttatgcattcttacatgccacctcctccataactgccatattctttttttttttttctgaattttttttattctctgtttctcctctgttcttcaacctccataacccataatcacccagtcgaagccctaacccacgttttcctcaacctcccttctatgccactattcctatttttctcgataatatctgtaacttctttctcccccatggtgtcctcttcttctataaatggccaccactataagtagttcgaagtccccatcttcaactaaaaaaatttctaaaaattctaagaaacctcctacaaattcatcttaagtcgatcctaagatgggtttgaagcgtattgctaagaaagcaatgggtggtgttccagagccatctggtactaagaaaagacccattccagataagtcgagtctcgtaaggctaagagagcaaaaccttcgaagtctgcaaaggatgtaa

SEQ ID NO: 159866 - DNA, 881 bp, Cannabis sativa
  modified_base (29)..(33): a, c, t, g, unknown or other
ccaacccccctctccacctcgtaggaccnnnnnccgtcaccccctcaccatcgtgtatcggaccaaaacccaaaaaaaaatcccagccgaatgagcatcgaacccagagccaaaaattaaaagaaaaaaagcatccacccaagaccatcggacccagagccaaaaataaaaaaaaaaaaaaagcatccagccaagaccatcggaccccatagcatcggaccatcggactggacccatcggaccaaacccatcgggaccatcggaccgaccccatcggactgtcttcttctccaaaaaaatttgcagattcgaatccacccattccacccaaaatttcttagatctaacaaataataggtttcacaaacaatcccaaacaaaatcacaaacacaataaatctaacctttttaaaaaaacaaaaaaaaaaaataaaaaatgaagaacatggtttcggttcggcgtgggtgggctcatcgtcgattggctgggtcaccatgggtgggctcgtcgtcgatgggttgggttgaagttgcctgcgccgtgcaccgtcaccatgagcacaacttcgggtttttgtgggttgaggaggctcaccgagagagaggaagagagaagctgagattaggatttgaaatgtgaggggtagttttgagaaattagtaaaatggtcatatatgaccaattttaataatcatgcatttaaggaaaaaattataaggtattgtaagtatggaaattcaaatttcccattattttttttttctaataaaaatagaattttattaaatcaaattggatgataaaagcatctgttatttgcggcaaaaccccctaaagtagggagatttttgcaactaacccccaattctaaactttttgc

SEQ ID NO: 159867 - DNA, 599 bp, Cannabis sativa
tttgaatggacggaagaatgtgagaatgcctttcaagagctaaaaagacaacttgcaaaacctcccgtactcttaaaacctctggacggagaagagttagggatatacctggttgtcacagaaaatgttgtaagtgccgtactgatcagagaagaaaacaatatccagcatccggtctattacatcagcaaaagacttgttgaagctgaaggacgatatctactgataaaaaactcacttactgcctaatcttagcaataagaaagctaagaccttactttcaagctcatcctgttcgagtatatactgaccaaccattacaccaaatattacaaaaacatgacgcttttggacaattactcaaatgggcagtggaattaggccagtacgaaatcatgttccaacctcgaacaacaattaaagagcaagccttagcagattttgtagttgagtgtatgggcaaagaagaaagcatctaaaaaaatatccagagccagtacaagaaccttagccgagcaacgacaaagacaaacctacctggaagttacacgtagacgggtcagctacagatgtccggtgtaggaattgcccttgtcaca

SEQ ID NO: 159868 - DNA, 546 bp, Cannabis sativa
tcttcgcaggctatcatcagctgagaattcgagaggaagatattccaaaaactgggttccgtactctgtatggacattatgaattccttgtgatgtcttttggactcaccaatgccctggcgacattcatagatcttatgaatcaggtgttcaaggattgcctagataaatgtgtgatcgtgttgatcgatgacatcttggtatattctgaattaaaataagagcatgagtttcatcttagagcggtttcaaaacggttacgggatcacaagctatatgctaaattcaaaaagtgtgaattttagttatctcgtgtctctttcttggggcacatagtagataaagatgggatcatggtggatctgaccaaaattgaagctgttcgggattggctgacaccataatcagctactgaggttagaagcttcctggaattagctgggtattattgtcagttcgttgagggtttttcaaagattgttgtacccttaacggagctgacttgaaagaacttaaagtttttttggactgatcagtgtgagaaaa

SEQ ID NO: 159869 - DNA, 527 bp, Cannabis sativa
aatgagggatttgggtatttaaaccctctgattcgaatcaaaaatcccccattttccctcattttctttaactcccttaacttccttgttccctctcttttcagagaatccatcaaaaactcccataaattgcccagatttttgcttttctttgtgggttgttttttttctcgattctccagtgctgtcgagggcaatcgtgggaacagattactagaactaaaggttagttttcaaaacccactgcattttgttttctgtttgagaggaaacactgtttttctgggttttaacatgtatgagagggtttacgaataaatgtttgtagggaatacgtatgaagctacgttttttaggtaagaaattgggtaatttcagaaaaaaaaaatgacctaaaattggcataactgtgtattgtatagaaaatgcttgaacaaacactacttcatgttttgaatacacgcgggtattcggacgaacacttcgaatactcgcatgcctgtgagacttaattacttctgattgtc

SEQ ID NO: 159870 - DNA, 666 bp, Cannabis sativa
ggggtaaatgttgcccttgattttacccaaaatacgtgtacctagataaggatgacacgtggagctgaaaggatcagctcttatagaaatcaactaagtcttagaaaaaggaggtgtgtctcagggaaggtgtctcctggaggagacataagaaggatctttatgctcccggaggccaaggacatactaaggcagttccgggaggtactggaatctattgaacaatcacctcgcatttaatgctgcatgggggaagacgtattgaaatctccataaacgacatgacagatggcgtaacctcctttttcagctattacactatgatcgataagaatagtgacggctactttatgaggaatcacatcaatcaagaggggataaaagattatatccacctaactcctaagatacctacggtacaggtcatgtattttcctattttgtatctgctgggaatatgtgcccctatgaaaccaacacagaaagacaagtggtccattcctagggatcaccccagaaaaatactataaataccccacaaacaaactggaaaaggggtcgagaattctgggttcaaaggaatcaatgagagaaaacaggagagaaattcaccaagaacattctctataataaatactctcattaataacaaagactcatggacta

SEQ ID NO: 159871 - DNA, 776 bp, Cannabis sativa
  modified_base (223)..(226): a, c, t, g, unknown or other
gaagtaatcaaccgctaccactgtatactgcactcctcctttgcctttgggtaattgtccgatcagttcaattccccagatggcgaaaggccacggactttcaatctaagttaactcgttgggcggagcacgaggtatctttgaaaatctctgccatttgtcacatttcttaacataggcctctgaatattcaatcattgttggccagaaataaccttgcctnnnnattttcttagataaactctgctcgccggcatgatttccacaaaatccatcgtgtagctcagacaaaagtcgtgcagcttcttcttgagtaacacatctgagcaataacatagagaatccttttatgtacataattccctctactatgatatactgtgctgccttcctcctcatctttcgagcttcatttcgattatttgggagttcccagtgtggaggtaggcagcaatcagtgtcatccagtttggggaagtgtaaaccatttcgatctcttatgtgccagtaatgcaaggctcttcgaggaactggataggaaccaagttcatctaatcacttacattactgcttgccaatcgagctaacgcatctacggttgtgttttcttcccttggaatttgtctgagaccgtagcttttgaattgtgcgagcaggctatctgttccccccaagcctcgtattctccagatacatgatttaccaccagttgtgaataactatagatttcaatgtgttcagctctcatctcgcgggctagttttaggccagcgatt

SEQ ID NO: 159872 - DNA, 740 bp, Cannabis sativa
cttgccaaataagaaaaccccaagagattttccttggcaagaatcgggtgcaaaaatcccaaaggcagtgacattgcaggaaaaaaaaagaggaaaagagagaaagggaaaaaagggcaaagccgagaaagcaagatctactctaagccctatagacattattacacaagataaggatgattcctcaacagaaacgtagtgaaaaggaacaatcaagacggaaaaaaaaaaggaaatttaacgcatcatacagtaaactcaggcaaacccattcctagaagttcgacatccaacccagaaatcataaaacatgctatataaacgaacagtaagcaagtataagggatacgaagaacttacatgaagtttgaaggctgggggttggtgttgatcaccggtagaaggaagactggcaacggcgaaggaatagaagcaagtaatctatggtgtttgaagtttcttttttctctgagaaaactctaagaaaatttggtaaaatgctaaaaataaccaaacgaagtaagaaggctggcttttataggccagaacaggtgtgagacagctatgatcgaccatcatcgtacggtcgggatggcaaacgatttgcattctatagatccaacgattggaataagtactcattaaggcagtagaaaacgtttgagtattcgactgacacccatttaatgcgtcgtatcaataaatggacagaaaatgaatcgttgtctgcaaaaagcaaa

SEQ ID NO: 159873 - DNA, 507 bp, Cannabis sativa
agtccgaaaggcatgactaggtagcagtatacccccttatctgtcctgaagctagtgcacacttatctgctacgtgcattttaatttggttgtaactggcgtgcgcgttcatgaaggacagtagtttgaatccggatgtggcgtccaccatctggtcgatcctggccaaagggaaacaatcctttgggcaagctttgtttagatcagtgaaatctatacaaacccgccaggttttgttaggcttcggcacatgaccggattggccagccattccgggtaatagacatctcgaatcatgtcactctttagtagtttgtccacctctttctctaaggcttcagcctttactgagtcgaggggacgtcgcttctgttggaccagtggcatgtccaggttgacattgaggacatggctgatgacgtggagacttatgcaagtcatgtcttcttggcaccatgcgaaaacgtcaatggtacccctcaatgtctttattattttttctttttc

SEQ ID NO: 159874 - DNA, 533 bp, Cannabis sativa
aagttctccaagttctgttatgtttcgggacgagaaaaggattggctatccacgagggataaaatacctcgcgtataaaatcgttgactagcaacttgtcaacttcttgtttcagtggcccttgcctctcggaatcaaagggcctccttttttgtctcttcgctgggtaggttggatcaacatttaagtgatggcagataatcttagggtcaatccctatcatatctccatgactccaggcaaattgatcttcgttcgccttcaaaaagcttattaattgttatttaagctgctcgtccaggttcttcccaatgtacacacatttggtgggatttcctgggtcgagaataacctcctccaattcttaaatatgttttagcgggttactttcatcttgaactcgaggatcaagatcttcatctttcttcttgttttctccagcgtgatcgttatcagttgatgactggccttcctatgctgcagctctatgcgataacaatcgcgagccagcatctggtcgccacgcaccaccc

SEQ ID NO: 159875 - DNA, 778 bp, Cannabis sativa
tataggggccgtccttggtcaacgaagggaagggaagcccttcgtcgtatactatgcaagtagaactcttaatagtgctcaaatgaactattctactactgagaaacagttgttttccgtagtatttgcactcgacaagtttcgttcctacttgattggttcccctatcgcggttttaccaaccattctactcttaaatatctcctttcgaaaaagaatgttaaggcacacttaattaggtggaacattttgttacaggaatttaacttgacctttaaggacaagaaaagagttgaaaacgtggcagcaaaccacttttctcgtcttgagttttctaattctgtcgatggccctgccatctgagatgactttcctgatgaacatctctatctcgtcactaagttaccatgctacactcatattgtaaattacttagtgactggtgagcttccagcttcttggaatgcacaagataaacgtacatttttggtcgaagttcgtaacgttgactgggatgatccatattccatatcttttcaagtactaccctgaccaaattatgagacgttgcattccaaatggtgaaatttttagtgtcttgaacttttgccacaacgaagcatgtggtggtcatttttctttgaaaaagaccgctaccaaaatctaacagtgtggtctatacgggcccactttgttcaaagacactaataatttgtgtcagtcttgagaaaggtgccaaaaattaggtgcactgtcctaacgacacatgatgccattg

SEQ ID NO: 159876 - DNA, 510 bp, Cannabis sativa
ttaaaaattgagttcaaggtcctacttttaccattttggaaaatataggggctattttgtcatttaacaaaacaaagggtccaattaataacttttgcacaacacaagattcatacccttattataatataaaagtgtttacaattttttatttttgtaagaatgtatatttttaaataataaacatatattgacactgtttatcaagtgtatgtactttataaatttatttataaattaatttttgatgaaataattatttgtgtgaaaaataataaatatttatatttattattaactggattaatagaaatacaaatatcaatttaatataattaaattattaagggtgtgtttggaagtaattgtgtaattactaggtacggtaattactagggtggtaataactagtttagaaattacacaatattttaaaatacaaggtgtgtttggatataaggtggtaattacatatgaatttctaatatcttgtttggcaaaatagttagt

SEQ ID NO: 159877 - DNA, 735 bp, Cannabis sativa
acataatgttaatgtaatcgttattaaaggggacttagacttacccttaccagaacctgaagtgctggcatcgggagcccccgtatttttggcactgggaccacgggctttggtctgggggtccttcgctccaccggacccccaatacgaagggcccttccggtggccgcctgggccttagtgtaagcccactctggttccctcttgaagaggtactttcggtatttatcctccgccgtggcgataatatcatcctgaaataccttctctgcggccggagccttcacgttcgggcagacgactttggaaaggttggagtcatccaccgattgttgccccaggattagcttggccttccgacagtgctccgtcgtgaccaactccccgacatcaagggccttcttgtcatacgtggccaagatcttggcccgttggagaaaaagttgagtaggttcggtccacatataagggggatcctaacccactccgtgagaagctctggatgatccacggcctggaacccggaggagaagaagaagcggtgacggtattccttcacatgcttctggtaattaaaaggaaatgggccctcattcaaagggtgggcctggagatcgtaaaagttgtccttgagtttatctccctttttagggatagaaacgagttcataaaaatataaaatttctgccggactaggagagccccagctctgggcagaataaaaaataaacaagc

SEQ ID NO: 159878 - DNA, 570 bp, Cannabis sativa
  modified_base (75)..(79): a, c, t, g, unknown or other
caatacataaataacaaactctcattgagcttaacaagctaggcttccaacaatcccattcgggcaacatgctcnnnnnatacacatatgggtaagcctttcgttagtggatctgctaacatgctagtgctaagcgtgtattcaatagaaataggagactttgtaactttttctttaataaaatagtactttatgtcaatatgctttgagcgagaagtacttctagtgttcttagagaaagctactgctgcagaattatcacaatataatttcagcggcctcgtgataaaggctacaatatctagtgctaaaatgaaattccgcagccatattgcttgacaagtagcctcataacacgccatatactctgcctctatcgtggatgaagctatgagtgtctgcttgacacttttccacaatacagctcctccagccatcatatgaatgtagcctgaagtggaccttattatcgtccacgcatcccacacaatcggcgtcactaaacccaactatatctagagtgttagctcgccgataggtcaacatatgatccttggtaccctgaagata

SEQ ID NO: 159879 - DNA, 528 bp, Cannabis sativa
tggaatcattttctgttcccgtcatgctggcaacctcttcattcattttctcctgatcaaataaaatattagaaacacaatattaccttcattcattttaaaaatattatgaaatgaaaatttaaaacttaattgcatgtagttctcggcatgtctcgctaacccaagtgtctgttccttttttaaggtggctatttttccaagcataaattgtatagtctttagggatgttcaattcaaaagtaaggttagtttgtgtaatgtgtaaaaaaaatttactaatagaaagttaataatattacttacaaattcattacgagtcgctgccatcgactttatgccttgcgtggacatatacttcatttcctttctatttttcttgttttgattagatcatgcaataaattttgggctcaaaaataattcaacaatttgcttccaactctctatagagtagtgatcaggtacaacattgataacacttttcaaattatttggatcccgagaataatgttctagaaagtgact

SEQ ID NO: 159880 - DNA, 532 bp, Cannabis sativa
taacacattaaataaaaattaaatctgtttctttattgacaattgaatagaaaagattacattgaaatatagtttcatttagggcacaaagcctaacatatgctggcgtggagacttcgcaaaaagagtagtcggttaagttagttatttctaactagcttaatctcattttttagcagccaccgactttaagatcttgatcctaatcctataaataccaccttgactcaacatttgaagacatgattaagttacgagtttgagtactctattcaaatgagattgagaggcagagagagaaaagattgagtggtacagagagaggtacagagtaaagagagatattggatttgggttttttgtaagaagaatcttctagagatgaaaaaaattcttgggtgaaagtgtgagagtggaaacacttggtgagaatttgtaacgccccaatattttgccttattttacaaagtgctaattttgatgcattaattaaaaagattcaaagctgtttgaaaatacacagtgggtttta

SEQ ID NO: 159881 - DNA, 774 bp, Cannabis sativa
gacatcgtaagccttatttagggcaattacacgataatcaaaggggctagtgacagctccattatgaagaatcacatcaatcaaggaaggatgaaggttaatctcacttaatctctatgacacctactaaataagtagtgcatgctctattttatattttttttgggaacttgtgcttattcataactagcactcaaagacaagttacccctttttaactattcccaccaatctctataaatacccctgataaaaatgagaaggggatcgaaaaaaggagagagaaaaacacaccaagaacattctctatacaagaaatactctcattaataacaaagactcgtggactacgactcattaatgccctaaccacgtaaaaatcatctgcactattatcccaaagctcttatcgttatctcatttaattggttgccgaaaacctcgaccaatattttagtgctttcattgagagatgtgggaagcgttgtttgaaaaacgacagtcgaagatcaaagctgcaatggtggaaactcgaaacaacacacgccaaccttgtcccccccaggatcctcagaacccagaaggtgagaaggctgcttcacgagtgaatgtgggctctaaggaacgataagagtcaaacgacgaggaatacaaagaaaaccttgaagggtacgatgcttacgacgaaggtagctacactgagttgctggttgttaacgcggatttttgtaaaccaaatttgagcctgaataataaacttgcacagaaaaataa

SEQ ID NO: 159882 - DNA, 716 bp, Cannabis sativa
tatcacccaccaaagtttaataatgggattataaagttcttctctagtaaaataagagactcacaacgacatcaagattaaacaatcttggatcactaatacaatcatcatcgtcatctcaaaagatggatacacaaatagaaaaagtttgggtctcaccaagtgggtattatagaagagcaccttagagaggacaatcggcaaatcagaactggtaggtttaaagagcaccttgcaaggatttaccacccaaaatttgagctaaaatagatgagaatcaaccacttgatcttcaatgcaaaatggcaaaacccctttctctctctagctttctttctcttctttccctctattttcctttctttctcttggctgacttgctgctcacgaagcacttgctgcctttcttcttcttctttttttttttcttttaattgtttcaaacaagatgggccttaagcccttattggtccaagcccaacaaaaggggctgacccaacaatacgtacctttttccatgcctttgctagaagttctcatgaactttgatctcgcactcaccataagtgagaatagtttggtcattattttttagaaattcatatacatacaccatccttattagatttcaccttgaaatctttttgtaatttaggtggcgtttggtaacactttttaatcagttttttgtttttaaaattgaaaaagtgaaaata

SEQ ID NO: 159883 - DNA, 933 bp, Cannabis sativa
agtcttggttttagtccaaatcccagtctgggttccggtccaggtctcggtcctagtctttgttcgggttcaggtttgggtccttgtcagggtctggatcctggtctgggtcgagggtctaaggtcttaatgcgggtttaggaccatgtcaggtcaaggtcacggttcgggtgcgggtctaggttcgtgtgccaagtctcaagtcccagtcgtagtcaaggtctcggccaaggttctggtatgagtttgggttatggtttgagttcggtttttgtctcaggtatgggtcctagtcacagttccagttctaattccgggttttggtttggttctgggtccgggtctgggtccaggttgcggttggggttcgagtcttagtctgagtctgggtatgggttttttgaatcccgatctgggtccaggttcgggttctgggtctgggtcccaagttcgggtctgggtcgtaggttcgggtctggatctgcggctaggacagggtacaggtcccgtgtttcgatactggtctggatcttggtctgtgtcggtattcgggtccaagtctaggttcgtgtccatgtcatggtctgaatcaaaatttaggttaggggattggttttggtctgggatcaagtctcgagttcgggatcgggttcaagttcgagtcgcaatcctaatctgggttcgggactgggtctaggtataggtctgggtctatgtccgagcccgagtttcggggctgggttctggtctagtttcaggtcctggtctaggtctaggtcttggccacgaccccagtcctattagggtcttggccacattctagtacaagtttttgtttcttgtcttaggtctgggtcttggtccaggtcctagtccagcttcgggtccttctctgagtccaggtcctactccagcttcgggtccttctctgag

SEQ ID NO: 159884 - DNA, 505 bp, Cannabis sativa
taacactacgtggcttggcacgtaacaatcacctagtatataaataaaaattgcaataaaaactttggtgaaaaattacaataaaattttttaaagaaaataatttttatataaaaaaataattaaatgattattttttattattcagaggttaaaaaatataaatatgtgtattgcattcacctcaaataaaaaaaatacaactaattggacaatattaaatttatcaattacacatatagaaataaataatgttaatttttgagacaagttagagtgaaagaatagatatttattcacttaaaaaaaagtacaactaattggacgatattaagtttatcaatcatccacataaaagataaataatgctaattttgagacaaactaaagtgaaaaaataagaatctatggtgccgtttggtaacaattatgttttttaattttttaatcacaaaaatgaagtagaatttttgtttttaaagttttgtttttgaaaaataaaaat

SEQ ID NO: 159885 - DNA, 704 bp, Cannabis sativa
gtgctatatttggcccactatttataattgtgcttcaatgcacaagatttaaaataagaaaaaaataattaattatattagtggtcatctcacattttatttagattatacaaaacttattatttttgcttcttttattatttaaataatggtaatatggtaaataaagtaaataaaatttagtaaaagtcaatgaatgataataattagtggcattataataaataaaaaagaagcatttattgtgggttaaatttggcatggcacaatactatatcttgtgctaaatttggcacaacttttagcatgtgccaaatttagcacactttttaaaatactactggagtataatttttttttaaagtgtgctaaaatatagcaatataccacttttttgacactctattggaaatgctcttagaaactaattttttttcttattgttgcatgcattagattttttagtaggataaatgatagacgtatttaataattggtaaatgataaaaaaataatagagagaaaatatgaataaaataataatcaccttctcatcaataaaaattatatcaagacttatcaattctctattcttcttagtattaaggatccgtttggcataacttttaaaaaagttaaaagctattttttgaaaaaactgtgataaaaatgtgtttggtaaaccgtcaaaaacagcttttgaa

SEQ ID NO: 159886 - DNA, 599 bp, Cannabis sativa
  modified_base (289)..(291): a, c, t, g, unknown or other
gctacctcgcgccgtcgctctaacctcattcataagcttcagaaagatgatggtacttgggccgattgggataatggccttccagatgtcatagttgattatttcaagacccttttttctagtgggacgtgccactggctgaatgttactaatggtattagtcctacgatttttgaagctcataatgttgctctgctcgcgccaattactgatgaagaagtcaaagatgccctctttcaaatgcaccctgataaggccccggaacctgatgggatgactcctgcttttnnncaaaagtgctggcatattgtgggtaaggatgtgatcaagcaggttcgttctttttttctatttggatctttacctgagggattgaatcatactaatattgtgcttattcctaagaagaagaatccctcacatatgtctgatctaagaccgattgccttatgtattgtcctttataaagtttgctctaaggtgtgagctaaccggttaaaagttgctcttcctctggtcatttctgataatcagagtgcttttattcttggaaggctcatcactgataatatcatgatttcctttgaagtaatgcatta

SEQ ID NO: 159887 - DNA, 703 bp, Cannabis sativa
gagagagagagagagaaaggttttcttgaattttcttaatttttgtaaaaaaaaaaaaagtgtaacaaaaatgattttaaatcaactaatatcagcctaacaaaacttaaaattagattaataatttaacccaaatcccactaatggacaaaaccaatatagggcaaaaagaccataatgcccttgcccacactaaaagtcatacaaatcacatagtatactaaaaatactaagatatgattctaatagccaaacaccgcattcaaaatttacgggcacaaaacatgcaaaattatgaaactccatatataacatataaaatgcattttgaattcaaataagtctccataaactgataattcataactaatatacaagtttcataattaaaccctaattatatgctaatttccaaattaaagttaagcagtctttacaattatctccccttaaaaggatttcatccccgaaatctaacctgaacaactctggatattgagccctcgtgtcagactctaactcccaggtgacctcctccaccttgatgtttctctaaagtaccttgaccaaagttatggtcttgttccgaaggacctcatcctttctgtctaggatatgaactggttgttcttcataagataagtccagttgtagctcaagattttcataacttagtacgtgagcagggtttgaaacgtacttc

SEQ ID NO: 159888 - DNA, 591 bp, Cannabis sativa
  modified_base (431)..(432): a, c, t, g, unknown or other
atttcctttcttcgacggccaggattacttcgtcttgctcatgttgtactgttcgggcatacctttcccgggctttgcctgaatctccagctatgtgcggacctccaataatgacttgcagatgtccatctactggtggtggtagtaaatcttggttgttatcgcccctttaattttgatcggccttgacatacttttgtacgtgtgaattattttttcttatcaggaattcaatttcctgcttcagattgttgcattcattggtgtcatggccataatccccaagaaaacggaaaaactttgtcatatctctcttgcttacatcttttttcatgggtgcgggcttcttgtacgggaataatgactgagtagccatgtacacgctttctatatcttctgtcaggacagaaaatgcagtaaacttggtaggnntctccctgggagcttgttcggttttactagcaaacttcccctttttcccattttcttgcctattgttgttgttgggccgtttaccacccgagcttgaagtgcttgggtattggaggagctggacaaatatcctagcagagggagcttttggctggctag

SEQ ID NO: 159889 - DNA, 594 bp, Cannabis sativa
tccttggatctgcttgatgagaaatgtactgaatcacaaattacaaatgcagcataccaacaccgagtgacaagatatttcaacaaaaaaaatgaagaaaaggcttttaaacgttggtgacttggtcctaaggcgagtgtttgcaaatacgagagatgcatctgcaggagtatataacctaaattgggaagggctttatgtgatagaagcaatcgtgggaactggggtttataaattagctcgacttaacggctcgctaataaagaaccactggaatgtggagcatttacgaccctactaccagtaaataatgttgtaatttatctttctgatgtaatattttgaacttctagtattcataaagttgaattattttcaagtaattacaaagttttattctttaaaattacttgaggggcatatatatgtgcatgagcaactgaaaattatctggaaacacatagtatattgcgaaccccccattttaattttcttaacagtagcagttgtagatgagattcaactcataaaaacaacgataagctacatacgaagctgaatgtttaacggctcgcattttattggaatgtatta

SEQ ID NO: 159890 - DNA, 554 bp, Cannabis sativa
  modified_base (495)..(496): a, c, t, g, unknown or other
caattaaaaagaaattataatattcaatatctcgtacaagatatatatgaagttaactagagaaaagttttaaaaaaatatataaaagcaaaatttcttaaaaattgttgctcttcagtacatacaatcaaaacgaaacacacttctcaatcgtaaattcatgcacagtaactccatccttcttgaaagactttaaaacattttcttgtacactttttatgtatgcaactaacttcattctaatcaattttgaagttcatcatcgctagaaatcaagtcctgtagcaattaaaataacattaaacaaactataaaataactttctactataaaatatatatattttttcaaatgaatgaactacaactagagaacatttcaaacaagacaaataaaaaaaaacaaattattaatcttgataatatttttcttcggaagcttcaacttatcaaaaacatcagaggtcttatcacccacctgaaaatattatgatgnnaaaattaataaagcaatgaactaattaaaatacaattaatagttatacaaaactgtaa

SEQ ID NO: 159891 - DNA, 572 bp, Cannabis sativa
  modified_base (225)..(228): a, c, t, g, unknown or other
gtctgcacaaaacaaaaatagtatgtttagaaaacagccatcagaaaacacaaggcatgaaagtaaagaagctcaaaagtaaagtaaaatgcaaggtgaccgcccgcctagaaactcagaagtccatcatcacctgacattgatcttatctcagacatgacagccttcccttttctggcaaagggggcagatggccgaagaggtgaaatgggctcccttatgcgnnnngcatgttcaacaggcctgggcatggccgggagtttcttcttcctcttcactggggtcacctgctcgtcctcgacctcatcttcaggattcaaaggctcctgagcatactgcttggccctggaacctcccttcaacttagcttcacgcttcagttgaatcaactcattctccggatcagctcgtttaggccgaccagcatcagacttcctcttcttccccgccacggacttaggagaaaagtcctcgaggtaatgcccgtacttcaccagattatcaccggaggtcaactggataatatccctgtcttccccagcaaccgggcaagtttctgagctctatcccta

SEQ ID NO: 159892 - DNA, 617 bp, Cannabis sativa
taagttataactcgtgataagatttactaattaaataaacgttatgtttggtacgattttataaaattaaaaaaaaaaaaaactaattgacgtataaaacacatttttaattttttaaaattgaagaccgtttttaaaaattaacagggatcgtttggtaaaattttttaaaaacagtttgttaaaaattgagttttaaaaaattagaaaacagaaaacatcaaaatgtgttttcaattttcaaaaataattttttttgtctaatatattatattttatatttttgcttacatactcggatcctagacttggaaccaaacccgaacccagacccaaatgggttcatgtcatggtatagctttaactaaaaatagttttaaaaaacttgtgtcaaacactattaataaatttttaaaatgacaaaaaactattttctattcttacttttaaaaacacgattttaaaaactgaaaactgaaaatatagtcaaacaggctctaatctttatgcggattggcttgtattgttgaatatatatatatatatatatagaagttgaaagagtaaggattaatatgtagtgtagagatcgagagatgagtgtacgtatgtaccta

SEQ ID NO: 159893 - DNA, 523 bp, Cannabis sativa
tcatcttggatacaagtttgtaaacaacattacagaggctgatggggcgaaagtccttcatagtagtcggcttcttaactttaggaattaaagtaagaagagttttgttgaatgtggtagggtcaccattgtcattaaggatttgaagaactaccgatgagacaagatttcccacaatgtgccagtgatggtggtagaacatggccgacataccatctaaccccggacttttatcagatgccatggatttcaaagcaaaatagacatcttccttagtaaagtcacgaaggagaaaatcattttggtcatcatttatggtagtaaggatagtagatagtacatgtgagagagtccaatgatcttcctctgaagcagtaaaaaggtcttgaaaataatgagaaataatgttcgtaatcccctcacaattagtaacaagattaccattagcatccttcaaagatttaatcttgttggtggaatttcgagcactagctttggtatggaaaaattttgtgttgcgatc

SEQ ID NO: 159894 - DNA, 540 bp, Cannabis sativa
ttgttacagcctttgacacttcttaagtggaagtgggaggatatcaccatggactttgtggttgggttgcctataaccacgggtatgtacaattcaatttgggttgtggtagatcgattcacgaagtctgcacattttataaaagtaaaaacaaccttaacagtggatcaatatgcagaattatatgtcaaggagatagtaagattacatggtgtaccaaagtctataatttcagatagagatctgaaattcacttctaaattctggcagagtcttcaacgggatatggataccaaactgaaattcagtacaacttccatccttagactgatggacagtccgaaaggactaagtggtaattagtaagttattcttgatcgcgatctgaccagactagctcttggttgcgcaggctgttctagtagtatggacactaggtgaaacagcaggagttagggtaactcgatcggatccagtggcggtcagggagttcagattccccaaatgttcatggctgaggtagaggccctagaggcaggg

SEQ ID NO: 159895 - DNA, 503 bp, Cannabis sativa
  modified_base (55)..(69): a, c, t, g, unknown or other
agtgtcaacaatagagaatttgccccctccagtttctgtgaaaggagtaaggagnnnnnnnnnnnnnnntggtttctaccgaaggtttattaaagacttctcaaagatttccaagcttttgtccaatttacttgttaatggtgtttcttttgagtttggagaagaatgtttgaaagaattcctggttcttaaagagaaattgatttcagcaccaatagtcacttcaccaaattgggagttgccctttgagttgatgtacgatgcaagtgattatgcaatcggagcggtcttgggtcaaagggttgacagggtgtttcatacaatctactatgctagtagaaccctgaatgatgctcaactaaactatgccacaacggagaaagagatgttggcaattgtgtttgcttgtgataagtttcgcccttacttaattggtaataaggttgtgttgggttttatgcactaaataaaactcatttcatataatcagatttacttataaa

SEQ ID NO: 159896 - DNA, 528 bp, Cannabis sativa
gtggcatttatcctcatttttccaaacttagaaagaaaaattagaaaatttctcaaaaaactctctctctcttttcctctccatttcgacctcttggtgcagcaagaaaatttggattttccttgtgatttcaactccctttggtgttcaaatcaagctaggttagcttctaatcatctcttctttaagtttattgaattttgatgaaaaatggtgtaatgcatgcttagtttaggttgttgttcttgctgtgattttttgttgttgtttgcagagatttatacttgtttatttgaggttaattaagctgcttgtgatgcttgatagttaagttgattaaagttatggtttttctatgcaaaagcttaagttttcaaagagaaaatttgaattttggtggctgtatttgttgcatgagttaggtttttgttactgtagtttttatatgcttgaatatgagtttttaatcaagttttgatgcatgatatgttgcttagtcaagttttgagttttagaactcaatctttg

SEQ ID NO: 159897 - DNA, 502 bp, Cannabis sativa
cattcaaaataattcaaaataagaaacacaagagtccaaattaaaaataaacattaatccaaaagttaaaaaaaaacataaaaaaaacaagacatccatgcatagttcaaaatatcataaactagtccagtaaaacaattccatgggactaactatgaagcgctactagtagttgtggtagttgtctctgttcctgtgcttgtaatacatacttcctctagaagaaaaataaaattaaaatatattagaaacaaattatttgcaagataagaatattaaatatatatatatgtaatgataaatttattttacccaattcaactagttcagagatctccaaatcttcaacttcattcatgtattgtctcaacacaacaggagcaacatactcacaagttaactaattctttgagcaaattaatgcttcaactgtctttggagacaaagaacttctaaatggatcaagtatccgtcctccagtagaaaaagttgattcagaagc

SEQ ID NO: 159898 - DNA, 660 bp, Cannabis sativa
tttctatgtattttatttcattcgcacttaattacttttaattgcctaattatcactaattaattgtttaattgcaaaatttgagaggagagtattgattatgctatagtgaaatagacatagatttcgatatattgaccactttacgagaccgctcgttatcagaatgaaactacaataactggaagaaaaaaaaagttctcattattaaaattagcataaaaataatataaattaaaagaagatttctactatccttctcaagtgatagaaaaattataaatgcaaatgaagaatgataaacttacatcgatcagagtcataccaattactaattggatgctgttcctcataatctaaatcatggtgctttgaatggccaaactaaatttgtatttcagaatgacaattattccatgcttgaaatagtagataattaacaaaatgagttgcttctttgcatacaaattaatcaaagagtgttatagcagatagaagagttatagtgcaatttaacatgtttatgtatcacaacctgtaatatcactaagaatgctaaataattatttcacttctcatcactttatatgttactaaatcatgatatgaggtgatacatggaagaacaaaaacaaatgattctttctaaaaatcattgtt

SEQ ID NO: 159899 - DNA, 625 bp, Cannabis sativa
  modified_base (36)..(60): a, c, t, g, unknown or other
gctaggagagacctaattttccttctccagattctnnnnnnnnnnnnnnnnnnnnnnnnntcaatatcaacctttatgttactcatattaataaaatttaaaaacagatagagttttaggaattctcagtttgtgatgtttttgtttctgaatctgaatttaattcagagtcttgatcttctttctggtttgaatgtgttcttaattgtcaatctttctttcaagatttcttgccaaattccttcctgatattctttcttgactcttgttgatcttccttagccaaaccaggctctgataccactgtaggaattttactactttgacctacaccaacaaaacaacaatatcagtatctaaggtcaaaaatggcctttccacagtctaacttaagtttaatggcctttccacagtctaacttaagtttagataaaaacggcaccgttcaagtcccacaacaccaaaacctgtgtcgtattgaacccagggttaaagactctctaagaggagtctagaaaccttaaacactcaaacactcagcctctcaaatcgaaactagaaaccccagcagagcaagtgttgggttttatgccctaaataaagctcatttcaatataatcagatt

SEQ ID NO: 159900 - DNA, 500 bp, Cannabis sativa
ggctgaatagccttctgtgagacagaagcatacgaactgctaatttatgtattgacgagaaatcatgtgagtgcatacgctcatggcgaggcctcaaccttgctgcatgaaagagaaagtgaaaacactaaaaatacttagtgtatattatgcgatatacaaactgagtatagatagtatggcgagccaagataatagacaacaaagggtttatctcgctaaaagatgttttgcatgcgaggaagatcttctcgaccccagagagtataaccatcagggttaagagaatattagtctcgagaagctaaaattacaagctgctgctcgctatcaaaatgatcttggctccctcctctgtgaggcatccctatgagatacgactggccgtatatctttaatgatgcgctcatctcggcccaataaaggtgggatattcatacctgtgtaaaaacctcatttacttggcttgatttgtaatcaaatcccacaattttaaggat

SEQ ID NO: 159901 - DNA, 578 bp, Cannabis sativa
aaacaaaaggatctattgaagtcgaataatgattcttcaatatttttaaaattcttatgcttatctctttgtgtttcaattatttacaaccttttatttcttataatctcaataattgagattaatattttgattatttagaaactctaaaaattagtggattatgataaatgattcagtttaatgcttcaagatttgagttttttgagagaaatatttatgtaggtaatttacgtgtgttctataggaatagtgctggaacattgacattccaatatggctattgggttttaatgaataaaagaacaattgtgatcattattgttgtcaaaggaggttctgattgtagtaccttatcatgttcctttttagtcaacaatacaatacaatagctgtatttatatttcatatatctgtataaattcagtttgatgttttttgttcatcctctttcaatttgtgtgcaactaaatgtagaacaaccttgtgaaggtgtttaaactgttggttaaagatcgagtagcttcgtatcttcattttattttcttgaaaagtcctatactttgtgaagtattgag

SEQ ID NO: 159902 - DNA, 605 bp, Cannabis sativa
gttacgagtgtaataattttaaataataaggagttattataaatatttcaataatttaagtgaaaaaattaatttctaaaagattcttatttagtaacaaattattacaaaataaattaataattactagtaatttaattttaattaacattttataaggaaataaagtatcaggttattatgaggttacaagttattaattaatttatttattttaatttctaaattaatcacaaacattcaatagtgatttaatgactgaaaataaatgtaactatgatggttacatatttgatggaactattaaaacctcctccatattttaatgtattttgatgtgtgtatataattttattagcatgctacatatatttaatcattatttttatatattttaattgtatgatatattatttattttaaataatatttaattaatttatattttattatatacaaggtggtatataattttattgtcatggtatagatattttaactgtgctatataatttggttgatatagtatacatatatatatattagtaatatatatttttattattactgtttttttttttgaataaaaatcataagatttatta

SEQ ID NO: 159903 - DNA, 552 bp, Cannabis sativa
tactcagaaatatcttgaataagataggctcgtggagtatgcagatttaactgcaaaatcacgtaaaaatatatggtgttattattatacttgttatactttattaatttcttataatttttgtgttaaatttattacgaaaaaggcttattattggttaacgaaaaatatgcgttaacacctaaaatttaaataaatctccataattatgaaaataataattaaaagtccaattctaaaattaaattctaattacctactaagggtccgtttggcacaacttttgaaaaatctaaaagctgcttttcaaaaacgctgtgataaaaatgtgtttgataagtagttaaaaaatagcattttgaagaattttcggataagctacagctaaaagctaaagctgctccaacccaacttttagaaaaaacggttttgattaaaagactaaaatatttttttttactaaaactatatttacttatttattatgtattaaaaaataaaaatatttaaaataaactaattataataaaaataaataattattaaatttat

SEQ ID NO: 159904 - DNA, 560 bp, Cannabis sativa
  modified_base (40)..(43): a, c, t, g, unknown or other
ttgacactcacttcccagatctcgcatcaaaatcatagannnntaattggtgatcaggcaattaaaaataatttagtacgaatgaaatagaatacatagaaatataggaaaaataaaatcatactacaactataaaaaaatatcaaacaatctccatctagaccataatttaatgtttagctattcatgttcattgtagcaaattcacacatatcaatttaagaatggagaagagaatagagaaaaaaagaatgctgaaaaccccgttaaaaaagctttttcgatggatttttatctctaatttttgtcctccttgattgcttgttaaaagctattgaagttcacttcttatatagccaaaaaatagtaagaaaaaatgatatataaaaaaaacttattttgcttaggataataaggtgtgggccgtggcccatgatttccatgcctaggcgccccctttatttgggcagtgagttttctactgcattgactgatcgtattttagctataactctctcgatattgctcggaatttaacgattcaagatgttccaaaaaga

SEQ ID NO: 159905 - DNA, 526 bp, Cannabis sativa
tttcagattattcaccaatatttaaaatgccactaaatcaattccaattgcattttgggcccgaacctggttcggcctgaaacacctgcttgtgactataccgcgccaacctataagaacacacctgaaaaagacaacacacgcatactatataataatatagtcccataagaacgtaaataaattaatttcactgttttacccttcccgggtcaaaattactaaaatgcccctgactcatcaacggggtcttacatagtataaatcatttaaattcccatatattaaattatataatagtataatttctcaattattcataattatctagttagggttctgctaatccatttcataattctagggtattatagtgagagtgagagagagagtggagtgagttatcagacgtagaataggcttagacttagggtttttagggttgagttaaggctttttatataggagagcttaaaccctaatttacaaataaaataagtacatatttacatattatattgattaa

SEQ ID NO: 159906 - DNA, 701 bp, Cannabis sativa
ttgtttgcctataaataccaatgagcattggcacataaactcattttcaccatctttctttgctaagtgagttcagagcgaaaatggagattttttggcttcaaatttgctgaagtgccttcatcaaaactgctcgttggcttgacgttgcttgaatccagacatctgactcttgagtatgttctcgatttcttttatgcttatttttgcatgtttatttttcgaatgcaccttcgactttgccgtagaacattcataggaaaccctaggtttagaaattctgcgattcttctttgtcattgtttcatgtgatttcacagtccataatgcttgctttctgaactgataatccctgtctttcatcttgcttattctaagcttcatgaaattttttcctaactcgagaaaatttcaaacttcctgagttttgacttttctttgaacattcttattctttaatctgttgaatactcctggtcggcatatttgcttgtttatcgctcgatattttggccaaacactcatcttgtgtgttgtcttttgtagatgaacccgggtgagttttgggagagcgaacatcaaatcgaccaggacttgcttcaacttttgcatgaggaccatccttgtctctgctctagcccaccttcatccagtgaaggacattttccttcaaatcttttatccagccatagaatgatggc

SEQ ID NO: 159907 - DNA, 726 bp, Cannabis sativa
ttaaaatttccttcatatttatttaagaaaataaaacaaatgaaactacagtgatcgccggagttgattccagctagaaaagtcaccgggagtttgctgtcggcaccggaaaagtcgtcggtgccggaaaaatcgccggaaaaataatgtaaaagaaacaataagctagcatatttttacttaaaatagaatttttgtaatgtaattaattttgtgatgtttaaaatattatttagtttgttaaaaaaaaaaaagatattatttagtgtctttaaataacgaaaaattatatgaaataatataattgcaaaataacacttattgaaaaaaaaaaatagtatatcttagttttttttaataacatatagtatataaaaaaaaaactaaaaaatttaatgaaatagtatatagagatatccatatttataaaagagagaaatttaaagacataaaaaaataataaaaaactaaacatcaaaacaactgattggtatatattatcttgtctttgtgttttatttaaaaaaaaaatggttggctaggctacagagtaagagaaaaaaaaaaaaaaaaagtgatgctgagtaaaccgaggaggaagcacagaagtgtggatgagtatatattttttgaaagaaaatggtaaactttattagaatgaactttcaaccattacaatagataaaagatcagcaggagcagtactctcactgaaaatacgatctg

SEQ ID NO: 159908 - DNA, 569 bp, Cannabis sativa
tgcaaaataaattataccgaacacttaattattcaagattataattgtaattttagcatcaaatttttaactgaatgggcattttattaatttttttaaaaaatagacatttattaacttaattgttaaattttgggtcattttgcatatcttggcccaaaactaaataccttaagtagggctggctctgagttgaaatgggctatagataaaaaaaaataaaaaaatttaacccttactataaagataaatagtattttttttagggaaatttacatggtataccgactattgctatttttttaaaaaaaaaatactgtcagacaatatttttttactttttcactgtgtatttttataagtttcatattgcagtatagtgtgtttatttttttgtttgttttagtattgttttacggttgtttttcataatttattttttttaactcttgctccatcttgcttgaactaatgattgttttctgggtgttctcgtggtgctatgatggttctattcgtgggtgtggaagatggaggctataaaatacatttcttcttccttctctatg

SEQ ID NO: 159909 - DNA, 919 bp, Cannabis sativa
tatttcgagcatcatctggcaattgtacaatttttaagctttgtccctaagagccagtgtgagaggtggacggtaatatatagggatctgatgaaactgagtataagtggtgcccatgccttcaacaaagtaatactcgtcaacaaaatttccaattttgctcacgaccttgtccacggtgcctgtcaaccacttgaaatctggctgagagaagtagaagtaccccgacctgctttgcttgggggtagacttcaggtcaaaaaaccaactgacctcgtgcggagaaggcacaccccacttttgggtggcgtagaggatgaacagggcagacagatacttaatgcccttaggagtaaactgggtctgactgaggcggaagtaatctgccaccttcctgaagtatgtgtgcaaaggcagcattgccccttgtctggtgtgggcacccgaccaggcacacatccccttccgcgagtttgtggctcggtgatttgaggcagggacataacattcaagtccacccagatagccagacttgtccaaatccttcatacgtgcctcagtgatcttggacggaggactcacccatctggcacctaaggcaccttgcctcctgtgaagaattgcattagtgaactcctcggtggcgtagtctactccttcaactaagactttgcccttagcagacaccgactccccggcctcattgtatcctccaaagtttggaggttcaccctcctcatcctcctcaacctcgtaggggctgccaggacagatatcgtcctgttcctcaatttcctggacttcatcgtccccatcatgatctccctcttggatgggcatatcctgttcggtgctcgataatgtggtgacttgagccacatgaggatcgaatgcattgaccttccgcatcgtttgcttt

SEQ ID NO: 159910 - DNA, 620 bp, Cannabis sativa
gaaccttattgcgacgaataatggacacagtggaggctatgttttctatataatttctattgcgatgataaattgttggaaattaaaatggcgataaacttgcaagctgacaaatatttgcctccaaaatatattgacttattgcaacaacattttgtcgcaatagaggtcaaaatactttggagggaacaattccgcgtaaaaagtttctgcgccaaaaaatgaatttatgaaatagactattgcgacaacatgttgtcgcaatatattattcaaataataatttctgttatttttgtcaaaaaaaaaaatagatgagtaaaatgatggagtttggtatacctactgtgacaacatatcgtcacaataaagtctaggcttttcttttatttaacccatgatccatctttcttctcctccatcccattctttttctctagttctctccacaaacccttcacctatcaacattgatagtaagaccttcccaaaaccttgtcctgtccaacctcagcccaagacccatgagctcaatgtagtaattttaatggtgtttagtagtctccatcaacattctcctattaacaaggtaaagtaatgaaaaataattttcttttgtg

SEQ ID NO: 159911 - DNA, 918 bp, Cannabis sativa
gtcgccacgcactactcccacgccatctggtgtttggaatttcaaggataagtgcttgatcgaactgactgcccctagtccgattagtgctggatgaccaaacaatacgttgtaatccgagggcaggtcaacaactaagaaatgttgcataacagtagcagttaaaggtgcctcccctaacattaatgcgagctcgattatgccaatgctagcgatgctgtctctgctgaatccataaaggtttaccatacaaggccttaacttggctttttcgagccccattttctttagagtttccttataaaaaatatttaccgagctcccattgtctattaacactgtcttgatcctcttattggcgagttgaatggttatcaccagtggatcgacgtgaggatacctcacgtttttctcatcttcttccgtgaatacaatgggaggttcctcagttttcaccttcttggaatgttctggggcaaaggccgattgctcgttctttatttctttcacatatcttttctgggcgttattgctttcccctgcgatatgtggccctcccgaaataaccagatgtcctctctttccacatgaataggttataacccctcgttgtttgggttattgggtagactgtgctggttgtatccctagccctgtcttttcacgtactgcttaaaatggcctcgagcgataagactttctatctcgtctttcagttggcgacattcatcggttgtatgcccaatatccttatggaatttacaatatttgttaggatttcttttgctcctcaaattcctcataggttcgggtttgccgaaggctaccttgtgcgaggtaaatattctcccgagtttcattaagctcggtataaatagtatacactggcacatatttgtcatgcttcttttgtttctt

SEQ ID NO: 159912 - DNA, 555 bp, Cannabis sativa
taatacttttttcttctgttttttagttcacatatactgtttagattaatataacattacctttttttcttttaataaaaataagagtgaagcaaaagtcttacaccactttccattaatatatatcaagattacaaagattatttatgtcatcaaaaatatctgattttatgacttggcatcatcaaaaagattatgtgaatgatggttgtatgagacatccaagagattctccagcatggtgacttttgatcataaacataagaattttgcagcagatcctcgaaacgttagacttaggttagcttctgatggaattaatccattcaagacaagtgtaagtcacagcacatggccagtattatgatgccatataatctccctccatgcttgtgtatgaaacaacctaactttattatgttcttgcacatacctggtccagaagtacctagaaataatattgatatatatttggagccactgattgaagaattaaaaactttatgggaagttggagttgaaacttttgatgcgtctacaagaaaaaactttatg

SEQ ID NO: 159913 - DNA, 557 bp, Cannabis sativa
acaaatatataattatatattattttaatttatttaatatataatttaataatatgtgattatgtatttttaaattacacttaataataaaaaaacacgactgtaataaaattgtaacataaatttttttttattattttttttattaagattatatataacaattataaatattaaagactgtaaattttattattattataagttgttttatttattttgtgtactttagcatagctgtttgtttgtctcctttagttcatcttctctcttagggccacgtcagccagcatcattggctctcctttttcttctcttccatttctttctaaacgtgagaaatagaaaccatttttattcattcaaaattcaaatttagtttatttgataattttgttatacaatttagtcagttttaagaaaaattaataacacatagggtgagcaacggtcggttttttacccaaaaaaaatcaaaaattcggttttcggtttttatggttctaatccgaaaaccgaccaaccattataaaaatataaaaaaaccgaccgtttta

SEQ ID NO: 159914 - DNA, 581 bp, Cannabis sativa
catgtgaaaataccagtgctgtatgtatttctaaaaatcttgttcaacattctcgtacaaaacacattgatataagacatcattttattagagaactttttgacaacccaacattgcagttggaatattttgatactgaaaagcaattggctgatatttttactaaagccctaaattcaagtcagtttgactccctcgaaaaatcttttggggttcgcattatttaattcttttcatttggttctccattttgtccaaaatttttagtagttcttatcttgcatctatcattctttcattctttgttgacagaacaagtttatgcttttggatgataattagcttagcctctggtactcttcatacatttgaggttgggttaaaagattcaagttacttacatatgtgtgatcaggataaactaaagtattaatgtatagagttaagtgatttttgtttcagtttcttattaggcctcttgctaaaatagagctacccatactgaggtgtgaaagccatctgttgagtaagctggaacattgtaattagcaactatgatgaggatgcactaccatagaaaa

SEQ ID NO: 159915 - DNA, 568 bp, Cannabis sativa
tcttcaatattcaagaacacaatcacccaaaagtttcaaagttattcattttctcaccaaattacattagaccagagccaaaaacacattaccatagcctatactacaaaatccaatcgtcaaacaatcacattttatcaaaaactcaaaaatcccaaggattcaatgccatttctggccatggaaaaaactaccaaaaaaaaagcgctaaaaatttcatcaaatttcaaatttcaagtaagaagtttgcaagaggaactgtggaaagcctacccactatgaagatggagacctcaaagcttccaatgattattataattttttctttgtaaatatttagattatttcttttgaaaataatttatttttcttgtaatttaattttccttgtaaagggaaaaattatcattgggatatgttgttaaatgtgaaaaaagtaacgattgggtaaaatatttttaggtttttggaatgtaattttagtataggcgtagtatttttggtgccaagtcatcaacaacaagggcaagacccagacaacacgagaaagttcctaccgtatggtcat

SEQ ID NO: 159916 - DNA, 522 bp, Cannabis sativa
ttgaaaaaataataaaaaattattaaaaacgtcacaaaaatattaattttacttaaaaaaaattaaattattcctaaaacatatttttaaactttattttatgtataaacacgtatcttaaaaaatcaaaccaaaattattgagattctaataaataatttaaataaataaagattttttgaaaaaaaaaattaaactcatttatatttataaactcatatcttaataaataaagaaaagtaattaaaaattcaataaatttataaaattattttcaaaagagttataaattaaactaaaaaaagtgttatgtttacttaaacaaatttatattttttgaggaaaataaaatatactcaagtttcttcccgtaaaatttagtttttataaaaattgaattttaatatatcttttttaaatatctaaataaattgttttaaaaaaataaataattttttaaatcacttaattagttttaaaattttaatttaattttttattttcttaatcatttaaaataat

SEQ ID NO: 159917 - DNA, 558 bp, Cannabis sativa
atttgaaaaaaaaattaaaaatatatataaaaaaaataaaatattatataaaataaatttttacatatttgtgattataataaactaaattataatttaccattatcattataatagatcttaacaactcagtactttaaaatttataatttaccaaacactcagctttttttcacagttttgctacagctgctttttctcacagcacagctacagctgttttttcccagagcacagctgtgccaaactggcccttagactataattaaggatgcagtgaggaaatctacataacattttttaattaatatatatatataaaatgtaataaaaaaataaaaaatatatataatatatttaacaagccggatttggcgggcgagttcgggttcaacccgaaacccggtggtgcttaaaacttaacccgcgaacccgctcgaagagtatcaagttgaacccgacccgcccgaacattgttttttaaaaaaaattacgagttgaccgaatcgagttcgggcgggttgctcgggttcaggtcgaacccgctcgaaatgttca

SEQ ID NO: 159918 - DNA, 650 bp, Cannabis sativa
gcacagaaaataaaagcagtaacaataagatatgaacacaaaggtttttacgtggttttgtagttaaaattctacatagtccacgagtcaatcttattagatttctgatacgactctcacgcctttttttaatgattttttcctctcttttttagtgtaacttgcctgtatttataattacatagtaaggcagttaattacatagttgactgatatcttacaacaattatcccttgaaatcgtggggtttgattgcataccacgtaaaataaatgtggttaacatttgaaaattacacaactatgataggttcgcttttaccgggtcaaggtaaacgtgtattaaatatgttgtaaaccataacgttctgggatatctcgctgggaacacggtaacaataaccttggtagccagctggaacttttcccatgtctttctggggttaatgatgtaagcctcgtcattcttgcgcttgaagacataatgctctatctaaaaattgcagttcttggcgacaaggtggacttcagcagtcatcatcatttgtatgccaacttctatctgagagagctgactcgacggagctgtgatccccattgaaaggtgtttggagctgattgatgaaggtaccatgagtgtgccttcctata

SEQ ID NO: 159919 - DNA, 537 bp, Cannabis sativa
  modified_base (498)..(500): a, c, t, g, unknown or other
tatgacaaaactgcttacattttctgtatctgttcgtgttaggaattgtcttcaagttggttatattaaaaaaaaaagttatcaaaaatagaccctctgcttacattattcaatggccatatttttattataactatgatggttattatattttttatctataatagcacatgttaccaatagataattttttttaaattaaattaattataattaaatatattcttaaaataattaatttttaatttaatataatgcccttacttaaaataaaataccataaatacactacgttaaggtactaatgttgcctttatttttttaaaaaaaaataacaatttttaaaatatgggtacccagtaaaacaaagtattactatttaagtaaatgtaaagaaaatttaaacgacaacatccacaatatgttttctaaatttaaaagtgacttctagcggaaaatggccaagaccacacgcagttacatgatctcacgagatannncccatgctgcctagactcaacttgtcaccgaaagctt

SEQ ID NO: 159920 - DNA, 504 bp, Cannabis sativa
cactcccactgatcaagtcaattcttaattctacagttctagtgttgcgagatggaaaataaaatatgtaacccttaaaccttatagcttttcagatgaaaaatgctcatttattgttttgggctgttaagctattttttagcctatattttggatcaactttatgttcgcttttcgttgttttaggacggaattatgcttcttttctatgttttcaggttcttcggagtaatggaggcctcaggatgcaaaagtgcaatagaagataagtggagccaagaaaaacgccaaatttaggcttgatgcacttctggccgcggctagatcactgtcgccgcgaccataactcgagaacagagtaagggatttttgaagtcccagtcgccgaggccagatcccagtcgccgcgaccagatcccagtcggcgcggccatagagtccattacagaggcacggttttcagaagcccatcttgccgcggcgaggaatcttgtggccgcggcg

SEQ ID NO: 159921 - DNA, 575 bp, Cannabis sativa
ttggtgtgactgtgattttggtgctgttatgggtccttggttattgtaattgctctgttttagattactgttttgtcatttctgtagatatacaaggtgtgatctgaacttttgatcaggtgtgatcagttgagcttttgctcatctttattctgtacttttttgtttaatcaatgagataaaattggaaataacaagcatttttcatttgttcttctgttgttaatttcacaacgacaaattaaataaatgataaaataacagaacaaatacagaacaaatacgtaagcattattaatatatattaaataatattaggtaagtctataccattaagactaatttttttttttttttttaatgagagaactattatattaagggaaatttgcggcaaaagtctccaaaaaattcacgttgatacagattagtctccaaggtccaaaaatagcggcaatagaccggcaatagtcctcaaggtcacactttttatttgtccgttggtctccaagttaacagatctgttaaacccaattcaaatgccacgtgtcgaaatattattggtgggtattatt

SEQ ID NO: 159922 - DNA, 530 bp, Cannabis sativa
ccatcccaacttcccaactacccaagtaattcaagctcaattggtaagcgttctattaacaaccacaaacaaggaaatgggaagaaaggaaagttcactggaaaatctgaacaagctccccaggagaatcatgccaaatacactgcattcactattctgactgaagatattgaaagtgtgtacatggcaactcagtcgctggccccgtataagaagcctgggcccatgaagaaagatgccaacaaaaaggacatgacaaagtttggtcggttccatagagactacagctacgacactaatgaatgttacaacttgaagcgaaaaattgaatttctaataaggaaaagaaatccacacctgcataagtatgttaagaccgaccaaggtcagaggaacgacaacaagcaagattttctacctccaccagttgatggacatctgcaagtcatttttggaggcccacacagtgcttgagatttgggcaaagctcgggagaggtatgcccgaatagtgtagcacgagcaagaaga

SEQ ID NO: 159923 - DNA, 518 bp, Cannabis sativa
atgccaattcaaccatgccatgaatgttacttaggcttaccttcttactctgggagagacaaacaacttttatttgctgatattaaggacaaactctggaaattcttatcctcttggcaagaatagcttttctccattggaggaaaagaggtgcttttaaaggcggtagcggaatcgattccaacttatgctatgagatgttttaggctttctaacacgctcattgatcaaattgaagtcatgatgaatatgttctggtggggttctaattcttcgggaattgggatcaattggaagacttggaagtctttatgtcattctaaagtagaagttggaatgggattcaagagttttgttcattttaaccaagctctacttgctaagcaagcttggcgaattttttttgaacccacttccctattatgccgtgttctcaagccaagatacttcaagaataactcttttttggatgctggaattggaaattatccatctctaacttggagaggaataatatg

SEQ ID NO: 159924 - DNA, 544 bp, Cannabis sativa
  modified_base (152)..(159): a, c, t, g, unknown or other
  modified_base (350)..(350): a, c, t, g, unknown or other
tgtttgttaagaagaaagatagatctttgcggatgtacattgactgccgggaactgaataagctaacaatcaaaaataaatatcctttacctaagatagacgatcttttttatcaacttcaagggaagactgtcttttcaaagattgatctnnnnnnnngctatcatcagttgagaatccaagaggaggatatcccaaagacagctttccgcactaggtatagacattatgaatttctagttatgtcttttggactgaccaatgctcctgcagcttttatggatttgatgaatagggtatttaaggatttcctcgatatttgtgttattgtatttatcgacgacatcctngtgtactctcagtcagaagaggaacatgagcaacatcttcggatggttctgtagggacttcgggaacataagttgtatgccaaatttaaaaagtccgaattttggctgtcacatgtgtcttttcttggacacattgttagtaaagaagggatcaaggtggatccgggaaagatagaattcgtcagagattggcc

SEQ ID NO: 159925 - DNA, 714 bp, Cannabis sativa
agaactttcttcagtttgaataacgttctagtatcttttaaaaacaacttagttatttagcttcactagtgaaactaaattattacctttcaaaataattcctcctaccccagagtaatcaccatttcaaatattaagttctgagttagtgtagatataaggattctaaatacacactcctatcatctaatatataggtcacttagagattctttcttgactgtctcctaatattccttgttaaattatatctttgttagctcccactcaacagaggagtttggcttgatgcatatgtaagtgtacatttaatctcttattattttttacttagggacatcttgttgtgacatttatctttatctggaaacaataaattccttctagactaagtcatcaacataacattctagtattaacattaatgtaaaatacttgctcaagattaaataactattaaagataccataaaatatttcataaggaccaagaattatgcttgagtctttcgaatagacattgtaagattttttatcttattctcataattctaataagttacaactatccatgtgaatggctagattaactttccttagtcgactggtgtcatatcttatttaaataaaatttgttgaacatatcattgtaaataatcactagtgtcattcaaataatatagtcgactggaaaaattctcccactaagataagg

SEQ ID NO: 159926 - DNA, 522 bp, Cannabis sativa
gcttgtatttccaaatttaatcttaaggttttgtcctctcagaaaaatgtggcccaatctcatgaaacacttgagccttcattgactggaacaacattccaaccctcgtagtattttgatggagtgttccaaaagaggcccaaagctggtggtgctgctgctgcaagctcgaattttgcttctacagaaatccaggaagtcaagaatgaagttcaaatggtgaacaatcgtcttgctgccatggagtccaagactctgtcctctttggtcaagctttacaaagactaagttttttttttcttttttctctttgcttttgattggacatatttctatattttcttatttgttatctttggcccttagataaacaaaaagggggagtaatattttgatttttaattgtttattttgaccaactcgggaccctttttccaggaggagttgtgtttggtacttgtgaacttatttggattaaaagttagcatgttgttttgttgttttacaatttcgagtgtgtta

SEQ ID NO: 159927 - DNA, 639 bp, Cannabis sativa
cgattagttttaatttaaaaaaaaatatgcagtttattgttttattaatagtagtaaaattaattaattatcctatttctaaaattaatataagtttttttttttttataagaaaccacatattaatattaatattagtaatatttcattgaaccttgtcaaattttaaagtactactcgtaatttatttttaatttaattacttgattttttttttaatattgtataaaatacattttggtcaccgaaatttaaatttattgtatattacactatctcatattggcccccaactatttagttctagttccgctcctgcttataactgttgatttgatttaatattaatacaattttcttaaaataaaaaaaaaataataataaaaaaagtctcacacggccatttgccaccaccacaactacctacgtaccaactgatattcatttcatttgggagatagagatttatactaaggtgaaagaatatgtatatatgcttatgagttatatgaccacaaccacatgatacattgtactattgtagaagaattaattgtaataagtttcaagagtccgcagccacaagatttatattcatatgtgtacatgttcaatatatcttgcatatgttaatcaaga

SEQ ID NO: 159928 - DNA, 536 bp, Cannabis sativa
gaagattgaaaagctagagctcttgcaacatttagtatgtgttggtgctttctctcaacaactgaattttgttgaggtgtttccacacatgaattgtttgtttgtatacctttttaagcataaaaggatgacatattcaattctttagtattatcacaacgaattgcttttatatttgtggcaaattgtgtgtaaacaaagctataaaattggggtataagctgttgaacttcagctttagattttaacatataaacccaacaaaatcgactgcaatcatcaactattgttaaaaaataacgaaaaccttctatgctatgtacatgaaaagggcccatatatccatgtgtataagatcgaaactagaggctgtaaaattattattagaggggaatggcagcctcttttgtttagctaaattacaaatagaacatggtaaggcttgattagaatctttgaaatgaagcattttattgataaagtttgtagtaatcatagaaggatgtccaaggcgggcatgccaagaatggacatta

SEQ ID NO: 159929 - DNA, 518 bp, Cannabis sativa
atttacaatatataaaatagtgttgaaacagtctgtttcatacgcgtataaaataaaagagttacacgtataacaaactgtttcaactctatttttagcatgttaaatttctcaaaagtttttaagatgtcttaaaaattataacgcatacaaccatgaaaaaaaacaaaactaaaaaattcttctaaatgttgaaacagatatgggtgcattgatgcaccccttttaggagggtgcattatagaactttcttatatattataatttaaaattaattaaaatttaaatatgtgaaattctatattaattttcacatttcaacgtaagtatataattttattggcatttataatatatgtatatattatatatattttaattacatgatataatatttaatttctattttattatatacaataatgatatataattctattgtcatagtatatatattttaattatagtatataatttggttagtatattatacataatatttttattattattattat

SEQ ID NO: 159930 - DNA, 580 bp, Cannabis sativa
cgcggacaccgagttttactcggttagatgcgtgtttagacacagcgtgtctgaagaatcacgcacggggttgtccgaattcccctatccgcacccggacgaggctgcctgcagtgtctctggccgagttttcccggcgccgtcccctgcttagagcgcgcgaatggtatgcgttgcataccatcgacacaacttgcaattttttttcaattttcttcattttttcatgatttttaatagaactaatttcggattttttgtgtagttttgtatttagatttttatttctcatatttcaaatctaattatcaaaattaaattaagtagtaatttttaaaaattaatttaagatattagtgtaatttgaacttgaaaataagtaaaaatctaatttttttctttgcttaattaattatcttatttttaaaatttaattattttatcttatttttaatttaaggtcagatattaatattttttaaattatttctatttttttataataaattgatcttatttaaatttaaaataagattagtttaatcatgatattttaaatagaaataggatattatgctaa

SEQ ID NO: 159931 - DNA, 538 bp, Cannabis sativa
gtaaaataatttccaacagatgaatccttgtgagttttggggaagcgaacaccgaatctaccaggatttgcttcaactcctgtacaaggattatccttgtcttcgtgccggtccgtcctcttcaagtgacgagctctccgcttcaagttttctgtcgagccataggatgatggctcgaacaaagcaaacgatgcgtaaggtcaacacgtctgaccctctcgtggcccagcacgccacattacccagcgccaaacacggtccgcccgttcaggaggagggggatcatgagggggatgccaaagtccaggagataaagaactggacgatgtctgtccttgcagcccttccgaggcggagggagaggaggaggctgcacctccaaattttgggggatacaacgaggttggggagccagtagatgcggacggcgatgccttggttgagggagtggactacgtcaccgaggagcttatgctgtagttcctcacaggaggcaaggtgccttaggtgccaggtgggtgagccctctgtccaaagt

SEQ ID NO: 159932 - DNA, 561 bp, Cannabis sativa
ttaattttcaataaatttttctatataactaacttgaagataattgttagcaggaattgatacagaaaatatatacggttttataataacaattctaccccaggttattattaacttttattttgacaaaaaagatctgtttaggttactattttgtatcattttaaaaaatacaaggtttaatttattatttaacaaaacaaatagtttaatcgataacttttgtataacataaagttaaaaatagtatttaccctataaaatattacctttctcatgcaactatcaaataagtaaaaatcattatcatcaatataatttaaaatccaataatatataggaatttttacacaaaatgactattttgaccaatttttaacatttatattatcctttctaatttttaacatttttacttgtaatattcagtttaaaatagtatttaatctttcgtttggatattaattgtgcgaggataattaattcatttatttgtgttgttagtgagttgatattattgcttagagtagttgtaccatttttttaaagaaagttaaagtt

SEQ ID NO: 159933 - DNA, 529 bp, Cannabis sativa
  modified_base (296)..(315): a, c, t, g, unknown or other
tctcattctgcatcaacacacaacggatcccttgctttgatgcgtcgcaatatactacaaatttgtctttgttagttggaacacacaggacgggtgatgttatgagtttatctttcaatgtctgaaagctttcctcacatttatctgtccatgcaaatttttgttactttcgagtcagattcgttaacagtgtggctatttttgagaatccctcaactaatctcttataatatttagctagtccgaggaaactccaaacctcacttgcggtttttggttttggtcagctcttcacnnnnnnnnnnnnnnnnnnnnccacctctaccccatctttggacactatatgccctagaaacgccactttctccaatcagaactcacacttcttgaatttagcgtacaattggtgctctttgagtctgctaagagttagccttaagtactcctcgtgctcttccattgtccttgaataaatgagtatgtcatcaatgaatatcaccacaaacttgtcaagatattccttgaatac

SEQ ID NO: 159934 - DNA, 699 bp, Cannabis sativa
agttgttaactgagagctgacctctcaccactgaagggctggcttctgcatcagcctgcgtaatggcgaacaccctagctggagtggctctcaccagagctttggtgcttctgttctaagttgagggtaatccctcttgtagtgttcgggcatgccacagtgaaagcacccctgccctctacactcacccagatggtgccttttacaactggggcactctgggtaggaatatcgggcctcaaaactaccctgaggactgcctcgattctggttcccccaaaacctcttgttctgatccgagccaccggttgcagtgggtgctttccttttttggtccatggctgaaccactacctcccttgctatagcctgatacaggaggggtaggagccccgccaaccactggagtcctaactgactcggtcatgcacccaactgcgccctcaactcgaagtgctttttccaccatctcagcataggtggtcttgtcgtctatagtaatcatcaggtcaagcttgatcttcacattcagtccatcacggtatttttccttcttactgaaatcggttggcacaattcctgaggccaacctcgccaaccgatcaaactgggtcgtatacactgtcacactcatattttctttctgggtcaggtgagtgaaatcttttctcttggcacttctaacggcctcattgtagta

SEQ ID NO: 159935 - DNA, 529 bp, Cannabis sativa
tagtaataagtaggattatgatcccactaacccaatttagtataacttataaatttttgctgtaagtggataaataagtataatttgttaatttatagagatttatttagaatatgtggatataatgtaagttatttgtgaaataaaaataattacaagttcgacgaccttggaaacccgattgaaggccaaaaatatcacaacagttttagttggtaatattggtgagattattgagataagttaattttaaaattaatagggtgtttagagatacgaagttgatcaaataccctaaaattaaagattttttagtggctaaaaaataataagataactattaataataatgtttttattaatattattaatattattattgtcattaatattgtattatattgttatattattaatattaataaacaatatttttatcagtttaatatatatatatatattatatatgttatgttttttttttttaaaagaaagtatgttattaactcaaatcaaatcagctgttaca

SEQ ID NO: 159936 - DNA, 679 bp, Cannabis sativa
  modified_base (49)..(71): a, c, t, g, unknown or other
  modified_base (99)..(101): a, c, t, g, unknown or other
tctcttaattaacaaattgaccccaaaatctctttcttcacaattaagnnnnnnnnnnnnnnnnnnnnnnnaataagacatagtctaattttataattnnnattgattaattaaaaccaataaacagagtctgtaataagtattatctcaactagtgggggaccatgggcctatataaccgagcttcgaataagtagatctagaatttactaagtaaattctctaatttattaattcctccttgccccactatagattcggaattgcactctcaattatatagaaggctctatatgtatcaagatatagatacattacaataatccattgttacaatcctaacagtcaaagattctctatggatgatttacatcgaatagggacaaattttgtaacgccccgatttcccgagacgtcacactcgctagtccatttaaaaccatttataataaaaacaataaactaatttattgaaaataactaagcatgagatctcattattttaaaacaaaaatacttgattcatttataaatttttaaacattaatttacaaaagtaatcgagccataatatttaaaagaaatattcttaaaccaaaacattgtgacaatcccctaacatgtaatcgatgcctcgagctcgccatcctcactgtttagttttgcctttacctgcaca

SEQ ID NO: 159937 - DNA, 737 bp, Cannabis sativa
accacctaataccaatattaagagatccaataacacactattcatgagaaaaatgttgaaaagatgttgaaatatccaaggatcatcttctcctttgtcacgagaggttgatattgtaacttaccgcttaggggtatttcagtcattttcaaatcctcgaataattctaacattcccaatatctaactaagtcgtcccgctattacaaaaatactaaaatgtaattctattagctaatcgccgcgttctaatgttgccggacacaaaacaagaattacatgaaacttcatatataacataaataatacaccctgaattcacataaattttcataaattcataaatcataattaataatctaattcataattaagccctaattatttactaattcccatattaaaattaagcggtcttgacacatttaataatacaatttaattattatatcctttgagataattcatattctttttgtaggacatgtgtcagcttttggtacataatcaaattttggatgtaacacgttgccttagtaaaattgaataaaattttacagaaattcttgaatctaacaatctcactatttcgaaaaaaaaaatttatgacctaaaatgttcgagggacatggtttggtacatgtcaaagtttacgaagcaaaaatcctaattatcctaaacaatgataatataaactattaaaaacaaaatatataattaaatttttaaattaaaaaa

SEQ ID NO: 159938 - DNA, 844 bp, Cannabis sativa
  modified_base (659)..(662): a, c, t, g, unknown or other
gccttcccggggtgatacagaatctcacagtcgtagtctttaaccaattccagccacctcctctgcctcatattcaaatcattatggattaaaaagtacttgaggctcttatgatcaataaaaatctcacacttttcaccgtaaagataatgttgccatatctttagggcaaaaaccacaacaacaagctctaagtcatgagttgggtagcgttgctcataatctttcaattgacgagaggcataggctatgactctgtcagattgcatcaaaacacatcccagaccctgtctggatgcatcacaataaacaacaaatttctcttaatctgatggcaaagctaacaccggagctgttatcaatcgttgcttcaactcctgaaaacttgtttcacacttgcatgaccacacaaatctctaatttttcttagtcaactcagttagaggcaaagagattttagaaaatccctcaacaaaacgtcggtaataccctactaatctgagaaaacttcgaacttcagtcactgattttggcctcggccaattcttaactgactcaattttacttggatcaaccataattccattctttccgacaatatgtcctagaaaagatacctcagacaactagaattcacactttttgaactttgcatacannnngtgatccctaagtcgctgcaatacaattcgaagatgatgctcgtgctcctcttctgactgagagtatacaatgatgtctttgataaacagtataacgcagttatcgaggaaatccttgaataccctattcatgagatccataaaggtcggaggagcattagtcaatctgaatgacattacca

SEQ ID NO: 159939 - DNA, 527 bp, Cannabis sativa
tatgtcaagaccgatcagaatcagaggaacgacaataaccaagagttactacccccaccagtagatggacacctgtaagtcatcgttagaggcccgcatattgttggagattcaggaaaagcttgggagaggtatgcccgaacagcgtagcacgaacaagaggaagttatcctggccgttgaagaaaggaagcccaaaattccacaagcagtttggcctaccataaccttcaacgatgaggacgctgttaaaatcagatttccacacaacgacccgctggtcgtggaagttcaaatagctaataagatggtggccagaaccatgattgataacggagcctcttccaatatcttgttcaaaaccgcttatgaaaagatgggactccagctcaagcatctcgccccgtgtctcctgcctgtctatggtttctttagccaaggagtggctcctctaggacaaattcttctacccctcactgttggacaagctccgacaagcatgaatatcatggtgtaattcctggtgtt

SEQ ID NO: 159940 - DNA, 548 bp, Cannabis sativa
  modified_base (52)..(57): a, c, t, g, unknown or other
tagaatgagtgtttagttcataattacaaacataataaccacaataatcatnnnnnnaattaaataactaaacaaagaataaagaagaagaagaagaaaacaactctaatgatgctagttgatgatgattgcttgaagtctcttctctcttgctcttcaatgtattttctaatctcaaagttgcttgtttctatctctctagtcgtctctcttttaatctaatttacatccttctttatataggtcaacaaagatagatcaatcctcttagaattaggaatttttaaaaaaaatgatacgtgccctggagaaaaaaatcccaaacccgtgctaaaagtatcttttttttcgtaaaaaatcattttttttccagccaagcactatagcgccgagtacaaaatttttctacttcaaccttgctcaataaagcatgcataacttttgcgtccggactccaaatgagatgagcaacatgttttggaaagctaggaacgagctctatcattttgggtttcataagctcttcgagaaaatgatgaaatcattgt

SEQ ID NO: 159941 - DNA, 523 bp, Cannabis sativa
  modified_base (173)..(175): a, c, t, g, unknown or other
gaaaaatggaggatctgatgcaaatttgctgtgagaaattcaaaaaaatcgtctcccaatttcaagatcttatcaaatttgggttttctttttattcgtaaatcattctccaattattatgattaatttttcattttctaacattttgaagatttttatctaattttagtaannnaattctaacatagatgaaagttcaaggatacatatcaaagtttgagggcatgatttggttgatatcataatttggagatgatggtttagtacataaaaattaaacaaaaattcttaaatttaacaatcttaatatttcgagaaatttctaacggctaaaaaattcaagagcacgatttaatacatgtcaaaatttgacaaaaaaattactaattaaccatataaatattatctctttgacagttcacatataatttggaagaattgaatacggattatttaaatccctgaaaccatctgagtcatgaatagccatgctcggcttcccatagtccaatttgaaataccc

SEQ ID NO: 159942 - DNA, 606 bp, Cannabis sativa
caacaagaagctttttactgctcagaagaaaataaccgagttgactaaggatctcgaggcttctgacaaacttgaagagaccattgacacttaatctgtgaagtgaatagccttcaagatgaaaggacatcccttcgagctgtcctccgtcggctggaagaggagaagaagtctaaggaggaggagcttacaactgaggtggcgaggctgggagagaaagttcatgacttagacacaactggtctcgagctcttttatgacttttggaaggctaaccctcaggcaaagtttgattacttgggtgaagccaaagacatgtatctcgagttctgcacttcccaagtggcttatggttaaattgaggcagctgcttctacctctggccaaaatgctgatgtacctcccgttcaaacaatagatcctctagctcctaccgtcccagaagatctgaaccgagagcctaggactccagctgtttaaatacctctcttttatcctttttttatatatcttatttggctataaggcctttcttaagacatcatgattggccaagcggtctttaaacttggaattattttccattttacagacaacaggctgacc

SEQ ID NO: 159943 - DNA, 757 bp, Cannabis sativa
ctaatcgtgttttttgtagcagggctgcgatctttcatgaacattgattcccttttgtccaatctgctggtattcctgattctcaccataattttctttctgatttttcacatgctgatatgccttctgatattacacataggaggaccaatgtcatgtctcctgatattacaaacaccaacagtaatgttacatctaattctgcttccagaaccactgttattcatgaccctgctacatcacaacctgcttccacaaccagacctacccgaacccatcataagccctcatatctcacttattatctttgttttcttactaaattctctgctggtgctttttctcaggatcaggatttggtcacagagcatccattgtctgctgtccttgattattctaagctgtctcccaaattttgagcctttattctagctagttccactttgcaagaaccagaaactttcttccaagctcatgggaatcctgtgtgggattcagcaatggataatgaaattgtggctcttgaagccaacaatacttggactatcgttagtcttcctttgcatcatcatgtgattggttgcaaatgggtttacaagttcaagttcaatgctgatggatcagttgagaggtttaaagcaaggttagttgcaaaggggtatgatcaacaagaaggagtggactattttgaaacttttgctcctgttgctaagttggtcacaatgaagttaatgttggaattattttaccaggaact

SEQ ID NO: 159944 - DNA, 589 bp, Cannabis sativa
atgagtggctgttgataccatcagctacagttttagtggaggcaggaataaagttcaagaaagctgaaattagcagtagtgtccctagtattttggatattaaattcaagaatggtgtaattgagattcctacactattcattcaggatgtcacagagagtctgtttcggaatctattatgcttcgagcagtgtctcccttactgtcaagaattaatcgcttcttaccttacattcttggattatcttatcaatactggtaaagatgtgcaaatattttcagaggaaagaattattgaaaattggacagataatgaggaagcggctgtattcttgaacaaaatatgcagcgatattgtcatgtggaatttctattactttgatcttgtgaaggacgtgaatatatattgtcgacgtcgttggccaaaatatcgaagagtactcatacatgactattttagacacccatgggcatttttttctgtttttgctgcagctacactactcattcttactttcttacagactatattttgttagaagtcatcacctcctctaaacttctagaaatttctagttattacatattt

SEQ ID NO: 159945 - DNA, 604 bp, Cannabis sativa
agaagctaacattcaaacgagcctcgaagaactctttgttaataagaaccgcgatcgtcagaaagaaacgacaaggcatacttcgttgacctcggaaggataaagaaaaaggttccagctcgctattacggtcactggaaccaagcccctgtcgagacatttttcggatgtaacaattaaagacatgttaaaacacacgatcattttgacccagtaacagcgggaaaatcacagctataaaataatgaccgcatttacactacgtgatatgtaatcaaaccccataattttaggggataattattgtaaaaagattatagtcaactttgtaattgactgcctactatgtagttataaatagtggcaagtaagatcaaaaagggggcgaaaaaatcatacaaaagaggccctgagaatcagaaatttgaataagattgactcgtggactatgcaaaattttaactgcaaaaccacgttaaaaatcctctgtgttcatactatttattttatagcttttattttttctgtgtgagattgtcactatttggctcaaatttggttaacaaaaatatgcgttaacaggtatgaaataatggtagaagct

SEQ ID NO: 159946 - DNA, 783 bp, Cannabis sativa
caatgtgttaaaggcgatgactttcccaaaggcaagtgataactgtttctttgttgatctgattgatactattgtggatgagaaaaagtagatagaagatcctctagaaatgagcttaattgaagatgacttgactgagcaagaagggaaggaggcaatggagtatgccaaatggcttgattcctatgggccattgaataggaagtattatgaagagctggggttgtaccaaaagagcttgtaccatctacagagaaacctccagagttagaactaaaggtgcttcctaatcatctacgatatgaatttttgggagaagataagaagcttccagtgatagtgtcaacttcactttcagatgtggagactgataagtttcttagagtaccccaaacacataataaggccattgcatggacattgggtgatgttaagggaatcagtccctctacagttatgcatcgaattttaatggaggagggcaccaaaccgactattgatgcacaacgaagacttaatccaccaatgaaagaagtggtcagaaaataggtggtcaagtggtgagatgctggtgtggcttatccaattttagatagcaagtgggtcagcccagtacaagtggtactcaagaaaggagggatgatggtgataaagaatgagaagaatgaattaatccctaatagaacagttactggttggaggatctacatagactacagaaagctcaacaaggtaacccggaaggaccattttcccttgccttttattgatcagatgctagac

SEQ ID NO: 159947 - DNA, 536 bp, Cannabis sativa
gggataagttgaggaatacttattttttgtatccattaatcaaaaataccctcatattatatttcattcgaatctacccacttttgtgagagggttgcccaatataccctcatcctccactttaatccaacacataatttacattaacctaaagggtataatggagacattatctataaaagtgggtatatcttaaagaatacaaaaataaaagtaaaaattaaaacaagcaaagtaaagtgggtatacaatacaattctcatttttagtggtgtaaaaagtttagaggacaaattttttagggattatttcacaaaaacataaaaacaacaaaagaattacaaaaatacggtttcacataattttaaacatttttacgatttttttttattttatttacagaaaatatggtctttttgtattgtaatcttgttaatatgttgattttttgttatctgtatgttatttttttgttgttattttcatgttacttttatgtagttttcttgttggttttatgttgttttcgtgttatt

SEQ ID NO: 159948 - DNA, 524 bp, Cannabis sativa
gtaacaagttccaacttgttcatgacataatttaaagtataaggtagaaaggatggagtcaaactgttaaagatcagactcacttgagtggtctgatccatttcagctccatgattctgagcttcttggaagtaacttgccatttggagaaggtgatcacacatgttctgatgaggttgcatccctgcattgatgaaattctttgtcgcttcaaagcgagcttgaattgatgcctgtctgaatagttcagtcaactagttcacgatttctgtagccgttagagtgttagcaaaccttgttttcaaggtgtcaaccatgcgagaaagcatgaagtatcgacctttgttgttggcattttgccaacgctcgaacttctccttcactgctttggttgcattctcacccggatgctcaagagatgctccaattaacacaaatagggcattttcaccaacgagaacaatgttaatgttctctttccatttgggaaagttagatctattaagcttattatcagtcaacag

SEQ ID NO: 159949 - DNA, 550 bp, Cannabis sativa
aacatagtgtgtcgatacggcttacctcacaaaatagtctcggacaatggaaagcagtttgactgcaaagaattcactaacttctgcaaccaacacgaagtcattaaaagcttatctgcggttgcaaggcaacaaacaaatggacaggcagaagccgtcaacaaaatcctcaaggtcaccctaaagaaaaagttgctggcctgtaagaacaactggcccgaagaatttccaagagtattatgggcctaccggataaccccaagaaccacaaccaaacactcaccattctcaatattgtacggctatgaagcaatggtcccggtggaaaccttattcccatcccacagaagagcgacaaatgatctggcaacaaacaaagctttattacaagaagcactggatcaaattgacgaactctgggatgagtctcaaatacggatggcagcttaccaaagaaaggtggcgaaacatttcaacgccaaagtcaaaaataggaaattcacaattggccatctagtcctacgaagagtctccccagccactcaagaac

SEQ ID NO: 159950 - DNA, 527 bp, Cannabis sativa
tataaaaactattatacaactatagacacacaatttgcaatgttcaccatacttgtaattttaattgtgtaacaatgtattcactgttttgcaacttttttattatccttattgataatgttttataaattcctatttgactttttaaaaattttaataatgaaattcttttccttgttaaactttaacaagtatcaaaactgtcataaaataattttgcaactaatagcaaactgtttaaaatttgcgaaataatatcacaagtgtatcgaatataacatatcatcctgtgtgaattctcatagagaattaaacaattcaaaaaattcagctgtaactattttattgcttgattgttgcatgtctttcggttgtgtccgtgttgaccacatttgttgcacctgttatgtttttttgtatgccaatcagctaaaaatcttattttccttggtcttcaagatcttattttctagtttggtggcagaacaatgatatcttttatgttctgtggtacatcccatgttgtg

SEQ ID NO: 159951 - DNA, 575 bp, Cannabis sativa
  modified_base (256)..(259): a, c, t, g, unknown or other
agggcaaaaattttcatgaagctttgaataagcaagatgaaagacatgcattatgcagttcaaaaagcaaacaaaggaaaatcgcacaatttctaaacttagggtttcctacatatcttttacagcaaagtcgaaggtgcattcaaaaagtaaatgtgcaaagtaaacatgaagttaatcgagaacttactcaaggatcagatgtctggattcaggttatgccaagccaaacgagcagttttgatgaaggcacttnnnnaaacttgaagccaaaaacctctcttttcgctctaaacttatttagcaaagaaggatggtgaaaatgagtttgtgtacaaatggtcactagtatttataggcaaataacgaaaaggggtaatcatttcaaaaagaacctcagactcctcggttccccccttaaaagagaatatgggaaataaaaaataatcaagtgcagccgtcaaccgtgctaagagaaaatcaaatttcaaaatattaattgtcagagcatttattagccaaaaactaaagggatgcccagtcagcctcacatcgagtcgcgaacagacacgctt

SEQ ID NO: 159952 - DNA, 527 bp, Cannabis sativa
aaataagcgatgaaaatacttttgtctctttattgataattaaatgataaagattacattgaagtagagttttatttagggcacaaagcccaatcatgaatactcttcttccccagggattcaaaaacccacacgtctcgtcataccatgggaccactgatctggtctcgcatttaaataatttcaataccataatacgagctagcaatgttacaaacaatctatgttatattttgtttcctacttcactagttggagcagcaagcagctggctcaataaatttactcatccttccatcactttgtgggaacagttgtcttagtactttaaaaggaagttccaggctgcaagggataggcaacccgaagtgtcctcactcaccaacataaagcaatagcctggcgagacgcttaaggcatactttagtcgttttcatattgttgcagaccattcctttaattttggagaattttataataaagttttctattttagaaataaatttcatttatgaattgagcttcat

SEQ ID NO: 159953 - DNA, 524 bp, Cannabis sativa
tgtatcagttgcagcgatagattcatcatttttgtcgtcagaattgagctctgctgcatcagaatctacttttgctgcttctggtggagtatccataaagctatctatctcggcttctgtgaaaaattcttaaaaatctttaaaatcatcaacaaccacattagttgattccaaaaaagtttgagttctcatgttgtaaacacgataagctctactgtttaaggaatatccaatgaaaacaccaacatcacttttatcatcaaatttaccaatatgctcacgatctctagaaacataactaacacatccaaaaacatgaaaatgacttacattgggacgtttacctttccaaatttcataggatgtttttgaaataccttgacgaataaacactctgtttattatatagcaagttgtgttaatagcttctgcccataatcactttgttaggttcttgctatttaacatcactcttgccatttcctgcaatgttcgattcttcctctcaacaactccattttgtt

SEQ ID NO: 159954 - DNA, 779 bp, Cannabis sativa
  modified_base (103)..(104): a, c, t, g, unknown or other
catttgagattctgtgttcgagtttgggtttgagtttgggtcggagttcgagtcctggtttgagttagggttcggatctgaatttcagtctaggtccagatcnngctccgggtgtgggttcgcgtttgcggtcttgggctaggtggggtgcgagtcccaagttccaatcctgatcttagtctggattcagttctaagtctaagtccttggttctgatctttgtctcggttcgagtttgggtccgggtgcaggtctagctttgggtctgattctaagtgtgggtttgagtttggttctgactctgtatccgggtttgtgttgagggctggaccccgatctgggtctaggtttgggttcaggtccaagttgagttcctgagagcgggtccaagtttttgtctgggacaggatcgcggtcaagatctaggtccgagtccaagtgcgtatatggatccctatctaggtccaagtcagtgtttgggatcgggtctaatatttaggtccaggtccgggtctcagtgccggtccgggtccagtgtcagtttgggtctgaggcaaggtctgtgttcgataataggtctgggtccgggtcaaatttcagttatgattccatatccaagtcctagttccagtcctagtgaagttctggttttgttctaatgttgggacacagggtacgggtttgggtccactgttgggtttaagactaggttcaggtccgggtgtgggttcgggtccttttcagagttcgggtcaagggctgggtcccaaatccaaaca

SEQ ID NO: 159955 - DNA, 667 bp, Cannabis sativa
  modified_base (144)..(146): a, c, t, g, unknown or other
aaggtgaaagtaaactacattgtagattatcctatcagttaaactatgtatactgataaatcataggaatatatttaatcacacaatcttgattgccttttactgtgttgacaacacattaaacaagaatatcaatgtgataannntttggatgaatttataaatcaactaaataaatatatgatcacatgaatgaaataacacattaaataagtaatgaaaataaatctgtttctttattgataattgaatagaaaagattaaattaaagtagagttttatttaggataaaagcccaacaaactcccacttgcactaacataaaactatcagtacatttcaaataatcctaaattcagttgtgcttttcaaatgtagttacagtcaaaattttggtgaatggatcagcgaagttgtcttcagtatctactttctccaccagtacgtcccctctttccacatattccttgatgatgtggcttttcctctctatgtgtttgcttctcgtgtggcttcgaggctctttactattagctattgcaccagtgttgtcacaaagtaaaaccagtggtttttttattctagaatcaacacaaagtcctgagaagaactttctaagccagacaagttccttagcagccttagcgacagctatgtactcggcctc

SEQ ID NO: 159956 - DNA, 571 bp, Cannabis sativa
aaactaagtataatcttaaacattttaataaaattacgaacatacactatcaaagtttatcattataacacttaggtggcctttggtaatgaaatgcaatagaatggaaaggaaacaatttttattttattcatttgtttggttgcattttaaagtattagaatgacattccaatagaatacgctttccaccaaaatggtggaatgactattccattttaaaaataaagaaaagaccattccaatataacaaattaaagaaaaaatttaataagtttttatatcaattgtttttatgcattttaaattttatttcattcaattcctattctcattcctatttttatattttcattcctcccaaccaaacgctaccttagtttatcattataacattttttatgtaattattttttacccgaactctcaaattacggtaaattagccttggatcattctaacattgggaaattatttgaaaaaaatgaatgaaatacaactgaagggaaagtttttattattatttctaaatttcaagaggaatttcttaccaaaaaaaaaataatttaaaa

SEQ ID NO: 159957 - DNA, 520 bp, Cannabis sativa
ccatacaataatgtcactataattcatatatatgcagcatagacgtacgcgttacgctcacacatcccttttacatttaaggccttactagggtttgtcttagttatagttactagtctaacctagttatacattacctgcataactctactcatatatataatccatacattatgctcttgcagtgatatatcctgatgatgtttatcaggtctaacccaattatgtcttatacacataactcttaacatatatatatatatatgcatacaatacattcaatatatactttactatatgaagttttagggtaataaccttaactttcataactaatcattcacttgtataatacattatagcatgctcaagacaatacacatttaggataatttctaatttaccatacatataaacatagtgtggtaacctttaattcacaataccataattacttagggtagtaaacctaatccacaatataaatacttagggtaatgaccctaattcacgacacata

SEQ ID NO: 159958 - DNA, 662 bp, Cannabis sativa
aaatgagatattcgcagtaaaactttcttagcatttacatttattatacatatgatcctaataaaaaaaagcactaaaaatattttactttaccttttttcactaaaaaaagcttttatttatttatttatttatttttgacaaagtgattagaatcactcatgaatttacgacgcagacgttcgccaccggcgttggactccttgaaccaggatagctcatcgatttaactaaagaaaaattgatttcatttttctattcaaatttatatatttttaattaaaaaaataaataattaatattgtaagataagataattttgttgctattttttttattagaattatatgagtactgcaaatattatgggtgtttcattgtaaatattttttattaaattcataattaaattaaaatacataatttttttttcttgtatatcacaaaagtcatcaataagtgaatctatactaaattttttggcaatttctcattcaatatatattaacaaacaatcacgtaaaattcattttattttttggagaatgtatagtcttcactatattggtagttgaaaaagatcactttgtagtaactataaaaaatgaaagagtaagagataaaattatcattttatacataattgggaaaatctaaaatag

SEQ ID NO: 159959 - DNA, 514 bp, Cannabis sativa
ttcttatcataatagtcatcaattaatacatcttttttttttcaataatacatgcattatcaatattatttatattttgttgtattctaagtttttgttattggaattaccacgtctctaaatttcccgttcgtatatatcatgcatataaaccatataataagatttttcatctaatattcaataaaaaaaatatattttttatttataaattttatagttcgggtttttcactctaatattaagtttatagtattagggcgccttattattgtaattaattcctttcaaaaaaaattattgttaattgattatatatatcatactaaatattttaaatttacaattttcttaattaatgtctaacactaaatactatgaacttatatggtacttttaaattataatttactaattggtaactataaaaatttaaaatataaaaatatttatttataatttaataaaattgttgctaattctctcccactcattaaacctttttatttatttt

SEQ ID NO: 159960 - DNA, 591 bp, Cannabis sativa
ggtatattctaattgctatggtggcaagaaaaataaaagaaattaggtcagtcattttctttttatctctaatatatctcataattctatttttataccatccattaaaaaaatattcgagtacgatatatttgtctttatttgtttatttaatttatcagtgttatagttcttacataatattttgcaaaatttgtgaacaaaagagagaaagaaaaatgtctttaaatgacaatatgtattatgattgctaaggaagaaaaacaattagatctttctattctatttttatttttaatattttcttttacaatcttattcaaatgatttcatattttctattacaaaataaaacgaaagtacaacaattctctctatctatgtatatatctatatatttatataattttttttgttagggtaaataaggtggccgcttagataaattttcaaatatatatattttttattttctcaatttctcgattttgttaatttttctcacttaatattaatgtaacatttaaaataaataaataaataaacccttcaaattcttcttattaaattcacttatatttatataaataa

SEQ ID NO: 159961 - DNA, 655 bp, Cannabis sativa
  modified_base (29)..(52): a, c, t, g, unknown or other
  modified_base (96)..(112): a, c, t, g, unknown or other
tgcatccaatgtaaggtttactaaacttnnnnnnnnnnnnnnnnnnnnnnnnagaaagttcatatttaggatattaatcaacatacttgtgagtannnnnnnnnnnnnnnnnaaataatttccaacacaaacatggccggcacttaaagtcaattttaagccattattttatcttttttaattctatataatttaaatcctaaccctagagagaatccgataaatagataatgataggctcataacctgataacctacatcagactactttgttagaaaaagagcttatctttagaacttgaatattctctcttccttcttcataatttcgagatccctatagtgaagagtacatttcccacacaattcaagtcgatactcaataatagtgtggaagattgtgaataattccatcactaaaggagattgaagttcaaatcttagtaatactctgcgattgaaaggaacgatgattagagatttgaacagacaaagccataatattcttctgccacgaatgtaaggttttctgcaaatttatatgtgtttatttcattactttaggaaattcatgtttaggatgttaggttatagattacaatcaaatatacatgttagtaaatctagatcatggtaaaataagtttcaacaaaaa

SEQ ID NO: 159962 - DNA, 522 bp, Cannabis sativa
atttcccttatacatactaggctcattgagacataatattgaaaagatcataaaaactgatatgttcaacttcttgtcaagaattatcttttacatacaggatgatcagattttgaaaagcacaacagaacattttaatttcataattttctaaatatttaaaatgttagaacaaaagaaccaaaacatgcatggaaatttatcaaaacacaacatatgaaaaaaccaagaaagccattgttacagttgttacttgggtaagtaagtcagaggacgtcgtcgtgtttgtcagccgtcgtcagagatgggagtcagccgtcgtcggagatcggagtcagccgtcatcaaagagagagaaaacgggagagagcatagaaagtcgaagtttaaaactgaagaaattgggaatgaattttttagggcttttttttcaatatctgaaatcgggtcgggttgagctcgacccaaaataatatataccgggccgggccgggcctagagcccaataaaaacccggcccgc

SEQ ID NO: 159963 - DNA, 529 bp, Cannabis sativa
aaagtaaataaaattatcgaaaaataaataattattgtaaaaaaatttagaacaactacgaaataaaaactatggttttgaaccaaactaattcgtttttgagtgggttggtttggtttgatttgatcatttaattagtgtgatttatttttaaattttaaaaaaaccacaatactagtttagtttaaaaaatttaaaaatttggaccaaactaattcgtaaatagccctaagacatgaaacatgtatttagatatattactaacctttaacttttagtctatgttatgtaaaattttcaatttattaccatgttttaatataaagttttacattttcaattctcctaataattttttaactttcgtcctaaggtataaattttttggtcccactccctcactacacctatacattaagggctcgtttggaacgccgtattaggtcgtatgtgttgtattttattatattgaattgtattttatacaatatttttatgtaaaactatatgtggtattaacttttatgga

SEQ ID NO: 159964 - DNA, 571 bp, Cannabis sativa
tcaaattgggttccattattggatactatcttcatgggaactccaaacctacagataatgttcttgacgacgaaatcaaggactttcttaaaggttatggagacgaggggcttagcctctattcatttagtgaagaagtcgactgctactaccgcatacttagctcctccttgcccagtgggtaatgccccaattaggtcgatcccccatatagaaaatgggtagggcgaggtcatcattctaagttctgttggaggtacacgaggtatatgtgaaaacctctaacacttatcacatttcttgacaaactcgtgtgtgtccttattgatcgttagccagtaatatccttgtctaatgatctttttagacagagtttgtcagcctgcatgatccccacagaagccttcatgaatttctctgatgatttcatttgcttctacatgaagaacaccgaagtaggggcattggataccctcttctacatagttgccttcaatcattgtgtagcgagacactgaatacaatagttttcacgccttgcttttatcatttggaagttgtccgtcgagta

SEQ ID NO: 159965 - DNA, 513 bp, Cannabis sativa
acaccgaaatcagtactatgaacaacaccgtaaccacctactcctggaggaggccgtagatttactcgatgaaagaagaaaggagtcacaattacgtaatgccgctcaccagcaacgggtaaagaagtattatgactctcatgttcggagtagggagtttataataggcgacttggtgttaagaagggtgttcttagagacgcgtgacccaacagctggggtctttgggcccaattgggaaggaccgtatcagatcgaaactgtcttgaggcttggagtgtacaagctcgctcgccttaacggggagcaagtgccgcgagcatggaacaatgagcacttgaggcgatactaccaataggtggaagtcctcctcgttcgggggtcctttctttactttgatatttagcctagtttccttttagttaattatttatttagttattttttcatgcccaagatctttattagattgtcatattcttagaaattcttaaagttgttattttcaacgct

SEQ ID NO: 159966 - DNA, 541 bp, Cannabis sativa
  modified_base (140)..(148): a, c, t, g, unknown or other
aatgaaaacagtacaagacatttaagataagaaaaacctaagactggttataaacttgtctttacaaaaatgccaccattaagtcattctcccaaacaaatgatgagaggggaagccgatgaactcgagaaagaccgtcnnnnnnnnncttgaaaaagaccgtctacacgtagctcagagaaagaacgactacacatagcttgagaaagaccgtctacacgtagagagccgtgatctctgcatagacctcatttccctcatcatcagaagatcccatttcctaaagccgagatctgtttcccagcctcaggaaatttctcaacactggagagaggttgacgcaaagatctcctggcacaggttagggtcttgggttggctggactctctgatagaaaccacgcaaacttgcttcacagatctacttggagccatgccaatcttcctctggaattcttcacctgcttgaggaggacctttgagatcgctcacaagatctataccctctgggatcacttgtgaggatcggccatggcaggcta

SEQ ID NO: 159967 - DNA, 764 bp, Cannabis sativa
agttgtaagaatcaccttctctgagaaactttaacgagtgaattattgaaactaataacatgaacaagagttcatgataactcaaaatttaggccgatctactatttatcatcatttattatatgaattaggtctttatgataaatggtatgttaataaagacagcttcattcatatcggtccttgtcatatataatatctattatatacaacaccttcacttagatgccgcactagcaaccattgattaaagattgcacaactttaatatgttgctgactattttattcatagctaagtggtcttagttttctggacagctacaagccatgaactcatatatgaattaggatttttttgatatttaataataaataatgataacttaacattcatacatatatcaaatgttcaactctttatttaataatcaaaaattgtctttacaggctttttagggcataaaccctaacatacattgcttgcggaccagacattcggtgatctttcttaaggtagtgatctagtgttgtcatctgggacatcatgtcctcaaattcgataatttatgttgttcctaaggtctccttcgtgaggcctagctatttgacattttgctttttctatctttgtattcaaacggtccccgtgatccactatggacatgctatctttgggatttaagttttccacttcgatgctctgattaacaaaaatactagggtgacttttccttccccagacattaggctctggtacctgag

SEQ ID NO: 159968 - DNA, 510 bp, Cannabis sativa
  modified_base (336)..(350): a, c, t, g, unknown or other
tcctccatggtgtcgacgggaggtgttctgtttcttggaagtgggatattcatcatcccgatgttgattgattcattaatgttatctccggttgtctgattttccagccatattgattttccttctaaatcaacaaagtatttcgttcccacagacggcgtcaaatgttgttgaagaaattttaacaacaccaaaatgaaatataattataataaaaaggggagtttatgcgagtactcaacctagaatggtgagtattcaagttaaggacacaaaatacttaataaaaataagaaatataaagaacacaagagagtatagtggttcagtcagatnnnnnnnnnnnnnnnccactgttgcaaggatttctgtctcgtttcatttcatgttggatcactcctttatatacaaagcaagtgtccgttcatttacacagaggttgaattcattatcaatccatttttacattgaattacaataattaaactaaaaaaacgtaaacataataaa

SEQ ID NO: 159969 - DNA, 544 bp, Cannabis sativa
ccaaaggagtaaggtaacttggctaaaccaaggagatggtaataatgcctacttttatgcttgtcttaagaaaagaagagaagagaataggatagctagctttgttgatattcaaagaaatattgttgacaactatcttgatgtagtaaggcattatgttgatcattttaaaagctatatgggcagctgcagttcaatttcgaaaaagcttgacaaagagtgcctggagcttgacaatcggttgacgttaacccaacagttgagattagtccaatctttttctaataaggagattaaggaagctttgttcagtatccctagttcgaagcgtccagggcctgatggttacaactctgaattttttaaggttatgtggaaagaaataggtgctgaagtgtgcctagtgatcaaatatttctttaatacgggtaagattccaatgcaattcaatgaaacggtaatctctctcattcctaaggtggagaaccccatgagagccatagactatcgccctatagcttgttgctctactttatacaaatgc

SEQ ID NO: 159970 - DNA, 515 bp, Cannabis sativa
aaagctaaaggtaggggaaatatttatttgttgcgtttgctagcggtaggtgataaaaaagagttttggacgaaaccagtttcaagcatcaagataaatgttgatgtgactcgatttaaagaaaaacagaagtttggttttggctttattgttcgggtggaaccagtgctagctgaagccgtgactattaaagaggttttgagttggctgaaattaggcaaatattcctcaaccacggtaaaaaccgatggcttggtggtggagtctattcgaagccctttgtcagtgggctctctgtttgggttgattattaaagattgcaagaagtgactacgtttacttcataatatttctttattttttgttaagcaatttgcgaattaaactgtgcattttgttatcagaaacttccgtttattagttgatcgcctgatcatatgttaacggagaattttgctcctttaaatttattgtggcatttaataaagatgaattaatttcaaaaaaaaaaaaaa

SEQ ID NO: 159971 - DNA, 517 bp, Cannabis sativa
atataatcatttttaggagctaaactaaatattattggcaaggttgattacatgtataaataaataaataatacgggaattattttatatattattattatttttttaatttacggtttgagttttcgatgtgagttgctatatgaatgttgattataatttaaattgctccgttattatgtgagttgttatgtgaatttttataaaaataaaaaaactaatttaaaatgtaaaaataaaaaaacctataaataatatttatagatacaacattatagtaattggctttaatttattttattgattaaatcaattatttttttatttttttttaatttacaatttgagattttttagggcccgtttagtacagcttttggaaaagctaaaagctactttttgaaaaagctgagataaaaaatgtgtttagtaaacagtcaaaaaacagctttttgaagaatttttagaaaagctacagctaaaagttgaagctgttccaacccaacttttagaaaaa

SEQ ID NO: 159972 - DNA, 566 bp, Cannabis sativa
cataattatgtctttccattccttttatgggacctcctaagctgacctactgacttaacttaataacaagttaagtattcatttctaataggtattcaattaaagcctttcttattgccacccactaacataaactcatcttgataccttgtaattctttacttgttaacacattatttcctcttagaattctctgaaacgactatcgattctgcatcctaatatgaatctttctagcgtactttgtcctcactcatacgctttccgggatgactccccaaaagatttcccatcttgagattacccaagttaagtatgtttaactccaaggtaagctcatggtgggttatcagaaagtagatgcctttttttttgccgttcttaattgtatttcttgctttcattctgtgttaaaaaagaaaaaaaaaatcaattcccacactcccttcattaacgtcttgcaattcctcatcggttctgttcacttaaacttgaggaattcccatctcattgtcaacttaaatcttgttcatctccacttattttaacttgtatcaatttccctt

SEQ ID NO: 159973 - DNA, 696 bp, Cannabis sativa
tctagtaaaaaaactaaaaggttattttttattttaattatttttccgacaagggtaaaaaacatatgcttctcatatgttaaaacgattcccttgaaaagtagattacggtgatataatttttgaactgaaataattatcggtgtaaccaaattattttttttttaaaactttttttaaaaaaaaacaaaaaggagaaagagttatattttaatatcaaataaaattatgaatatagtgtaagcttcatataaaacatgcagtaaaaaacaaaaaagaaagaaaagggagagactctgagattgaattgattatgggctctcaaatctcaattcactatcgctgacaaaataattcaagtgtacaacggtatttagcataataaaatactgaatcacatatttacaattaaaataaaattgtagtcaccccacgtaaataaccctattttttatataaatagattttttatttgtaaaaagagattttttttattattattttttaggggaataaccctatatactatttttaattttttttttaaaaaaaattatagtttggattgcttcggtagttgtttgggtgatttccatgtgagttgctatatagatttttgttatgatttatgttgtttcgttggtggctatacggatgtccgtaaaaatacaaaaaaaaaaactatttttgaagtgt

SEQ ID NO: 159974 - DNA, 683 bp, Cannabis sativa
aaaatagaagcctaaaagatattttgtagaaattaatgaactatggggagtggaagagtttttttttaattagttaaaaaaaaatagggaaaatgtataaacattcatcaataattttttaatttttaattaattattattaattaatagttaaatgggataattaaatttttaactattgaaatgaaagaaaaattgagaaaattaaaaattaggaaagaaacttattggagttgccacatcaaactctctaaaacactcattatactataagccatgttttagaatactataagtcattgattaatttcttttaattagttagactttagtgttattataaaaaataattaaaaaaatttaaaatcaccataaaatagaaaagtgataacactatctttatagaaagccaactcaactctcctcaaaccttcctttatatatattgacattattgatactataatgaaacataatcaaaagtgataatttctgtttcttggaacaatattttttttttcagtacagaataaactataatcaaacataataatatacgctagtaaacctataaatatacttcagataatataacaagtatatatatgaaataattttatttagtatacttcatagtaatattcaaataaaacgatatgatatacatttcgtcactcatatat

SEQ ID NO: 159975 - DNA, 503 bp, Cannabis sativa
aaaattgtaaaatgccctaaaatagattggttttataacataataaatacaaacaaataacacagaataaatcaaatcggttataattaaaaaataaagaaaaaataaaacactgaaacaaaaattaaaaaccaagctagttcaaaaacaaattgagtataaatgaataacacataataccttagaaatcgattataattaaaaaaaaaaaagtgggaatcaattctaaaaatactaaatagaaccagttctttaataaaataagtacaaataaataacacacaataactcaaaaaataagataaaaaatctgttatatttatcaattagttaaaaatataagacaaaaaactagttctgtaaagaaaccaaaataaaaacttacacacaaataccaaataaataaaataaataattaaaagtcagttttccttgaattaacaaaaacaaaagttaaatttccttgaattaacaatatcaaaagtcggtttccaaaataacta

SEQ ID NO: 159976 - DNA, 503 bp, Cannabis sativa
tgccaaggaatacgcctgtaatcaggaacagagttgtcacagcctcacaaattaggaagggccaaataaatttttttaaaaatcaacataatttaaaaaaagaaaatgaagactaagtagggatgcacattttctttatgggacgagaatttccacgaaatcaatttttgttctcgaatattaaatgggacggagatagggatgacactcttcatccggccccgtagagatacgtttaatttattaattaattttttattaatattttatatttatatgcgtttgtgtttttagtatattaatatcattttataatttttgaagttgtatttttgtataataattactatattaaataataaataatgtgtaatattttatatttattaatttaataattttatataattaaattttaaaataacttttattattttaataggagattttcgctatgtctccgctcttttaggggatttcccgtcccatccctgatggggaat

SEQ ID NO: 159977 - DNA, 583 bp, Cannabis sativa
tcaatagattataaaataaaaaaatttatccctaaagtataacatgtatcaaattatgttatctgaactttttaggtagtttaaaacttcccctgaactattaaaattgttgagtttaaaattttttatctaatttcatttaattttgctaatgtggcgagtgtctatattctaaattgtgcccctaaactttaatttctatgaaattaaattcctaaacattaacatgtactaaattgtacttttaaaatgttcttctatgttagattttctttagtaaaattggacaaaagtccttaaatccaataatctcaatagtttgagaaaaaattttaacgacctaaaaagttcagagaacatgatttgatatatgtcaaagttaaggggataaaaatctaaattagtctatattataacatgtgatttcaactagcaaacaataatgtactatttgtaagttgtaactcactgatggttgggtattcactaaatcttaattttttttttagatcgattattgtttattatttttttaaacgtttatatatctattctatataaaatgtggctatgtaacagaatt

SEQ ID NO: 159978 - DNA, 757 bp, Cannabis sativa
tggtatatctatattagttttgttaaaaaaaaattatttaaaagttatgtcgatttttttttttaatttttaatacgttgttgtcagttgttggtatatagattttgttgtacagtatatttctgttttgttgtatggtatattattatccttggatgatatttattttttattttaatatgtataatagtgtatataattttgttagtataataaaaatattttaatatatgtatataattttattggcgaactacatatatattaattatatttttatatattttgattgtattattatttattttaagtaatatttaattagtttttattttattatatacaatggtgatatataattttgttatcatagtatatatattttaattttagtatataatttagttagtacagtatacatatacatattagtaatatatatatatatatttttattattattatgtttagtatatgtattttggtaaatggtatatatattttttgttatacagtatatcatgtttttaaataatatttaagttacttttgttgacatcatatataattttattagtattctataaatttttatttttatttattgttattattatatatatatatatttctattataaggtatatattttttattatatggtatataagttttagcgcatagtatattattttattttagatgatacatgtttagtttttattttattatacggtgatatataattttgttaata

SEQ ID NO: 159979 - DNA, 683 bp, Cannabis sativa
  modified_base (275)..(302): a, c, t, g, unknown or other
tgagatggtgattagtctaggggttgagttgtaatttttgagaagtgtaaagactgatctgaatctctaactctaccagagagactgaatgttaaagttataggaaagataattattaagtctatggaaagttctatatagttttttcgcattataccaaaaatttattaactactagtgttacttcctgactaacacagaagaagttgccaaaaagtaaggaatccagtatccctagaggagcagacacatagagaagaatttcacaatatcannnnnnnnnnnnnnnnnnnnnnnnnnnngtggaggaaagtttatattgaatacaacttgtcatatcctattatggagagaatactacatactacactagatctggatatcaaggtgttgagattatttgaaatgtattgtttgtttcatattattgcaagtgggattttgttcggttttgtgccctaaataaaacgcatttcaatataatcaaatttgctaatcaataaagatcagaaattgtattttctgttgcatggttcacatgatttaattcatgattatgttcaatgtataaattctattaagtctagaacatatataaatatgtatatatttgtttatgattacagtgtcgccaacagagtagaatatcatcatgattatatgttcaaaagtttaattcccat

SEQ ID NO: 159980 - DNA, 664 bp, Cannabis sativa
  modified_base (577)..(582): a, c, t, g, unknown or other
  modified_base (637)..(639): a, c, t, g, unknown or other
tgcatcctgaactttcatccatgtatgatgttcgttagtaaaattggatagaagtccaagaatccaaccatctcaataatttgacggggatttttaacggcttgaaaagctcaagagcatgatttggtacatgtcaaagttcaagaaacaaaaattctaattaaccacattttatttagcctaatgtaaaaagcgggttacaaaaaatctaaaggcaacatgttcgattaagaaaaaaaaaagaatacatgtctaatgggttggtcaatttagttgggttaacatgcctaaaccgactactaatgttcttattttcaaattcaaatttcaattttgatttattgtataatgataagataaatataatttaaacttaaaattcaaatcaactaccatcagataaacatagttagaattttatatttttttaaaatatgtatataaattaaattatatataattatgtatataataaaaatatatataaatataaaaaaataaataaaaaaaaactcttaatcagattagttcatgtttattggacaaattggctttattttgggaaacttacaaaaannnnnnaattttgattaacttttacaaaaatactgtcacacggaatttttttcaaaaatannntgtttttataaaacaccagtaaaac

SEQ ID NO: 159981 - DNA, 503 bp, Cannabis sativa
attctatagttaatttttttttaagaacatatatacatatatatatataatcaattatatatcacactaacataaattttaaaacattaattctagactaattaaattcctgctacctcattctcatccacaacaaatatatactcaaaacaattacacaaaatacacaagtagaatatacacaatatatataaacacatattcaataataaaacacaaaatatacacatatatatatattatataaagttaataaatatttaccttataaacgcaatccgacgataaattgtgaaaagaaaaattcgaccacctatagcacacacacaatataatattaataaaataaaaaaatcctaacaaaatttacaaaaacgaaataataccaatgtacatatataaaatgaataaaaagcgtatttataccttaatggacgttgagactcaacattttctccggtaaaatcggtggtcagagttataccaccacctttttttataat

SEQ ID NO: 159982 - DNA, 562 bp, Cannabis sativa
gtaagcaagcacctccagtttttctgggaggtcctgatgtgatgaaggctgagcaacggctcacagtaattgagaaaattctgaattttatgggggaggttggtaatgatcgggtgacctgcgccacttttcagttctaggaggacgctctcgtgtggtgggagttggtgtccctcactcgggacgtcactgttatgacctgggaagaatttcaggaatgattcaacaccaaatattataatgaagccgtctgcagtgctaagcggcatgaatttactgagttagtgcagactgagggaatgtcagttactgagtacaccaccaagttcgatcgtttggccaaactcggcgtgggtattgtgccaacagattttattaagaaagaaaagtacctggccggtttgaatgtgaagattaggcatgatttggtgatcactaccaacgtagcaacaacttatgcgaaaatggttgaggaagccctacgggctgaaggtgctgtgaaatttcttcaggagccccaaatgactccgagtgttggtgggacccccacccttcctacttt

SEQ ID NO: 159983 - DNA, 610 bp, Cannabis sativa
cacaaaggcatcgatagagatgcagagttgtggaatgaatgcatcaaggaagccagtagggctgagaagatcgagcgcaagcgttgagatggcgatagagttgtgtggaggccagagggtcgtgccagtgagacttagtagtcatgtaagcctacgaaggtcgagaagggtgctagagtttgcatgaaggccagagggctgcatcattggaacttagtacatcaggggagccaaaagggcgtgatgcaagtgtgaatcagctggagggttgagtggacattgcatgcatatggaaatcgacgggggttctatatgagttagttgactcgagattcacatcctacgggatgcacttttagatggcatggtgtgcatgaagagttggggcggtcaggcattcgcgtatgggcatgttgtcgaggacgccaatagatgaagtgggggagagaccttcacggttcactcaacggactagttattcattacaagcattgagattggtatcattgagattgattgttgttcgggatgtaaagtcaagaagactcgggacacaggcagtgccagttatctagggtgaaagtctgcaggactcaggtactaagataac

SEQ ID NO: 159984 - DNA, 1670 bp, Cannabis sativa
taatccaaacttgctgcgtgcaggtgttgccccccaggtttgactaggatgattcctacatcggatagttgatctgtagccgacccgtccacatgtggtttccaagtcggattgtcttcactgttacatggctgaggtatttgtactggctcggggttgcctttcgatatgctttcttcttttcctgtgcattctaccacaaagtctatagggcctggcctttgattactattcggggttggaaagtgctttcatactaacccagttctactgctcacttgagcaatcgtctagaggcgtccgacttttgcaatatttgccgtaatggttggtcagtgtacacccgaacaagatgagcctgaaaatagggtcttaactttcttattactagaattagaaagtaagtgagtttctctatcaataggtatcggccttcgacctcaacgagtcttttactaatgtaataaatcgggtgttgtatgttgttttcctctctaatcaacacgacactcacaacatgctccgtgatagctaagtatatcccaagttcttctccgtccagaggttttgagagtacgggaggctttgcgagttgcgtttgtagctcctgaaaggctttttcacattcctctgtccactcaaattacttatttcctcgcaggatgttgaagaatggaacacacttctttgttgattttgaaaaaaatctgctgagtgcggtgatccgaccagtcaaagtttgtacttccttggttcttgtcggcgatttcatacccagaaggggttgaatcttctctggattggcttcaattccttgggcattaataataaagccctgaaactttcccgagctaactctaaaggagcattttaagggatttagtttcctgtagtacttcctgaggactttaaagcattcgtccaggtcatctatgtgccccccagccttcctggatttgccgatcatgtcatccacatatacttccatgtttcgttcgatctggtctttaaacatcttgtttaccaatctttgatatgtggctccaacgtttttgagactaaatggcatgactttatagcaatatagacccaaatctatttgaaatcttgtatgttcttggttcggtggatgcattttgatttaattgtaccccgaataagcgtccatggagcttaatatttcatgcccagctgttgcctccacaaggtgatcgattcgtagaagtggaaaacagtctttggggcatgccttattgaggtctgggaaatcaatacaaactttccattttttgtttggcttaggtaccaatacgggattagcaacccaagccaggtagaaagcttcaattatgaagttgttatttcgaagcttctctacttcttcctttagaggtagtgctcggtccttgtccaacaaccttcatttttgttgaactggtcagaagtttggatcaatatttaggacgtgtgaaattataaaaggatcaattctgaccatatcctcatgagaccaggaaaaaacgtccaggttttctcttagaaattttatcaatgctgattttacttcgagcaacaaaccttttccaatttttagctttctggttgggatatttggatcgatctcgatctcttttaattcttctacaggtccaacattgctgcttgggtcc

SEQ ID NO: 159985 - DNA, 533 bp, Cannabis sativa
aatgcaaaaaaccaaagactacaaccccacagacacagatatttgatttacatattgttatttgaaggatacatattgttatttatttttccttattaatttttcactttagaactgctttccctacaatttcgaactatgtttaggtggagaagaacaaaggaggccgcccaccttccaaaaacccaagtgaggaaactttgaagaggaggaagaggaaagagaaacagttggcaaaggagacaagggataatgcaccagcagctccaaatacagggtcttccaatcctacaacttgatatagcataccactaaattagtgtttgaattgtaattgttttttttatgttatgtaagtaagtactggacgtatgaattgtaaccagtatatcctacttttttttggatgttgcttaatttagtgagttatatgttttaggatgcacacatgaactatgtgaaattaggagtttctaccattgaatattcttttttgggttaagttaagtgaacatcaagagcttattttgtaa

SEQ ID NO: 159986 - DNA, 508 bp, Cannabis sativa
acggaaaatgcgatggatggctagtttgatcacataggtaagtttagaaccttatttcttagtgggatatattttggagaaaataaaatatcagagttgagcaggtttatggaatttgactattttatccctagtcttgaaaataccttagttttaagttaaagggcattttagtaattagccaatgtgtgatttggtggctgcctaggttaatgacacctagcctctttattcagcaagagattaattagataatctcttttcatttgaagaaaaataaagagaaaaataagaaaataggaaaatcaaagaagaacctctcttccccttctctctctcttcgaaccagccataaaccaatggagattgttgctaattcttggtgttttcagcaagaaactcagagaaaatcaagccaaggtaagccctagcatcactatttcttagttcttgaattttaaggtttggttgaatatatgattttgaaaattaggggctgttagggttt

SEQ ID NO: 159987 - DNA, 823 bp, Cannabis sativa
  modified_base (63)..(71): a, c, t, g, unknown or other
aggaatgaaaatatagaaataggaatgggaatgagaataagaataggaatggaataaaatttnnnnnnnnnaaaaaaattgataaaaaaatcaatgttttttttcttcttacattagaatagtattcattcctttttaaaatagaatagtcactcaaccaaaatggtgaaaagaacattttattggaatgtcatttcaatactttaaaatgcaactaagcaaaagaatagaataaaaattgtttcctttctattccattacatttcattacctccaaccaaatgccaccttagtgcaggattgctcgtgtcttctttgtggttcggggacaaaaattgtctcacatctattttttgagtgcactgttagcaggagggtactaaaggaattcaagagctgggtgaattggaaactaatgaccacttctctttatcaattgattaggtggattgagagatcaaaaggtagtaaatttaaaaagttgtttcccttggcttgcattgcaactctgatttattttttttttggcaacctaggaatgaagccttttggtctttgaaagttactcaaaaagaagtacttataaggaggatagttgaaagtgttcactactacaaaatgggtctttagcttcccttttttcaatctattttataaaaagggaagctaaagggtgtaaaaatacccgcttattgaaaatttccatttagagtcggttgggaattaaacgacattgggttatatgaaataaccatatggcgttagttcccatataagaactgacgacgtagagtacacgattatttgacatgtgtaccctatg

SEQ ID NO: 159988 - DNA, 611 bp, Cannabis sativa
  modified_base (92)..(104): a, c, t, g, unknown or other
  modified_base (577)..(586): a, c, t, g, unknown or other
tgcaatcaatgtaaggtttttttaactttatatgtgttttctttttatcgttttagaagttcatatgtaggttgttaatcaacatacttgtnnnnnnnnnnnnnatcctggtaaaataatttcgacagggatttcacttactctagatcttgcaattgtgcttcttggattcgttttaacagagtagattatagggtaatgttagccaattgcgccacaacgaactcaatcttagctcaggtcatctcctctgctaatttcctggagatttacttgactatattcatctgactctgtcccttcctactcagggcatcagttataatgttggccttcccaggatgattaagaatctcacagtcgtactcctttaccaattctagccaacgtctttgtctcatgcttagatctttctggatgaagaagtattttagacttttatgatcagtgtatatctcacatttttcaccatataagtaatgccgccaaatatttagtgcaaatattacttgctgcaagttcaaactcgagagtagggtacctctgcttgtactctttttgttgggttttatgcccnnnnnnnnnntccatttcaatgtaatccattttat

SEQ ID NO: 159989 - DNA, 621 bp, Cannabis sativa
ggtaaaataaatttccaacatcatccagtttggagatgtgtcgatcatttcaatgtcttccgtgtcagtgatgctaggctcttcaaggaactatatagggaccaggttgccttatcacttatgttgctgctcgctcatcgggctaacgcatctgccgttgtattttcttctcttggaatttgtctgaggctatagcttttgaattgtgcaagcagatcatgtattttgctcagatatgctatcattttttctccccgaccctcataatcgctagatacatgatttaccattagctatgaatcactacaaatctcgatgtgttcggccttcatttcattcactagtttaagtccagcgattagggcttcgtattcggcttagttgttagaggctttgaatccgaatttgaccgctacgtgcaggtgttggccccaggtgtgacaaggccaattcctgcaccagatagttgatctgttgctgacccatccacatgaagcttccaggtcggtttgtcttcaacattacctggttgtggtattggctcgagatcgctgtcttgtgtgctttctgctttgcctgtgcatcccaccataaagtcggccaaggcttggcctttgatag

SEQ ID NO: 159990 - DNA, 589 bp, Cannabis sativa
aaccgtcgacctagtatgtcgcatatttcttgacttagacatttttctgagttactttgaggttttaatctgactcgctcttttcttttggttgtcgcagatagatcgtcttgtcccacactcgacgcgactcgtagagaaacagctgaagttcttggaagcctccctgtacaagatcgcgactggcgtttgttatgtacaactgctaaactgcgcgaacacaaactgattcctgagaacgtgagtgtttggagagagccggtgtacaaggaaccttctgaaaagcagcaagagcgaattgataaacgcctttccaagcaaacccctcgaccatcatcaggtatttcatcgcatatgcaaacttagggtgttagaattttatctttattaatattaatccttatttttccttttgtaatcgcagaaatgactttcctaaagtccgctcctatgctcaaccgcaaactgaaactcaggacagcagcgacctctcctgttacctcccagaaaaggaaaagcgatatggttgttactcctgtcgcagattcctccaagaggcctgctaaaggtattcaagagaaagggaaga

SEQ ID NO: 159991 - DNA, 706 bp, Cannabis sativa
tgtcatgtaaagtaccttccatcgagttcttgtacaacaacagctaccaggaaacaattgggataactccttatgaacttttatatggaagaaaatacagatcacctattcattaggatgaaatgggtgaaagaaagttcttaggtcccaaagctgttcagagaaaaagtgaggcagttgataaaaacagagtgcgaatgctagcagctcagagcagatagaagagttattctgatccaaagcgtcgggatattgattttaaaatcagggatatggtatttctccgagtattgcctatgaaaggcatcaagtactttggtaagaaaggaaagcttagcccaaggttcattggacctttcgagatccttgacaggataggtgtaacgccctaaataattaggcacgctacccaaaatacttaagaaaccctaatcccctaacgggattactaataaaattaacacgaaaattaaactttaataacatttggaatgaaaataaacttccaatactttaaactttaaaatctaaaacttacaaaagtcaggatgccaaaaatatttacaaaacattattacaagtcttttttccgttagccgacctaagcggcaaaacagagtctcaaaaatacatcactggtagaccccaacgcgcttggtctagtgtggcccaaacatgtacattcttcgtccagctcctacactca

SEQ ID NO: 159992 - DNA, 634 bp, Cannabis sativa
aagctgaaagagagatctagaattatattttgattttctccaaaatctaaacagagcatagtctaatttaggtttgaagtttcagctttttttcttgtattttttttttctattttatagatcatatttttccgaaatttgataaatttatacattctaagtgtcgaaacctgaaattaaataaaacaggcgtaattctatttgaaaaagtgacaatgaagaagaaaattaactctaaaaatgacataaataataagataaaaataacctaacaaattctctcaaactaaatccttactcgccctcgagtaagactaacaactaaaaacaacacaacctaaatgaaacaagccaatcaaccaaaacatgagtaattttcaagtaagccaaatacatggttttgtacgaatttttttacctatatatattaatccaaaattttagttcaatcacactctcgactcacttcaatcttgcattcagttcataaaaccataatcaacactttactaacatttgatataatttatgcatgctagataccaccttcaatcaactaaccaaatatattctataagcttgcaatactcactattctccactaatataaatagatgcataattcataatcaaa

SEQ ID NO: 159993 - DNA, 618 bp, Cannabis sativa
ggtgaacctgaatagggttaggcctaatggggcccgattgtaggcctgatgggtgaacccgaatggggttggcccgatgtgaccgattggtggcccgatggtcatgtcagaccaaaaggaaggtcgatggggcccgatgggacctgatgggcccgatggtttggccccaattttgcccgattagaaaacccaaatagggtttggcccgatgtttcccaattgtcagtcagaccaaaaagggcagggccgattggccgattgtcaattctcttttatcttaacaggaactgatgagtccgatgttaagcctgattgggtacgattgggcctgatggttacagatttattacttttaagacttttttattagattttttgttctaaatttgtaattgtagtttttttaatgtatgtgacaggttcaactgttaatgcgtttgtaatgtataatggtgtttgggagcttgagggtgtagattgggttataaaggggtcgaaaattgaacatttgacattgattcgaacgtaagctactcaggtttggttgatcttttgtatgaagaactagatattgacaaagtggagtatgacttaaaactggaagtaaattacaagtac

SEQ ID NO: 159994 - DNA, 523 bp, Cannabis sativa
ttttgatcacaacgtcaaaaaaaaattacaacaaaattcaaaataatatagggcatgaaataactaaaaaataatatttaaaattttaaactccaccaaatatgtttatacataatacataaatctttaagaacatacaaaaaaatattataaaataatgttcaaatcttaattgtatacataaacttgataatattcactaagacttaaatcaatatatgtattttgaaacttcaaaatttactttacaaatgtgaattgttatataaattaatataccaaattaaattggcgaatcacaaactaaatcccaccgcttagtttaacaaaaatgcaaactataatagtactacaaagtatttcaaaccgcgaacataatttttatgcaatgttactacggatggtttatgtaattactacaataaatgtcacttttatcagcacagttcgttactgcactggtaaaagtaactttttaccagcacatttcgcaaactgagttggtaaagaggtcaaagtttta

SEQ ID NO: 159995 - DNA, 530 bp, Cannabis sativa
agggcataaaacccaacacctctaacataattttcttagcttcagggtccgatacacaccttaggtacgacatgctaagtcttctttagtagaaaatgttatccatcatcacataacggtgcgcttgatactgtatccttctggacatcatcctctcttggggcaactcgcctttggttatgtattcgatgatggggatcatccagttgagctctcgttcaactgctgccacaatatttttggctttaatacttggttctgtgaggcgttcaacgggtaccacccccagtttctcaatttcgctatctgatgctaacttagccaaacagtctgcgtgggcattcttttctctagggattctttccactttgtagttcgtgaactcatggagcagttctcagacaattgctacatatgcaaccattttttctccacatgtttgatattctcccgacacttggtttaccaccaactatgaatcactgaagacttctactcttgtggcacctacgacttttgctaacctcagc

SEQ ID NO: 159996 - DNA, 753 bp, Cannabis sativa
  modified_base (292)..(298): a, c, t, g, unknown or other
  modified_base (507)..(508): a, c, t, g, unknown or other
aactcaaacaaggactcaaactccaacctgaactcaaacccaaactcaaactcaaaatcgccaatcgaactcgaaccgaacaaggactaggaccaggacaaggaccgaaacccaaacccagataaaaacctagatagagacctaaaccagaaccgagactaggactcgaacctgaacttagaccgggacccaaacccacacaataatcgggacctggacacagatcaggatagtgacctgggaaatagaactaggacttggacctagtacccgacccagaccttaacttgannnnnnnacccagctcgtgacccggcacaagaaatcgaactagactgggacccgagattgggatccagatctagagccagggcttggacaaagctcgtagtcggtgtctgggtttgggaccagccctggacccgaaccgtgacaaggacccaaacccacacctggacctgaaccgagtcccaaacacaaaagtggacctgaacccgtaccctgtgnnccaaaattggaaccaaaaccggacattgatcaggacaagaactaggacttggactttgaatcataattgaaattggacctagatccaaaaccgtaacaagacaaggacccgtactccaaataagaccaagacgcgaattgggagccgcacccggatccaacccaatcctggacttgggacccgaaacaaacctgaactcagactcaaacatggaaccagactagggacacagaaccagggtcggg

SEQ ID NO: 159997 - DNA, 559 bp, Cannabis sativa
tgtcgttattgatgatgtattttttcaaaaaaaaaaattaataattttcccaacgataggtaagtgtcgttattgatactatcatttttaatgaggactttttagcgttagtaatagtggtgtcggtattaactataattcttgcagtgattataacaaataatgacaatattataacttatatatttattaattattatgtgtcttcttatacaactgttaacatagattaaaaaaagaattgacgaaatttttgatatagtattgtgtcttttttttttttttacaaaagtgttaaaatatataatacttagagatgctattataatcaaagcttactttaaattagttttgttatatgagaataaaagagttaaaattgatattgtgtcaaaatttaaataatatttattttaaatttagataattaggattcttgccccctgaactttgacatgtaccaaatcatgccccctgaagttttaaggacgttaaaaatcccccctgaactattgagattgttggatttaaggacttttttgtaattttagtaaaaaag

SEQ ID NO: 159998 - DNA, 722 bp, Cannabis sativa
tagtttacaaaatttttaaaactgacgattctctaatataataataattcaaaaaaaattgtcataatttgagaagtaaaattccaataaaaattctataaaacacttcttaaaataagtgcaccgctacatttctatctgtttcgatactgaaaaaaaattttacgcccaatttattgtacgttttttaagatatatctttacaaattttaaaaatttaaaaaatatttaactcgcccaaaacaaaattcaaaacaacctgttacatgcataatttctttaattttataggtgtgaaataaaatatttaaacattgtttactaaattaaaaactattttgaatctctcaaaatattatagaatatcttaaaacaaatataacatatatgactataaaaagaattaggtaatgtttggttggaggtgatgaaatggaatagaatgaaaaagaaacaaatttcattccattcctttgattgcattttaaagtattggcaatacatttcaatggaacgccctttccgtcatttggtggaacgactattctattttaaaaaagaaagaaagatcattccaatataacaagagaaaaaatttaatgatttttttttaaaaaaaaatttatgcatttcaaattttattccattccattcctatttctattctcatttccattccccttcctattcttgttcctatattttcattcctcctaaccaaa

SEQ ID NO: 159999 - DNA, 582 bp, Cannabis sativa
  modified_base (517)..(520): a, c, t, g, unknown or other
aaatccatggtgatgtcttcccatttccattcaggaatctttagaggttgaagcaaacctgcaaacctctggtgttttgctttaatttgttgacaggttatgcatcttgacacatattcaacaatatcccttttcatacccggccaccaatacaaggctttcacatcatgatacatcttggttgtccctgggtgtagggagtacggtgtagtatgagattcatcaagaatctcctgtctgatatccttgacaaattctattcttgtatcataacaacccatcagaaaaatacgaaaagtcttttgccaaacgggcctctaacttctccttacgcccctatagctcaacatcactttgttgagctactccaattctttccaatagatcagacagcaggtaatgttggcaagttttccaattacaaattcaattgccgctctagtcatatcctcagctaattctgctgaaattttctttacctcataaacttgccctggtcctttccgacttagagcannnntaccacatttgctttaccagggtggtagagaatttcataatcataatctttgaccagttcta

SEQ ID NO: 160000 - DNA, 605 bp, Cannabis sativa
aacacagcccccatagacagtgaatacaaaccctgttaatgactttctagtgtctaaacaacctgcataatttgaatcaacataaccagtccccaattccttgaattttctaatgccatcataggttaaaccagtgttcaatgtaccttttatatacctcatcacccatttcaaagcaccccggtgagtatttcttagattagcaacaaacctacttgtcatgctcatggcatgaactaaattaggccttgtacaaaccattgagtacatcaaactccctacacaactagcatagggaattttactcatcttctctttctctacatttgttgttggtgcctgggaactagacaatttaaaatgctgagcaagaggagttgaaactattttggagctgtccattccaaacttatttaacactttctgcaggtagttcttttgagacagaattataacatttgatgagggtctttgaatgtcaattccaagtattttctttgcattaccaaggtctttcatttaaaactcttgactgagttgcaatttaagcttgtttatctctgatttctctttaccaaatatcaaaatatcatcaacatataaca

SEQ ID NO: 160001 - DNA, 516 bp, Cannabis sativa
agagggacagtgttaaaccagaaatagctaaactcattggtatcaaagaggcattgagttgaagagatagacaccaattagatcgggttctgctggaaacgagcagcttagtttgtgtcgaagctatttatgtaatgtccccgattcaatcctccaatagacccttacactcacggagtgtgtattttgaattctctccgtaccatttaattagttttttttggtaattgcaaaattattcaaaatttgcaattgaccatttgttatgaaaagaaatgaaaaaacttctaatactatgtatattcaataaaccagaacaaattgatatttacatatacaacatgtatatatataatatatataatcttgattaattggccgttagaatttgaatattttgatgaatgaaagtggcatttttttcaacatgatgaatatatagatacataaatacctaagcaactagatagatatagatagcttattagctagtatatataattggacatatccaac

SEQ ID NO: 160002 - DNA, 780 bp, Cannabis sativa
  modified_base (158)..(162): a, c, t, g, unknown or other
  modified_base (461)..(464): a, c, t, g, unknown or other
  modified_base (556)..(564): a, c, t, g, unknown or other
aattggaaaaataatatttttgagaaaataaggaaagattgtgataaaatggaaaacttccaagtggggcccaaacatcctatggccggccactaaggaaaatattttccataattttaatgcctaataaatcttaacctaaacctaggtggttgccnnnnnatagatagtgatggctcacactaaatgataatgaaaaatcacctccagtcaaattttcctgagccttgttttctattaatttcgaacctcattctcttcttcttctcttcatattttcataccttgagtgatagagtaagtgcccacgcacatcaagttggtcctcaatcatagtatgtaagactgtgaagaaaccaatcaacaagaaggagaattgggctcagatcttggtaatactctactacagaaatgatacaagggttagagatttgagcggaaagagtcatttaattccgctnnnnccactgtaaggtttctcaaactttctatgtgtttatttagattgttttagaaattcatattaggatgttaaaaacatacatggtagtaaatnnnnnnnnnggtaaaatatttccaacagaagggtctcccaaatagagttgatgtaggattgggatcaccctcatcctccatctcaattatgtagaaattacttagaatgataagtccataagcttgcacaaaaacatattgaactatccctaagggataagagttagtctgattagtcaattgaattaaaacctgagtttctcttaatggaccaagatttaaata

SEQ ID NO: 160003 - DNA, 585 bp, Cannabis sativa
gatgaggagctcaaacctttccatccaaacattatgagaactgattttcaccagggatttaaaagccctcacatctcgtcgtacgataggactacagatccgttcgctcacctgaacaactttaatacaataatgtgagccaacaatgtcacgaataacttacgttgtatttaattccccacctcgttgattggggcagcgagcagctggttcaataaattcacccataactcaattacctcatgggaatagttatctaaagatttcaagaaacaatttcaggcggcaagggataggcgacctgaagcgtcttccctcactaacgtaaagcagaagccaggtgagtcactaaaggcataaatgagtcgatttagtacagttgctgctagagttagaaacttgaacgagagtatacagcgtattgctcttcaagtagggattacgactgatctctagatagttggaggcgggctgtgggatgacttacagggtcgtcctgtaaaaaacatcagtgtgttcaatgaaagagctcaagtgtttgtacaaaaagaggaagcaaggaaagagatgaaattgataaagact

SEQ ID NO: 160004 - DNA, 573 bp, Cannabis sativa
cactctcccattgggtctgggtggaagaccggggatgtgttgggcatctccggcgggagcaactcgagccagtactcctactgcaccccctggtgctccctgcagtacaacccctgtcgcctgacccggattaaggtgaggcagctgaatcttgatccactcatagaggtgccccaattggataaggttttcaatctcatccttgagatttttgcattcattggtgctgtaaccaatgtcgttgtggtactcgcatcttttgttgggatccctccggcagctatccttgtacaagggaggtggtctccagtagtgcgtattttgcctagtggcaaagtacacacgctcttgggagtccgtcagctccgtgtactgggtgtactatggagtgtaccccctattttggtgtttctcctccgtccgggtgctccctttggaggatcctttactcctcgagccttgggaggggcctgccaggtaggcggttggagcggagtacgagggagcttctccatttattcccgagggatttccaaaatgagacgatgtgggggccaaggcctggccctgact

SEQ ID NO: 160005 - DNA, 579 bp, Cannabis sativa
aaacgcagtaaagagaaacaaccaaggtgcaaaaaagagagattctatacattacaaagcaaactcaggcaaaatcatttcccagaagttcaacattcgacccagaaaactctaaacgtgcaatacaagcaaacagtaagcgagtgtaaagtgtcctgagaacttacatgaagtttgaactctgggggttggtgttgatcgccggtaaagggaagactggcaacggcgaaggaaaagaagcaggtaatctatggtgtctgaaatttttcctctctgtggaagctttgggaaaatttggtaaaatggtgaaagtaaccaaatgaaatgagaaggctggctttataggccagaacgggtgtgagacagctgtgatcgaccatcatcgtacggtcagaatagcaatcgattcacattctacaaatccgacggttgggacaagcgttcatcaaggcggtagaaaacatttgaggactcgaatgacacccatttaatgtgtcgtatcattaaatggataggaaacgaatcgttgcctgcaaaaagcgaataactgcagtaatgatggtcataaatgcatcccca

SEQ ID NO: 160006 - DNA, 527 bp, Cannabis sativa
tttgagaaagttttaagcttattcaacttttcttgtttccctttaattctcaatccctaaaattcttttagctgagccaaagtctttcatttcaaattccttgctcagaagcttcttgactttgtctatttctcccatatgtttcccagcaattaacatatcatctacatataagagaagatatataatgcaacttgagtacctaacataaacacaactatcataggcacttctcttgaaaccaattcccagtacacatttattgaatcttttgtaccattgcctagagcactgtttaggccatatatggatcttttcaacaggcaaacatggtctttgtttcccttttcttcaaaatccttttgactgcctcatgtagatttcctcttctaaatctccatgaagaaaagctgtttttacatctagttgttccaattctagatcctcaatagcaacaatgcttaagagtaatatgatggaggtgtgtttcacaacaggagacaaaacttcattgtaatcaattccct

SEQ ID NO: 160007 - DNA, 738 bp, Cannabis sativa
catataatacaactatatttcaaaacttaatagattaaatgtatatttcattcttatatataattttttcttctacatacaattcaaaacaaaaattacacatttctgtacgtatgcaaacaattttttttcttccttttgaatttgttactttatttattttaatttgtttgttggagatataaaaataataataatttattttattttattgctagttatgtaaaagaaaattataaatattaaataatttaatattaaaaaactaaccaattcaaaataatcgatctaatccacacttttgcagattggattggattggatccaaaatataaagttcgcacttagtgcggatcgaatacactactatggtaagaaaatagtgcagattaaattgaatgaacaccccgcaaatccaaaaatataatatttttagtgttgatatatattaatactttttaaattttacttactaattaaaaaacacattaataaaaaatgataaaaataattagtgaaaaaaaaaaaaaaacagtcttttttaaaaattaattactgtatattagttttttaatggaaaaaaaaaagtttttacactacatattaaaaaaaattctttttaactctgtagggcggaatttttttcagaaatactgtaagtttcatactgtgtactgtgttaatttttcactgttattttacggttgctttttagttgttctattgttgtttttaatt

SEQ ID NO: 160008 - DNA, 637 bp, Cannabis sativa
  modified_base (600)..(609): a, c, t, g, unknown or other
attgcatcacttaggttgaatatgataatcccagtagctgtttcaagatactcttcttgctgtatcttagttgttccttcaggccattcaatgggttcttcaaggatgctcaacaacttctgttgtgccagtagagatcttattttcctcctccatattctgtagtcacctgatccatcaaacttataaacatcaactttaaaactactcatattgtatttgttaaaaaatcaaattagataaaggtttagaatgttctccaaatctccaatatctaattcctcctcttgatgtccatccttgtgttcttaattttcaatgtctttcaaacttgcttcttgattgtattattttgaatctctttgcggaaataatttggctctgttaccattgttggaaattttttgtttgaccaacactttttaaagaaacaattaatacaaaggtataaatttgttatttttcaaaaatatcaatttgcactattgtattaattgtttctttaaaaagtgttggtcaaacaaaaattttcaacaagtaacataaaaataacatcaaaacaacaacaaattaacaagagtacaacataaaaagaccgtnnnnnnnnnnaataaaataaaaaaatcgtaaaaaatat

SEQ ID NO: 160009 - DNA, 554 bp, Cannabis sativa
tctatgttgttgtcatcaatgatcattgcatcatatttggggtggttaggatgttgctttatggaatcaacagatgtatactatacaaacaattgttataaatacaatcaacatagaagtgaatgtaagattttctaattttaagaaacagaaaactagtagggtagattattcttagtaggcagattatttcttagcattcctcttttatgatattagaatgatgaaattaatactaaattttatttgcacctacaaaattataaatgtactccaatattaaaaaaaaaaaaattaatttgaaaattttatatttaatattttttttaatttttttaccacatgattttgtgttaatattaataattattttaatttaatttttaaataattatatatatatattattctaataaaatttcatgtaatttttttgaaataatttgtcccaatatttaaaatatatttttatttttatatttattttgtatatgaattttttgaggatttgaaaagaaaaaaaaatgatagtgtaaattaaaaatatatttttt

SEQ ID NO: 160010 - DNA, 538 bp, Cannabis sativa
acatacatgcaattcaagaacttgaaaatccccacatgcttcaccatcatccaacaacaataaattgggataaaaatcagatttctcaacttagaaaaaaatcctaaaacttgctaacaacataggtgcaaaacccataattaaacaagttcaagttacaaagaaatcaccattagctcccattttccaccctcatgcattcaaagcccaaacacattactctcaacaaatttcagcaagggaaaattaaatttaaaacagtaattactacctcaaattatagcaagaacaatccccaacacctccaaattctaagctccaaaagttagcgaaaattcaagttctttctcaacaaaatcaaaacttggaaaagaagtttagggagagagaaagagaggagttggctgggtgtgaaaaaccagaaaatacaatctctttttttacaaataattccatttactacaaataatacatgtaggccaaattaccatattgcccttagggccataacacacttaaaagcattcaaggacaaaat

SEQ ID NO: 160011 - DNA, 645 bp, Cannabis sativa
  modified_base (147)..(147): a, c, t, g, unknown or other
accaaaaatattgtggcagcagtttagccagaccccaattggatgatccctatcatcgaatacataaccaaaggcgagttaccccaagaaagggcactgtctagaaggatacagtaccaagcgcaccgatatgtgatgatggataanattctctaccgaagaggactcagcataccatacctaaggtgtgtatcggacccgaaagctaagcaaattatgctagaggtccacgaggggttctgtggagatcatacaggaggcccaagtctctcaaagaaaatattgagacaaggatacttctggccaataatgaagaaagactgtatagactatgacctaaaatatgattcatgccaaagattcgtaaacataccaagagccccgcccaacgagatcaccctaatgactagcccctggcccttcgcggtttggggtatagatcttattgggtccctacgaataggaaagggaggggtaaagtatgttatagtcgcagtagactacttcacatagtggacagaggccacgccaatgaagactataattgctaaaagagcactagactttgttatcaaaaacatagtgtgtcgatatggcttgcctcacaagataggctcagaaaacgggaagcagtttgactgcgaa

SEQ ID NO: 160012 - DNA, 539 bp, Cannabis sativa
tttatttacgttttgttagacgatcagcaaatcgtgctgcccactatgttgctaggcatgcacgatctctaactggtcatagcattctggggtcttctatctcctgtgatcttcagaatatcttgtattcagaatgctaaattaatgaagttgcaatttcatgtcaaaaaaaaaattattgtaagtaattggttactaaatcctaacctcttggtctgattggtttaggatttgaatcctattttatcattttgaaaacttaaaagttgtgggccctcaagaaaacacgattggttactctattttcaaaaactgtttttgaatctgaattgaaaacttaagctaaaaattgaaaacaagaaattcacattttcagtgaatttgaatacaactttttttttttttaaataagttttcttgattttgttttttttttctcttctacttttttaagagaaatgctaaagggcaccagtggtgtctagcaccctcctatgtgtcaatatcgctattggtccaattaagtatcgggtcccata

SEQ ID NO: 160013 - DNA, 820 bp, Cannabis sativa
atcttaaaaattatgttgtttaaatattgaaaaaatatttataactctgagatacattctaaaatggatacggagactatttatcaagatctcatcacacatacaactctgtgagtttaaaaatattagcttcaaccatatgaaaagtaattcttataatagagaatggatatgataggtagacaacatcaaatttaatccaataaaaccgaaatgattaaatccaatctaattataaaaaaataaaaaatgttaattacaatcttatattacaaccttttagtcaatctctacgtccgaaatcaaatgccgaaatatttttttttcaattttttttcatagcgttattcgttatagttatagtataatccctgtaaattttagaaaaatttcgaatagtttacagtaccgaaaaaaaagttcctgatactccaatttaccacgcgcgttcaaaaaacttcaaacgtattttcgatattgtaaactattcgaaatttttaaaaaatttatatgaatgatgttgtaagcataacgaacaccccgtgaaaaaaaattaaaaaaaaaaattcgacatgtgttttcggacgtggacgtggacgttgactaagaggttgtaacaagaggttgacggtagcactcctctaaaaaaactccaattacaattagattggattgaatgttaaatgttagattctgattggattggattaattattagatgtcaatcttaaaatctaattaaaaactgatccaatccaattacatttatatgtattaaaaaattattttatttatttaggagaattaccccatatattat

SEQ ID NO: 160014 - DNA, 729 bp, Cannabis sativa
  modified_base (700)..(700): a, c, t, g, unknown or other
ccctaatcacttagaatagctattaaacatgcaaacctaagtaattagttttagctttgcttaagttcacgatcaggacatccctgaatcttgtaatggtgtacactaagtacataactatttcatcattttgaagttttcctatcactaaggtattcccttagaaggacttaggcaactattagtaactaatcatagacctttcactttcatcaatatgaaatctgaatttctagggaggtaagtttggatacaattcaaagttcaacttaataatctttgaactctatatccaccaaatttttctccacccctattagctcgtaagatctttaaccacttaccttaatgttttttaacattgctagaaattcatgaaatttcttaaacatttcaaatttcttggcctaaggtaaaatctagagtgatcgtcttaagaatataatgaaaactcatatccacccctgaatgtacatccatgttcgaatatagatgatcctactttcaagtggatataggcatatttctctttgtagagaatgagcttgtccaaaccactatgaacatgatacaaatgccatagatataattattgtggttgtggtctagttataataaagagttcttagaatagttcaagtggatcctggtcacagaatacaaaactcgcaatccatacataaacatacagtttggatcnattgacagaaaatggatattaaaacttgt

SEQ ID NO: 160015 - DNA, 782 bp, Cannabis sativa
acagatggaaaataattattttttcagtcagaacgtaagtatttcaaattccaatcctaaaacaataacataaaaaattactaaaacaattgtaaaacaacagtaaaactacaaaataaaataaccaaataaaatcacaaaaaaatattatacctcaataactcttttaccaatgaagactaccataacatcacgagagggaacctttgccttggaaaattttcccttaccctaaatacattaaaaaaaatcaaaataaccaaagacaagcgttaaaaaatataaaaatcaagtgtataatactaaacaccgaataacacattcagaagaacaaaacatatatttaacaaaatcagggagtgatgaacaaaatcttaaattgatatctgagactgaaaatgcacaaacaaaaaaaataaaattaaaaaagaagcttacgaagctgaagaaaattttgaagatggtggagatgagaagagcaataattaatggtaaccacaatttaaaaaaaaaacaatctttcaaacaaatgaagaaaaaaaaattgaaaaaaaaaaagcttaagacgaagaagaaaattttgaagatgatggagacgaaaagatcagtaagtaatggattttgagtgttacatgtattcagttgttttttttaagaaaaaaattacctcaaaagaacaagccagaaaaacaacaaatcaaccgttaaaataacattaaaacgatgaatacaataaaaaaaaaaaaaaaagcaaaaaacaaaacaaaaaaaaaaagaaaaaa

SEQ ID NO: 160016 - DNA, 530 bp, Cannabis sativa
ttttttttcacgaaggctctcaatgaaagcaccaaactattaacgcagatttttgttaactatatttaagcctacatcgagatggatttgaaaaaatagaagcagtaaaaaaaaaaaggaaataagaacatagaggtttttacgtggttttgcagttataattctgcacagtccacgagtcaatcttattagatttctgatacaattcttaggacttttctctaatgaatttttcgtcccttttttagtataatctgcccctatttataattacataggagggcagttaattacaaattggattgatatcttacaacaataatctcctgaaattgtgggattcgattacatcccacgtaaaataaatacgattattatttgaaatcacacagatgtgattggtccgctttaaccgggtcaatgtaaacgtgtatttaatatgttgtaaattgtatctgtaataccctagaattaagaaatggattagcaaaatcctaattagataattatgaataattgaggaattatat

SEQ ID NO: 160017 - DNA, 573 bp, Cannabis sativa
aacttaaaaatagaattaataattaagttgattttattcaagttacttaattatttgtttctatttcatgaaatttaattcattagaaaatatatttaagtcaaaaattaattttaattaattttaggccaatttaaattaaaatattttcttagatattaaattacaattaataattaagttaattttattcttgatacttaattatttctattttgatgaatttaattaaatagaaaattatatttaagtcggaatttttttaatttcagatcaacttaaattagaataatttttcataatatattttattttattttaagaatcattttccaatgctaattttgaaatacatttatttttaaatgttgattttttgaaattttttcaattttgaaaattagattaagttgaaaattaatttaagcatttttagatcaacttaaatcaagtaattttcattaatgatttgataaaataaatagactaaaaatatattaatttaactagtaaataagtaattagtttataaattatctagctagatattttctaggtagacttttggtattt

SEQ ID NO: 160018 - DNA, 537 bp, Cannabis sativa
gtaattttaccggtgacaataccaagtccgacgactattctggagtttgatgtcggtgccgaaaaagtcgctgaagtagttgccgatgtcggaaaaatcgttggagtcaaaaaaatcgtctaaattggtattgtcgcagcaaaatcactagaaaaatcaccaagaaaatggctttttcatcaagaaaccaatttcttcaccaaaaaagtggtttcttcaccaaggaactaattttgttacacaacaataataaagattatgaaaacaaaataaaaatgatatacactaaaaataattgaaactagtttcatcaatcaaccaaatagagaagaaaaatacaaaaaaaaagaaaattaccaagaaattggttccttcatcaagaaactagtttcttgatgaagaaaaaaaaccagttacttggtattttttcggtaatttttccagcgacaatgccaatttcgacgaatttcctagagtaaattgtcggtactgaaaaagtcaccggagtagctatcggtgtattagtcgtcagagttg

SEQ ID NO: 160019 - DNA, 675 bp, Cannabis sativa
taataaataagttaaatggtaaattaatttgataattaaataaaattattaaatagataaaattgacatttatagatttagaattaaaagatgacatttgtgaaaaggaagctgagttatataaaatggcaaaattaaaatcctataggcccataagggttcgacctaggatgattaataaagccattattttttttttctttttaattctatttaaattccaaacctaagcctagtatctccctataaatagaataagatggctcttattttctcaactaataattgacttcagactactttgtcaaacaaaattagaaaaaacaaagagaacctcttgtaattcaaaattctccttcttctctactgaataagttgaagccttggtgaattgagagtatgtccactcatgtcaaagtaatacctagcatagtgaggaagactatgtttaacgaaattgaaggatagaagatccaagttcagatcttgataaggctctactatagataggaatcaagggcgaaagattagaatggaatgagtcattatatttagctaccatcaatgtaaggatttttcaatctcttatgtatttatttcattattttaggaagttcatatttaggatgttagattatagaattataatcaacatattagtaaatctagatcctg

SEQ ID NO: 160020 - DNA, 798 bp, Cannabis sativa
ttgtgagtgttggaaaattctcacaagcctagaggaatttatgttatctctgcgcaaaatgctgaagtaatgctgaaccgatgctgtaacacctaggagaaaacctaactagaaagaattagctattcaagccatttttaccatattacatttttttcttacaagcaatttttttagcaacaatagtattaattttagcaagtttaattactgtcatttttaattttgaatcattgctcaaccattttcatgttatttcctcttactttcagttgtaattagttagttttacatcaaattttgtttgcaatccctatggagacgatcttacttatcactttattacttgtttgactgcgtagcgtacgcaattttcacaacacacagcaataagcagaacccaagaattgagtacaatttgatgacactcatcatctttcagctaatggggctcgaatcgaaaaggcttttgagattgatggttgctcagcaccacattttcaagaacagtagtaactataggtctgtggtccgagtaattacaatcatcattaagcatttttactatgggaaataaatcacaccattgttagttacaaacaaagcgatctagtcgctcttgtacatgtgcacccccattcctcttattcatccaagtgaatcgcttgccttcataacccaaatcctcgaccaagcatttatcaagtacttgttggaaagttgtcattgcattgaacccacgctcaatgtgtgacagtcatgttggaaattattttaccaggaccttagatctactca

SEQ ID NO: 160021 - DNA, 581 bp, Cannabis sativa
  modified_base (40)..(46): a, c, t, g, unknown or other
  modified_base (234)..(241): a, c, t, g, unknown or other
aatatcacttagttaatcttagatcaatagatcttaatcnnnnnnnggttaggttcgatctcaactgtgtcaattatatgttcttggagttgttatgtaaagaccgcttagctttaattttgaaattagtagataattaaggctttattatgaaaattatttattaatattgaattaattatttatgatgatttatttgaattcagaaggcatttttatgtcacatatagaaannnnnnnnttttgcatattttgtgcccggcaatatttgaacgcggtgtatggctatcagaatcacatcttagtatttttagtatagcgggacaatattttagacattgggaataccgggattagtcagggttttagaatttcccaaaataccccttagtgcaattttatgacttttagtgtgggaggggcaaaatggtcatttggccccattggtcttttgtcttttgtcttttgtcttttgtgagtgtgttttatgttattaaatctgatttttatttggtaaattagctgatattatattttaaataaaataaacttaattactcatttatttcaaaataagaaaa

SEQ ID NO: 160022 - DNA, 848 bp, Cannabis sativa
gacttttccgaagtttgctgtcggtgccgaaaaagtcgccggagtagctgctagcgtcagaattggcattgtcaacggaaaaatcgccaagataccagtttcttggtgaagaaaccggtttcttagtgatttttttagtaatttttccggtgacaatgctaattccgacgaattttccggcgccgacagcaacttcgacgactttttcgacaccgacagctactccggcgactttttcggtaccgacagcaaactccggtgacttttccggcatcaatgacaataaaacttcctaaacaaataaaaacattaaatatgagatttgaaaacctaattacatgtatatggcatatcaaataccataaaaagacctaaaaacaaaaaaataccataaaaattggtcaaacttaaatgtgccatatttatcataagaacttttaaaatcctatagtaagtgtaattttctcttttatttatttcttaaatctaatagtaatgtggaaaatataaaaattcagtttctttttttatatgatagaatacattataattatagtagttattctattcgtttttaaaaaatttagatatgatagacaagagagaattatatataaaatttgataattaagattgctgagagatattgaaagtttatgaaatatgcactgatgatgacaataagaaagtttaagtgataattataaagtattaggtgcttctacaatatatacacaccttaaagggatgtactgatacactctctatctgttttggtatttaaaagaattttttaatctaattttttttattcatgtatgttatagttatttaagatatcatacaaa

SEQ ID NO: 160023 - DNA, 664 bp, Cannabis sativa
ctgtcacaaacccaaaagtttgggaggtttagccgccaatatccctatttaaaaaaaaaaagtaatacttgaaagatatatacgtataaaaaaaaatattgtgtcctttgttggtatagtttcttttagttaaatatttttgtttttgttcttctaagagattattactattattattattagtttaattagagatttattcttttaaaagtaataaaaaataaaaaaaaaatgagataattaagaagagaataaatggaggtattaaaactatatttagttaaatttttctaaattcaaaagtctaagaaatcatgaatgaaatacaaaaatctcaattgtcatttgttgcaacaatatgtattatgagatataagataacaatgttaaaaacttgatagaaaattagaataaataataattttataaaaataatattttgtttatgatttttgataaataaataaataaataaaaatcaaacagtgaattaaaaaagaaaatgaatattgtaaaataacacaatattattaaaaaaaaatcaaaacagtaaattaaaatagcgttaaaacaatacatttaaattatacttaacatataaatagatatattgttcaagaaaaaaaaaatacttatatattcatcttccctcatctttatcaca

SEQ ID NO: 160024 - DNA, 650 bp, Cannabis sativa
aaccaacatggagagaccatgggtcacctgcttattgaaaaaatattgcaaacatgaaagtttttggtgtgtgaaccaaagatcaagcgattcttttctttggaagagtattttgggtacgagagaggtgattcttcaaggttctatggcagttgctgcttcagggaattcaataaatttctggaagcagccttggattccttggatggaatatagggaattccatgagctgatgcaacagcttcaaaatcaaagatttaccataagaagcctggcagatatttcagaaggaaatgaatggaatgcagagatggttcttcagatttttggtcaagaatttggggagaggatccttcagatccctagaattccaaggccgtttcctgatcaaatttattggaagaataaccagaatggtaagttctcagtcaagtctgcctatgtggtggatcagaactagaggtttggatcagtccttagcatctggaagtggatttggaatgggaggatacatcctaggatatcgattttcctttggagaatcttgaatgaagcaattccaactaggaatcgattgccttttgttgccaacaaagattgcagcctttgtggaatggaaggagaaactgctctgcatcttttccgaaatt

SEQ ID NO: 160025 - DNA, 541 bp, Cannabis sativa
tactatacagtgtaattactaccctagtaattacactgcatagtaattacacagttgtttctaaacagacccttaatatttataattgttacacatatgattctcatcaaaaaaaatggcagcaaaagtatcttattttatgattttgttacagtcgtacccttttttgaccaataagtgtcaactcaaaaacacaaagcgacatattattggactatgtattaaataaactaaaaaaatatgtcgccacatatttttaagttagcactaaacgaatttaattaacacttaataaccaaagaagattacgactgcaacaaaatcgtaagataaagtacttttgctgtcattttttttttattaaggtcttattgtgtaacaattacaatgttaagagaattttacggcaaatatcccatttttttattcaattttaccactactatctttatagggacatatgtgtcactaacttcagataatagagcttttgtcctaaaattcccttttagaccacttccaattaatagtacaaattttg

SEQ ID NO: 160026 - DNA, 554 bp, Cannabis sativa
  modified_base (388)..(394): a, c, t, g, unknown or other
tcttttttttttttattttaagtttgtcatattatttttttatagaatcaaaactaaatttataggttcttatgagttttatttgcaccctataaaataataagtacaccatattagaaaaatacttatataattttaaaaattgctcttaatatatttttaaaatcttttcttcgcattattttatgttaatttcaatactgattttgattttattttcatatttttttctaaatcatgtatacatatattttttttatttttctaagaaaattttatataattttctgtcataataattaaaatataattttttttaataagtatattttttaagaatataaaataaaaaagttaaaaaaaaattagtacaattaaatatataaannnnnnntaaaataaaaattattaaaattggtgtctttaaaaatttttggggttagataatttttttttatagggtcgagactagtttcataaattttatatgattttcttatagggtcgaaactggtttcgcatattttgaaagttttgtaatgagattgcttcat

SEQ ID NO: 160027 - DNA, 649 bp, Cannabis sativa
  modified_base (335)..(344): a, c, t, g, unknown or other
cctcagcttttaagcatatgggattatccagtgagtgaatgggcctgaaataagatttaatacttttgaagttatcccaataagccttccttacaaaataatggggtaagttgaaaaatatcccttttattaatcaattaattaaatttacctctaattttatatttatttgaaacatatctctttttatatgtattatacccaaaataccctgacataagagagtcacatagagagtatcttaaagtgacaggggcataattggtacaatgtttaaaaaaagaggtaaaaatgatagactttaaaaaagaggtaaaaataaaagaggacaatannnnnnnnnnatagagtgtaatttcctccaaaataattgaaaaataacattttcttttattttgttcttttaacaatacaacattgttaataaaaattagggttaattgcggaaaaacctctaatagttttactttgcttgcaattaatcttcaaaatttaaattttggcggtaaaatccccaaaactacaataccgttaccaatttataacttctatccaaatttagttgttaactgtcaggttggattgtccacgtggatacagtatacaagtggtacaattttattggtccatgtaaataattatattaaaa

SEQ ID NO: 160028 - DNA, 545 bp, Cannabis sativa
  modified_base (205)..(208): a, c, t, g, unknown or other
tcccactacgacaaggagccgtgaacttcttaacaagaacatttgtggtagatttctcatttataacaacttgcgttggttcaaccaagggagagggattatcctctacttgagtagaagaggatgaaaaattagaaggagttatttttgaaagcatttcctctaacactactttactttgcggcttgaagttcttaatatagtnnnnttcaaggaaagtggcatttgtagaaacgaacactttatcatccttttgactataaaacagtccgccaatagtctccttagattttccaacaataagaaaacttcagttcgcgcttctagtttgccttctatctttcttaagacatgagtagggcacccccagattctataatagcgtaaactaggtatacaaccattccatagttctacgggtgtcttagggactgatttcaaaggaacaacatttaaaatgtcattagccatctgataagcatatccctagaaggacgttgacagggttgaatagctcagcaagacctaaccatttctaaaagtgt

SEQ ID NO: 160029 - DNA, 526 bp, Cannabis sativa
  modified_base (78)..(95): a, c, t, g, unknown or other
tcggattataattaaattttattttgacaacaaatcaattaagggtcctatttatacaattttagaaaatacagggtnnnnnnnnnnnnnnnnnnaaatagagggtccaattaataacttttgcaaaacacagagtctaaaatagtatttacccttaaatttttaatagttattaattaatagtttttttttttaaaaaaaaatctaaatcttaaatcgtatttagtgagaattatatataactatcattaatttgtatcaattataactctttggtaattgtgagcaaataggcatcatggctacaatactctgttatgcaacaaagctttattttgatgggtacctatgagacttttaagttatttgatttataattttattgatttgtagttttttttttttttttcgctaaggaccaatttcaaaacatcaatatatatagggcaagattatggtaggacttagcataagtttcttaccggtagggaagtttttttgatcattgattttagatcgtgtggtt

SEQ ID NO: 160030 - DNA, 713 bp, Cannabis sativa
  modified_base (656)..(661): a, c, t, g, unknown or other
gcattgagtaccctcttctatatagttttccttcgatcattgtgtaatgaggcactaaatacaatagtttttgtgccttgtttttgtcatttggaggttttctgctgagtaaataattgataataagagtcatccatgtaggagaaatatctatcatctcgatgttcttagtttcacatatacttggctcactcagcatctctaccggagctaagttcaattcatccaagtcattttacgaggccagttttgctaaggcgtcgacgttggagttttgttctcttggaatttgttcgattttaaagtaattgaatcttcctaagttcttccaaactttctctaaatacttcgccatttttaagcctttggcctcgtattccccgaggacctggttcacgatcagttgtgaatcactatgacagatgagatttttgactttcaatgcctatgctatatttaagtcgacgatcaaggcttcatactcagcctcattgtaggatgcgtcaaattggaatctcagagcatagtgaaacttaaagccttttggcgagattaatattacccctgcacctgaaccttgttcattggatgcaccatccacgtataacttccaggttttcgcgtcttactgattaggtggaatttcttctggagtnnnnnnttctatcaagaagtcagccaaagcttggcccttgatggatgtttgaggatgg

SEQ ID NO: 160031 - DNA, 749 bp, Cannabis sativa
taccgcttcagctccttgcgggtaattcccccgatgtgaggtcctcccgagatcatagccactctcccgttgggtctaggtggcaggccggggatatcctgggcatctcccgggggaacaactggagccaatactcctgctgcatcccctggtgcttcttgcgagaaagctccagccgcctgacccgggttgagatggggcaaccggttcttgatccactcgtagaggtgtcccaatcggatcatgtttgcaatctcatctttgtgatttttgcattcattggtgttgtgcccaatgtcgttgtggtacttgcatctcttactgggatccctccgggagctgtctttgtacaaaggaggcagtctctggtagtgcgtattttgcctagtagaaaaatatacacgttcctgggagtccgttaactccgtatactgagtatattggggagtataccccctttttgtcgcttatcctccatccgggtgttgcctttggaggaccatttactctttgagccctgggaaggaccggctaaacttgctgtcgaagcggaatgcgagggggcttgtccatttatccctgagggatttccgaaatgtgaagatgcgggggccaacgcctggccttggctatatccgggagttacagaaaactgtatgccgctcatcgggggagctgctgctggcacagtgcctgagagctgggctccgggcacatatcctgccatcccggtgggataatatcctcca

SEQ ID NO: 160032 - DNA, 705 bp, Cannabis sativa
  modified_base (212)..(213): a, c, t, g, unknown or other
ctgcccacttgagtaaccgtctagaggcgtccgacttttgcaatatttggcgtaatggtgtgttagtgtacacccaaacaagatgagcttgaaaatagggccttaactttctcattgttagaatcaggtagtaagaaagtttctctatcaatgggtaccgtccctaggcctcaatgagtcttttacagatgtaatagaccgggtgttgtatnntgttttcttctctgatcagcacagcactcacagcgtgttctgtgacagctaagtatatcccaagttcttctccgtcaagaggtttcgagagtacggggggctttgtgagttgcatttttagctcctgaaaagctttttcacatttcgccaaccattttaattgcttatttccacgcaggatgttgaaaaacggaacacacttgtttgttaactttgaaacaaatctgttgagtgcgaggatccgaccagtcaaactttgcacttccttggttcttgttggcgatttcatatctaggagggcttgaatcttctttggattggcttcaattcctcgggcattaacaataaagcccagaaactttcccaagctgactccaaatgagcgctttgagggatttagtttcatgttgtatttcctgaggactttgaagcattcgtccaagtcatctatgtgcccccaagcctttttgcatttgacgagcatgtcatcca

SEQ ID NO: 160033 - DNA, 557 bp, Cannabis sativa
tgttgtcaattaattgcaggttttagattgatctcttgatgttattgttgctgaaattacaacatagataggttagttttaataggttttataatttatatttatataattacaacatagataggtttttttttaattttttattagctattttaaaaaataataactcacacatttttgttatttttttttttaaaaaaaaaaacccacgatttattttttttaatctttcaatgttagagattatattacaatagaagataaatcaagatatatacaactcaattgtaaaaataatacaaggacaataaaagagattgattaaatatatgttaaatacacatatatatacactatatatatatatcacacatatatatatcaaaggtagaagaagaagatacaacacatgtaatataatatatgtatatatataactagagaataatatatgtatagatatgtatattattattttgattgactaaataaatgttacaagtgtgtcacacattttaatctagtgagggattgttatattatttttaatataataa

SEQ ID NO: 160034 - DNA, 521 bp, Cannabis sativa
  modified_base (152)..(152): a, c, t, g, unknown or other
gcgaaagctgaattctctaagtgtctgtcgttctacgcgggttgcttactgtttcgtcttgagcaagcatatgaggtatcctgtacggcatgtatcttgcgagaagatacgcggagtcgatttcacgtgtcaccatcatgtgatgccacgtnagagtgcaaaaattgggataatatttgcccccaagtctatacaagacttccgaagttgcatgtagacttcatccgagctgtctttgcgtttgaatgggtgacatgtgtcaagcgcgtctgttcgctactcgatgtgaggctgactgggcgtccctttggtttttggctaataaatgctctgatgcaattaatgtttcaaaatccaattttctctcaccacatttgacggctacacttgattgcttttgatttctcatattcgcttttgggaggaatcgaggcgtctgaggttcttttgaaatgattacccattttcgttgtttgcctataaataccagtgagcatttgtgcacaaactcattttcacca

SEQ ID NO: 160035 - DNA, 511 bp, Cannabis sativa
  modified_base (208)..(212): a, c, t, g, unknown or other
attatttatatatgtataaaattcagaaataaattttttaataaaaaagtaactaattgatatcttattcacattaaaagtaactaaatggttgctttttttcaaaacttccaaaaaaacaaaaaattctagaaacgaatttttttagttttttctattttcgataattattttgaatttcggtatatatgctgacgtggcacaacgnnnnntgtgcaaataattttcttaaaggtgtttttgtagataaaatcaattttaagtataatattgaaaaatctccattttattggttaagaaataacatatttaatgacattaaatttaatgtcatatttatttaaactttcaattttttttctatagtttataaacaaccctagttaaaattggagaaagtaaatttagtatgaggaaatcacactatatatctcttttaacttgatgtttttaatttttaccatcttttttaatctattatgtttacctcttttttcaatcattctaccaa

SEQ ID NO: 160036 - DNA, 550 bp, Cannabis sativa
agtatttcccttctggttacaatttatagggatttagacagcttaccatatctctgtcatctgatcccaaagttatagggatttctttggtgactcacgatgcgaaagctgaatttactacgtgttggcatgttgcgcggattgctactactcagctaaaaggacttcgtccaagcgaatgtatgtggtgtcctgttcggcatatttcttgcgagcatgtacctagagttgatccacgtgtcagcatcgtgtgatgccacatcaaagtgcaaaatttgcgataacatttgccccccaagtctgtacgggacatccgaagttgcgtttagacttcatccgagcagtctttacgtttggatgagtgacacgtgttaggtgcatctgttcgcgattcgatgtgaggctgactaggcatctctttagttttcggccaataaatgctctaacgcaattaatgcttcgaaatccgattttctctcaccacgtttgacggttattgtaacgccctaaataattaggcacgctttccaataaacttatgaaaccctaa

SEQ ID NO: 160037 - DNA, 519 bp, Cannabis sativa
  modified_base (61)..(64): a, c, t, g, unknown or other
ccaaccggcccatttattgagcccattctactaagatgaaactacaactatctcatgctcnnnnaaataggcccaacgttgtttttttttttttaacaaagttattaacttattattattacaagggaattattaatgccttttaagcatggatcagtctagaggaaattataaattttatcaatttttaatatttttaggttattttataggaaaagaataaccaggtatccttaaagtaacaagatggataaccatgcactttatgctattttttttttcatatttttaactttattttttaaaaaaaaatcccataaaataactttttttgagaaaaaaaaaccatatttttgcaaacctatattttaaaaactataaaaatgaaaattctccaagaatagacctcttattagatatgttcatataatccgcaaatcatttaagaccggaacaaatgaattcggtgtgaatgatttgacggtagcggttcaaaccaaatcaatccgtataattatt

SEQ ID NO: 160038 - DNA, 778 bp, Cannabis sativa
  modified_base (605)..(613): a, c, t, g, unknown or other
gttacaattctcttacacccgttatactaccactcactacaagaaatatcacttttactgcagcacagcattttgcaaactgtgctggtaaaaatgtcaatgttttaccagcgcacatttgtaattgttaaaatctaatttttacccgctcatttacgcgatggaaaaaaagttatttttgccaacgctttttattttgtgctgacaaaagttctaataccaacgttgatttgccaaccctttttgcatgccaacacatcagaattaaatttcattttaccaacgcaatattaccaaatttttgccgacacaaaatttgctggcaaaagtgacatttcttttagtgacttccgttaactcataaatatggacacgtggagggtccagatgcattacatttatttttattattttaaacttaatattcttaatataataaactaaatgctacttgtttaaaaaaaaaaagaatcagttctcataataattttcacatatactacactcgttcactcagttatggtaatttaattttgtatcattcatatttttttttttgaaacaagtagcatttagtttttaatattaagaatattaaattttannnnnnnnnaaataaatgtaatgcatctgggccatccacgtgtctatatatatttatgagttaacggaagcggtagtaacaaatgtaagagaattgtaacattatgtatttttgcctctaaaaataaagataagatatttaaatgtataaaatttgaaacattatgtatttatg

SEQ ID NO: 160039 - DNA, 537 bp, Cannabis sativa
ggaaatgtcagtggatagtcggcgcgtcgcctcctcagcatatgcattgctgcatctatatgctgcatataaagggaaatgtcagttagacaacaaaatatattgattgcacatcaagttgtaaagtgaagtaatattataaaatactttacttacgtcatctgtaagccattcatgtggtgtcagcagcttctaaaagaatgatggaccgtaatcaccacttctcaaatcccgaagtcggtggttcggaatgagtccacaacaccactttcggaaagtatctaacaattgctgatccggtggcgctaggggatcaaacgtcgaagaaggcctctgtctcttctttgtctccgtgtagtcacggaaccatacaggaggatttctcttcctcttccgactcttaaccactgcaggttgtgcttctatcgatagaatatcaccctgggactcgctgtcatgtacatggataacacctgtatcgatgggagttgctggagctccctcataaggattgtactcgtcagggaagacctcctc

SEQ ID NO: 160040 - DNA, 507 bp, Cannabis sativa
tttttttaattttttttcagccgatagaacaaccccaattcatataatgtaaaaataagagatttttttaattagatagaaaaactaagtatgaaaactcaaaattttaaaatattactcatgaatgggtaatacccattaagagtgcacccatatacatatattgtgaatttacttggcagattagcaataggattgagatgtaaaatgattttaaatttagaaattaagttagtaaatgtctctttttaaaaaaattaaaaaaatgaccaaatataataaattagctaataaaaatacatttactacatattatttttttaaaaaatatatataataattaaattaagctatataattttttttattattgtatattattatattataacaaagacgaataaatatattaaatgatcattaaatatatacaataatatttgatatatcatagtactaaaaattaatgtaccgtagtaataaaattatataccacaaaaaattata

SEQ ID NO: 160041 - DNA, 577 bp, Cannabis sativa
cggtttatgcggtttgaattatcactaaataattaaactatcacaaatacaataaaacttgaacaacacttatctaaaatgaaaataaataagaaaaaaaaattaagtttcaacaatataataattaaagggctttaagttggacattcacatattagacttaaataaatgtaaaaattaatatttttataatgtgcggtgcagtttgaaccgtatattaacaattgaaaatcgcaaaccgtaccgtaccacactgtgcagtttatgaaaaattcaaactgcgatcgcaccataaaaaatttcaaactgtttttttttttatagtgcaagcagtttgataaacactcctataatatatctcatataaattaacagtcatttacaataatagaaaaaataggataaggaattttctcctatccaagaaacattttcatccgcctttagagcgcactttgccaaaccatgggcagttttattaacttgcctacgagcatgagtaacagtaacttcagagaaagaaggtaaaagacaacgtacatcgtcaattagatcattaaaacaagataagtcccta

SEQ ID NO: 160042 - DNA, 587 bp, Cannabis sativa
tccactgaacccaaccaatactatggacttggggatgatggtggcctcgtcgatccccatctccctgagagcattcaaaaataagatgttagcagagctacttttatcgatcagtatatgtttagtaaaataattcgaaataaaaaaaagaaatgactaaagtatcatggtcaggattaagcaaatctgaagcattgtcgtccacgaaactaatggtctaggcgctgtaagctgttggttgtttctttggtctaccctctgtcctgactatttcgcgtgcatgcctcttagcggctaagtatgttacgtcgctgacctttgaccctctggagatgacattacatatccaggtgtgttgaggtggctcttgttgtgttgacggcctcttgtctgctttcgtcacggttttctttgccttgtctgataaaaaatctcgcaattgatctttgcgcaagagtccagctacttcataccttaatgctatgcactttggagtggtatgtttgtggtcattatgaaattcacaccactttgtcgtgtcgtgcattgctgctagttttttaatcttttcaggccacttgacttgg

SEQ ID NO: 160043 - DNA, 574 bp, Cannabis sativa
ttttaaataccaaaacaaataaaatgtcaatctcctgaaacggtgtactacatatatttggtaaaatgtaatacatagtggataggtaaaggggcaagaatatataaatgtatatgatatatatattaataattaattaatgagaattgctaaaaggtaataaggtattattggtatctagcatcatcttccgtattatatatattatttttagtgtaattattaagtaacagtctcatataactttaaaaaaaaaatttaaagaatatcactaactaattgtaacacaactataaaaaatatatccaataacaatgtttacatgtacacttgttgaaatagaaggaacacgtatacaatggccatatatagtgtacgagaagcgcaaattaagctcttctatgtacccatcaaatcaaatcaaatccatacatgcagggccgaccctgagagtaggcgagttaggcgtgcgtctcgggcccctaaccgctcagggctccgaaattgtgaaaagaaaaatatatattaatatatagataaaatattaaataaaaaaaatataacaaatattatt

SEQ ID NO: 160044 - DNA, 505 bp, Cannabis sativa
  modified_base (302)..(313): a, c, t, g, unknown or other
  modified_base (476)..(478): a, c, t, g, unknown or other
taagcttttgaactaaaaatttcataactcaaatcaacctaactatcatgcatcacaagcagcttaattcaacccaaataaacatgtataaatctctgcacacaacaacaaaatcacaaccacaacaacaacctaaactaagcatccattacaccatttttcatcaaaaatcttcaagaaaacttaaaaggaagctagagggaacataccaacaacaagaggtcacaaaaccttgccaaaagagcttgaaatctaaggaaaaaatggcaagaatccttgctgcacaaggaggccgaaagagnnnnnnnnnnnnagagagttttcctttgaaaattttctaatttttttctaagtttgggaaaagaaaataaatgccacataacccatttaattcagccaatgttaacatcaaataacacatattttccaataattaagtccactaaaggagaaaataacaatggggcaaaatgacnnntttgccccttcacactaaaataacata

SEQ ID NO: 160045 - DNA, 531 bp, Cannabis sativa
  modified_base (35)..(36): a, c, t, g, unknown or other
  modified_base (502)..(502): a, c, t, g, unknown or other
tggcacctgcccctgttgtcctggccgaaccagtnnttgtagtgaatcagatggaacctctgtatgaaatgttctgtaaacaagaaccttcaatttttctgggaggtccggatgtgatgaaagccgagcaatggctaacagtgattactagaatattgaatttcatgggtgtcacgggaaatgacagagtggtctgtgccatttttcaatttcaagaggatgcgttagtttggtgggacatggtgtccatggtacatgatattactacaatgacctgggagaaattctaggagttattcaatgccaagtattataatgaggcagtcagaagtgccaaaagaaaagagttcactcacttgacccagaaggaaaacatgagtgttacagagtatacgacccaatttgatcggttggcgaggttggctttggggatagtgccaaacgatttcagtaaaaaggagaaatatctggatggattaaatgcgaagattagacatgactnatgattactacagacgacaaaaccaccta

SEQ ID NO: 160046 - DNA, 544 bp, Cannabis sativa
acccgccggcgacgctcctggacttgactcccctgtacggttatggcaaaagcttatggacttctcacccctcgactcggatcgaatcgctgtagggtttctctcccctccgtattacgtggtcgatatatcttattaatttcatgaaaatattaattttttttaatttattttaaactttaagcttattaaatgtatatttttcaccattaatcacaatccccaactagcttattgctagtccttagaaattcaagcgaagaaaaataataaacaagttgattaaacaagtcaaaccaagcaaaactatccaagcattttcaaaatattggtagagagtcaaaaatttctatcaaagttatttaagttgtaattctagagttgtgtgtgtgcatcaaacttttatttattttttttaagcattaacacaaatagtatcgaaaaatcttaaaagtgtaaaggtctcaactccgatttcctcacgggtatttaaagtacgtatttgcattgggagggtgacactcttttggagttggaaatgtaa

SEQ ID NO: 160047 - DNA, 575 bp, Cannabis sativa
tccttgactaattgattaaattagtttattcatttaattagttataattttttaaaaaataaacacaaaagtgtatatggatttctataattataagatcacgcgattgcacaataaacttcatatggtatttatcattttaattattgtaaaacagtaagacaaataaatatttccatataagaagtaatcagtcatataaatcgtgatcttcttttttatcattacaatttaagacatatatttcacatccacataatttattaaaattaattctcttattaaatattttatttagaccaattttatcattaatattttggggaaaaaacaggaaaatacaaaaaaggagaaaagattacaaaattactatgggccggcccattcaacatttatacagcccgaaaccaaaaaattacaaaaataccacctggtctataccttaagtcgcacggaatcaacgaagaagacgaacataccttcatcgttcaaatcaacaacacaaccataatgaaaccaaaacgagagtaatgcaaccatcaattccggcaaaaattaactggaaaagaagaact

SEQ ID NO: 160048 - DNA, 513 bp, Cannabis sativa
gttcctacaggcctcgctgaaccggaattccgattcactacatgaatttttcaaaatttcataactcgaccaattcaacccccaaccaattcaaacttgccagacctgctaattagagcccaaagatcaattctaaagcaacaaaacaaagcttcatgctcaaatacaaaaatcaccattgatgagtcaagcttgagtttaaaaactcaaagcttgctcatccaactaattggccataaaaacctacttaaatcacttcaaataactataatataactacaacaagcatcctcaaacacaaacaacatccacagtagctaaaaaccatttcaccattgaaattcaagatttgagttcaaacaccaaaacttacttaaatcaaaccaacaaccactataaccagattaaatcaacacaatcaaacatgctttaacctctaaacacaacaacaattaaccacagaaaccacagcaagcataaactcaaagcatgcaaaatttctttttcttaaaa

SEQ ID NO: 160049 - DNA, 513 bp, Cannabis sativa
ctttaccatatacccattgagtacgttattattctaagatatttgttagttgggtcatgaaagggatgagaggagtgtaattttggttgagtggtaattgggtgagtgtttttattgtgtcattttattattctccccattggggataatgttgaattttaagttgggggagagttaacatattttgtgtatattgccattattatattagcattgttagataaaaaaaaaaaagagagaaaaaaaaggaaaaagactgtttaaaattaagtttggggtgtgccaccccttgtaaaaaaaagagcaggattttcttttagaaacttgaagtctcaggtgttatagcattgcttcagcattctggaggcagagacacagaaaaaaaatgttgtgctaaggcattgctataacacctgggagcacattattttggaaaattttggggcaataaataatggcaatattaatactcaaattttttgtgggatattctttgaggaagtaagtgtgagg

SEQ ID NO: 160050 - DNA, 508 bp, Cannabis sativa
caaatttagaacaggggcagccctcgactaagatgggtcaggcctatgcctagaacccattttgcctagggcgcccaaaaaaatcttttgaaaatacacacaatttttttttactaatttttgagaatttcatatatttcttcaatgagggcccaatgattttcttattcttgaggtctatagttacttagggtcacccttggtgtaaaaagatagtacacaaattttattagtgtttgtgctatatgaatttttctgtgtcttcactttgtgtgatggacctatatttatgagtttttcatatcaattataataaatgacaataaataaagaatattttcttagtgaaagatcataaaaaataatctggaggccgggaatgaataccggatccttaaggattaggagctgatttaccggatctggatcgtatatgctctcgtcagtcaccgactagagtttatttcatgagcctagttgaagttgtgattacttctcctaaattgat

SEQ ID NO: 160051 - DNA, 635 bp, Cannabis sativa
tgccttcattgtgctactggtgggcattctccctatagtgagggggagacagatgacacctagtgatgcaatactttggcctgaaaaaaccatagattaattgggcacacggaacaaggtctttgatccggaggcctatcttctcgtatgttgttttaaagagaatgctcgatgaggccctgtcatagatcatggaccgtgttatagtcatgttttctatttacacttctacaaccagtgaattgttgtgggggtagtgggcgtgtgcagaatcagcatcgttgaacaatacatttatgtcatttgggcatggttgtttagaagttcattaatccacgagtaataccttctagctctgcttatattagagcgtccgagcatacctttcttgtatccccaatgatatggggtcctcttactattacgctcagatgcccatccataggtggtggcattaggcaattctggccgttgtctccttgctgagggggtctctgattttgattggtcttcacgtaccgattccattggaaattatttcttcgaatgaggaacttaatttcctccttcaagttgtcacatacatttgtgacgtggccaaaatccaggtgaaaatgacaaaacttggtggtatc

SEQ ID NO: 160052 - DNA, 672 bp, Cannabis sativa
tgggagccactgctcagccttcatcacatcaggacctcccagaaacacttgaggtgcttgcttgcgaaacctttcatataacggcttcatacgcttaccagcaacaggttgttctgttggcaccgctggagctacaacggcctgagcttgctgagcaggcacatcaggaagaccctactgccttaatctctaaatttcttcatcttgctggcagattcgatcttacattttcgcaaacctctgctcccaatccggaggagcttgtggtgtatttacaggacgaccaccctgagctctgccacatccacgaccgcgacctcggggattctggggattttgatttcccagagtaccttctgtctcaaccatattaccctgacttcttgtatttcgttgggcatccattttataggacttagcctatgaacccataagctaggcaagttagacagcgatcatgaagcttaataccgctcttatggacttaaaggcaacacacttaaaataaataattataatctaatattcttcctaacatgctttaataatcacataaaataatgagctggtacaggcttactgaaccgtgaaccgagctttctcagatgaagactatacatgtcttggcaagcttcggtaaacaaacctggcgactctaatacaaaattgtaa

SEQ ID NO: 160053 - DNA, 771 bp, Cannabis sativa
tgaatgagaagagaaatagtgggaagggttatgtgataccaattcataaaagtcttctctcatgttataaaatgtaatttataatgttgcaaatcagagctgttgtccaagcttctttagtcaagaggccttctaaactttttttttttaaatttttttgttaaaaaaataaatttcttttaacattagtccataaggtctcaaaaggtttatttttaaaagaattatttacaccatatattaaaatttctaatacttttacttttttactatggacaaattttttttcaaaaatattatgtaaatttttatgttgtgtaccatgttaagtttttattgttattttttagttgttctactgttatttttagttgtcatgttttgtgttccactcttgttttataaaaaatacatgatttttgaaaaaaattctatgtaacagtattttttataaaaattaactcaaatttcagtatttttgtaagttttcttttttaaaattttgttctaagcccataaaagtttgagatggccctactgcaaagctactttggaagacacaaataatctcaaaggagagtgataaaataatgcaaagttctgctgaagggtggagcagggctactgtgccaaacccttagttgaagaggctcccaattttttttgtatatatatagaaaagcttaaattgttggtttatttttaagagtaatttgcggcaaaacccccttaactatcaatttacttgcaaaaaaccatccaacctcatat

SEQ ID NO: 160054 - DNA, 530 bp, Cannabis sativa
taatttttttacaaattttctattatggttattttgaattttgattatttattattttttattataagattagatatttatatatttcatttatttatttaataaaatataaaataatcttattttgacattaaaaaaataaaaaactttgaaaataatctagatattttttaaatttctaaccataaatataagctttcaaaaaaaaaaatttatatatttttattactttaaattataagattatataaatgctatttattagcattttatcttactagatattttatattttgtataaataacataatttttgatagttagttgaatttttttttttttttgaatagatatttagggttgtaacaaccctaaattttcaaatttttaagggattgttattttttaaaaaaaaaatataaaatgataatatcctaactataaatatctaattttcaaattttttattagttcaatttattaaattataaggttagaaatatcttaatttttaaattaagatattacat

SEQ ID NO: 160055 - DNA, 579 bp, Cannabis sativa
  modified_base (554)..(554): a, c, t, g, unknown or other
tgtattcaagctgattttgttagtcggtagtaggttttatccaaggttgagttttgaactcaaaactttggatttcaatggtgaaatgttaaattagtttctgtgtatattgtttgtgtttggggatgttttctgcagttatattatggttgtttgagtagattaaattaggttttgatgcatgttagggagatttagccaagcttgagttttgaactgaaagcttggagctttaatggtaatttttgattctgtgcatgcttggttgttttattgctttggaattgttatttggggtatttagagcaggtctggaaagtttgatatggtttggggttgatttggttgagaaatgaatttttttaagtttcctgcactgaaccggaattccggttcagaatggcctgtaggaaccagaattccggttggtgttctgggtttctcccagaaccggaattccggttgtagaaccggtctaccggttgggataatttcaggaacccgagttcttcccatttttgtgttgtttacggtattgccatgctttttatcgntagggaaacttttagtttctagttt

SEQ ID NO: 160056 - DNA, 529 bp, Cannabis sativa
  modified_base (28)..(32): a, c, t, g, unknown or other
gaaatacatgacctataccgtaggtatnnnnngagctaggtggatataatcttttatcccctcttgattgatgtgattcctcataaaatagctgttactagccttattgattatagcgtaatagtatatgtattatttttataaaataccgtaaaaatataaaaatatactttaaatgtaaaaatgtaaatttttttaaaaaatattgcttgttaaaattttaagtaagatttgctttgtatcaaaattctcactatctgcactctgcactgcagtagtcatacctcgttttgttttggttcttttctaaagaaaataatggtaattattagtgataatctccaaatatcgttgtaaaataagatcgaaatggtatcttctggattttttcttggctgctttcagactgtattttcttcaacaaatatttgaacaaattattagaatctggggataagatgaatgaggttccatctcaaaatcaattggctatgggaggagtagcccgttcctcttatatattctatta

SEQ ID NO: 160057 - DNA, 589 bp, Cannabis sativa
gggggcttcgaagcttggagccagacccatttgatgtccggggctatgctccctcttcaggactattttgtaaacttcttagtttttgttggccttgcgcctaccaactaatgcctcaagcttaccgcctgctttcaggcttgtttattttgtatgccgcctagagctggtgttcgccaagtccagctgaaattttgtacttttatgaacttgtatctgtccccaagaagggggacaaatttaaagacggattttatggccttcgggcccaccctttgaacgagggtctagtccctttcaaccatcaaaaacacgtgaaggagtatcgccaccgcttcttattttcctccggtttctaggccatggatcgccccgagcttctcacggagtgggttagggtccctcctttcatgcagactgcacctacccgagtattccttcagcgggccaagactttctccacctatgacaagaaggccctaaacgtcagggacttggtgacgacggagaactgtcggaaggccaagctgatatccgagaatcagttggtggatgacttcaatctttccaaggtcatctgcccgaatgt

SEQ ID NO: 160058 - DNA, 798 bp, Cannabis sativa
  modified_base (490)..(490): a, c, t, g, unknown or other
  modified_base (549)..(552): a, c, t, g, unknown or other
aatatttggttttgggttacacacatgcgcacgcggggatgtggtgccgctcggacagcacacgtcttcagacaagtgcctgactgaggattctcagacaaggccctgtctgaagggctgctcacgacgagctccttcggctaacagaggctgcacgcagccgcccactcgcccattccccttcatccgcgcgcgcaggggaatgcattgcataacccggtgcccaattttatttttgtcatatctttgattcaaaaattatttttcattgaaacaaaatttaaattttggtagaattttgtgtagaatctaatttttcaattaaaaatttaattatctgaataaaattaatttttttattaaatttttattaattaaaattagttttagatattagtagcctttgaatttgaaaatttgatttttccacaaactagccttatggttaattttaaaattattgattatttttgtttattttatttatttnaattataagatcagatattacttactttattattaaatttaaaatgatcttattttgannnnaaaatattaataaaatttagaaatagtctagttaaagtttcaaaatttactattgagtcgagtgaagtaggttgtcactgtgtttgatccttgagtaaggctctgcatcgtcttcttagcttcgaaaatccttggagcatttttttcattgaatgtttcatgtaactcttcccaaatcttagcagcattatcatgatacattatattgtcaactatctcccctgaagtagcatgaagaatccacga

SEQ ID NO: 160059 - DNA, 528 bp, Cannabis sativa
ttaatttaattatatatatttaaaaataaacattatatctatatataatcacgaatatatatatatatataaatcttaatttaacttacaatttattataactacactctcctaactacaaattaaaaatattgtatctatcactatcattattttttttaaaaatatatatttaggcataatatataaaatatattttgaaagtaattaattctttaattaaattcaaattttgtcaaaatattttctaatataatccttatacatagagagattaatataaaatacatataacatagaaattcattcttttattgtaaatataaaatacgtatatatataattacatctaaagagcacaccaatgtaaccgcaatagctaacaaaaaaaaaattctgagagatcaaaatttcaaacctcttatttcaaaaattaaaaaataaaaatacattacttaattaaaaaaattaatatacgtatattgcacttaacatcacttaattaaatgtaatgaccgctttaataat

SEQ ID NO: 160060 - DNA, 641 bp, Cannabis sativa
atgtgtatcacttttattctacttggattttggaatgttggcttgacatggaatagaacttgagtgacatactctcttgaagcgaaatcctttcgtggttgtttggaaaatgatttaggcatattttctttggatcgattgagcctttcgagcttacctgaaaagttttatccttagtttacccgaagttgagccttaacctgtttcaaaattctcgccacttaactaagcttaatttgttatctttaactactttcattctcaacgtaccttattatgccagaagcttttaatcaagtttggggggaatggagtgttgtaagtgggaaatattttgaaagtaagagattgaaaaaaaaaatatatttgttatgtgatgtgccttttctgtaaaaagaaagaagaaaggaagaaaaataaagaaacaaaagaaaaaaataaatgtgataatttcttcttgagaaacaaatgtgaacaatgaggtaggcacataaacgaggaaaaatgtaatctcttactagtttctttgggatgaaagaatgaattattgcgggtctttgtttggaataatgtagcctaaatgacttttcatctacccgttttacctaagccatgatattgtaaccgaaaaagaccttttg

SEQ ID NO: 160061 - DNA, 510 bp, Cannabis sativa
gattcaataaataatctagtttatgatagttagtattatcagtccatggtcctcgaatctccaccttgaaacactgtcaagggggtatggataaaatttgtataatgatgttcagaaaaatccattttgatttgtcaaaattgtaattatttattttgtaataaataatttattttcaaatttattaattaaataaattaggaaaaagacaaagcattttctaaacaaagacactaccactatctgcttaagacaatggtgacaccacattcactgtgttgagacacaatgataggcgtctataagatattgtgggtaacactggatttattttggattaattaattaattaattcaaaagataaatatttatttaaatttgaacttgaaaggtagttatagatatgggtgttcaatggatcacatccaatatttttaggcctatccagatctaatccaattatatattagatgttagattttaccatccgatctaattaatttcagtca

SEQ ID NO: 160062 - DNA, 632 bp, Cannabis sativa
  modified_base (53)..(58): a, c, t, g, unknown or other
cattctctgtaataagtactctcaaatacaaaagactcgtggactaaggctcnnnnnngccccaaccacgtaaaaatctcatgcattaaacttcttacagctttttcatatattattaacttggttgccgaaaacttcggtcaacagcaaccctatatcttttgtaattttttaaaaacagatgcaaaagatcccctataaaagtctttgtcttcagttaatattagcaaatacttaagatgaaggtttcattattttttttaactatatatagaagttttgaattttttttaacatgaagataaaaatcttgaagtttcactttaaagacttgagttgtttaatttcataacttaaaagatgttttcaattttaaaaaacagaaaataatttttaaaaatcaaaaaggtgcatttggccaatttttttaaaaatagttttttgaaaactgaagtacaaaaaattagaaaatagaaaacaacaaacaaaaaacatcaaaatattgttctctattttgaaaaacaattttttttttttgtttaacatattcttttttccgtttacgttcatatatccatatctggacccgaactcgctcccagaccccaacccggaccctaaccacctcgaac

SEQ ID NO: 160063 - DNA, 706 bp, Cannabis sativa
ctgacaagcttggttttactttggttgatttaagtaagaggggaagcaagaatgatccattcatcatggctagccaagcagtacaagtttctcacattgctaatccagctaatgataaatggtatgttgttttatcgacaccagagaggaggttcttagagaatgaagaggatgaggagaatgttgatttatgttatgatgacttcattgttgggcaaccaattcatgaacaagttgtggaaattgaccttaatcttgaggaagacgatgctgagtacattagaaacgatatcaatgagggagtatgggtcaattgtgattcaggcaaacataaacgaaaaaagaaaagaaaacgtgtctaattggtaacttacttgtgataatgtttgtttatgtagttaatatttgttatagattacttgtgatacttttttatgtaagtagttacactgttgtagctaactttatattttgtttgtcaatggtgtatctatggctaactcaggttcaggctcagattcagattcagcagtagagtgtcctagggagatacctaaaaaagaagttactcagatgaataaagtatccaagctgatggaccaagaaaaaagacttcctctccaagtcaatgataaaggagagtatatatgcaaatactatgccaagctagtatcaactttaagagttagatgccgtcagacgatag

SEQ ID NO: 160064 - DNA, 530 bp, Cannabis sativa
ctgatgcaataatatttgatgcagcccaactcttttgttgccaaacaaaattattgcgtgcacgccaaatagcccaactcaccacagctgcttcctccatctcactaacacgtctcctcccaaataatagcagcagccaactactaaatgttgcagagccacccccaacatccaccgagttgcgattccaggcagcagtagcaaactcacactccaccaaggcgtgatgcacaatttctgcaacaacattgacagaggacaagcagcattaacaaggacatgacgttttttaagctgaaaacacgttggaaggacacccgatgcagctctcaataagaagttactaaccttgtgaggaacatttaacgaccataaagtcctccagaaacctgtattgccatccacactccaagctccttttgtttcatgcaagaacttgtaggcacttttaactgaatactggccacaagactcaaacttccaactccatccatctctaacagtcaagtcactaagttgaatgctaaata

SEQ ID NO: 160065 - DNA, 536 bp, Cannabis sativa
  modified_base (182)..(201): a, c, t, g, unknown or other
tgatttaccttcaagaaatttggacttaaaacgatatatgtgtgatttggatgtgattcattttgatctatgtgttttttgatgattgtttgatgttttgcaaatttttttctggaattatatttgttggatagttttaaaaaaattaagcaattcacatttttttacagaactcaatttcnnnnnnnnnnnnnnnnnnnntgattttttgaagtttgaaaaaaagataggggtggtgtcacccatgtgcgcgcgcggatccgagtgttcactcggtcacacgcgcctcggacaaggttctgtccgagttttcttggtctgaagggccattttttctgaaaccagggcattgcgcgcacgggacaggctgcatgcagcctccttggccgaggtttctcggtcgtgcactttcccctgcgcgcgcggatggtatgcagtgcataccatccgcaacaaacccattttttttcgtttttcttcattttttcatgatttttcatggaattaatttcaaattttttgtgtaattttgtatt

SEQ ID NO: 160066 - DNA, 728 bp, Cannabis sativa
tttttgaggtgatcatgactgtgatcaactgcaaatatcgcatatttaacccacttagtgaagtaatcaactgcaaatatcgcatatttaactcctccttttctcgtggggagggatcctactaaatcgatatcccaaactgcaaaaggccatgggatactcatgactgtgattccagttggcggtgcacgtggaacttttgcatatctctggcacttctcacacttctagacataccctatgcaatccttcttcactgtgggccaaaaatacccttggcaaaggattttctttgataaactgggtctggatgtgtgatctctgcaaaagctaccatgaatctcatggattacagtgctaatttctattccagcaatgcacctcaaatatggcattgacagtccccggtgctaaagcttcccatccatgatcacataatagagaacctggtactgaaccttccaagaggaagctttgtctgtgagaagctctcccgagctcaaaaagttgtaaatgggtgccatccaagaatgagagttgctgactatggcatttactgttacgaattttgtaaataatatgcaagtgcacgaaatcaagtagtaagctgaaacaggtgaggtcgaaccacagagaattggactgagagccactagactaaatctatgtttctatttggcaaatcaatatttttcaagttcaataatcgaataaaaattcaagaagct

SEQ ID NO: 160067 - DNA, 511 bp, Cannabis sativa
atctggatgtgttggcatcaggggccctagtattagggactgggaccagtaacttaggccgggaaggtgttcgttctttacccgtttccagtcgaagggtcctcccagcagcagcctgagacttgatataggccaactcctgtttcctcatgaaaagatacttctggtactggtcctctgtcgaggctatgatgtctgcccggagcacctttttagcattcggagtacgaatgtttgggcagaggaccttggagaggttgaagtcgtccacggattagatccccgagatgagtttggccttccggtagttctccacggtgaccaagtcccccacgttaagaccatttctatcataagtggagaaaaccttggcatgttggaagaaaagctgggtaggagcagtatgatgcagaggggggatcctgacccactccatgagaaggtctgggcgatccacggtttggaagccggaagagaagaagaagcggtggcggtactccttaacattctt

SEQ ID NO: 160068 - DNA, 518 bp, Cannabis sativa
atatcttcaatacttatttaaacggtaaaaataaatcaaagtttatacttattttataattctagctataagtaaaagtaaaaacttagccaaacaagatctaaatgaagaagtattatactcttctctacatgtagctatgcttttattttattttatttttatttttaatataaagaaattgatggagtaggtattcaaacccttctttatattatttttattttttgataagtacaagccatttagagatcctgtttgggagtgctctaataagttgtatatattataaaggacgcaattttatactttaaaaatttcaagaaataaaattactgttaattatttaaaattttatttatgctaatgagtaaggaataatatttttttttagctaaagcgaaatataataatgttaggtggtttttggttgggaagaatgaaaatataggaatgtgaatgaaaatgaaaatgaaatggaataaaatttaaaatttataaaaaaattgataaaaaaa

SEQ ID NO: 160069 - DNA, 681 bp, Cannabis sativa
  modified_base (205)..(207): a, c, t, g, unknown or other
ttgccgcaaatttcccttttaattataacttgctttctgagttattgtgtgttatttatttttactcgttttgttgtggaaccagttctattttattttacgtctctatgtttttatttttaatatgattccctcttatttttaaattataatcggtttctgagttattatatgttatttgtttttagtcattttgttgtggaannnagtctattttaatttatgtcatcttgttttttatttaatcacttcaaaaatttattcttggagtatttattttagaaactagtttttaatttagttttttctggaactgattttttatttagttaattcaaggaaccaattttttattgatttgttttatttaactggttttgtgtgtgagtttttatcttagttgctttacgaaactagttgttttttttatcaaatttttaactagttgataaatataaccaatttttttatattatatttttaattattatgtgttatttattttgttatggagctggttattttcatatttatacctcagtattttttcaaattgatccttaccttttaaaaaaaattaaaatcggttttatgaggtattatatgttaagaggttttttattgtagaactaagtttgtttttaatttatgtttcagtgttttaggaactgatttcccctt

SEQ ID NO: 160070 - DNA, 636 bp, Cannabis sativa
cgtatggagcctttatatgagagactcaggaagcaagcacctccagtgttctgggaggtcctgatgtactgaaggcagaacagtggttgactgttattgaaaggatattgaacttcatgggtgtggttggaaatgatagagtggcatgtgccacgtttcagtttcaggaagatgccttgatatggtgggaaataatatcccttactaaggatgttgctagaatgacctgggaagaattccgggatttgtttaatgctaaatattataatgaggcggtccgcactgcaaagcagaaagaatttgttgagttggtacagggcgagggtatgtcagtgactgagtataccaccaagttttattgcttggctaagttagcctctggaatcgtaccaacagatttcagtaagaaggagaagtatttggcaggactgaatgccaagattaggcatgaactggttattacaacaaatgatactgcaacctatgcagaaatggttgataaggctcttcgagctgaaggagcagtaaaatttttgcatgaaacccgcgagactcctagtgttggtggaaccactactctccctatttctggtcctggaaaagagagtggtgattccacttttgagcaaaagaaaa

SEQ ID NO: 160071 - DNA, 593 bp, Cannabis sativa
  modified_base (308)..(309): a, c, t, g, unknown or other
aagaaggaacaagactttcatacgttagtcaacgaccttcagacatatgaaaattttattggaggtcccttgaaaagagggagtaaacctcagaattcttgaaatggtaataggacgaataatccagagccacacgttgcctctacttccaaatccaagcataaaaagaagtggaaaaatgctaagaagcgagctcaagctgcgaaagcagctaagaacaaaaaggctgtagcttctggtgatacaccgaaaggaaaatgtttctactgcaatgaaaaaggcgattggaaaccccaatgtcctaagcnncttgcaaagaaacaaggtaattctttctataaactgatgtgttatagtgaattattatccatttggattattaattctggactactaacattgtttatttttcttcttatagttcaagcttcttaaactcggatgttgtcttagcgagtgggatctgaaagctggattatggatggagttcatcaagataaagaagaagctcatttatttacttttgaattaattgttaaaataatttggattccaagtttgagattttattccctgctctcataatattgcaa

SEQ ID NO: 160072 - DNA, 639 bp, Cannabis sativa
  modified_base (191)..(200): a, c, t, g, unknown or other
  modified_base (614)..(614): a, c, t, g, unknown or other
ccaatattttattcttttttaattgctaataattcaaccctaaccctattgaagatagtataaaaggaaggttatggtgtcttcatccaaactaatgcctccaaagctaaaaacctagttggtcttcaattgaaacctatagcctttcttcactaaataatttcagcagtgatagagtgagtgcccacacnnnnnnnnnnggtcctcaatcatagtatgtaagctaaaaaattaaaaaagtaagagaattaagcaaagaagaaataaagctatttaaagtgactttagaatgtcatgtcattgcctcatatctcttatttttatatatatatatagattagtaaatttatatttgttaaaataaaataaaataaaaaaattggaattttttcgttgtaaacgatttgtgattcataatagcagttgaattctgtaaaaaaacaaaatcaaattctttaaacatattaattatttattttgtaaactaattaattaatatataaaaggataaaagatagttgctaaagatatttataactatactagaagaaaattacgtgcaagacacgtatatttagttttatgttatgtgttctataatttaattaagaaanattcaataaataatcatataattta

SEQ ID NO: 160073 - DNA, 515 bp, Cannabis sativa
aaaaggaaaggaaagttaacggcgttaaaaggaaagtttaaaaaaatggtggacgattctttttggggttaaatttaacagaatattcttttatttgtaaaacatattctcttaaacatggaattgccgttagatagacacttttaatatataaagatacattttggatactataataattaagtaacagtatcataaatagtagggtatgctcttaatgggtattacccatgtataggtattttatttttgaccattagatcaaatctaacggttgatatttataatcattaatgaatattaaaaaattaatatttcctattttgccacttctttctttgattttgttattatctatattcctaaaataaataaaactattaatagaaataaaaaatttatatatggaattgctgtttaaaaagtaaaatacactaaaaaaactaacaaattattttttttaataaaaattattttaaagattaaaaaaaaagtgtatatttatcttcttataa

SEQ ID NO: 160074 - DNA, 873 bp, Cannabis sativa
  modified_base (164)..(169): a, c, t, g, unknown or other
aggaactgccaggatgtacatcgtcctgcccctcaatctcctggacctcagcgtccccttcatgatcctcttccatctcgacggctggatcctgttcggcgctgagcaaagtggcgtgccgagccagttgagggttagacgcgtagttttctttgtacgagccnnnnnnctatggctgggtacagggtttgaagaatgcccttcgctagaggaaggtgaactagaacaaagacgagggtgatcctcgtgcagaagttgaagcaggtcctggtcgattcgatgtccgttttcccaagactcacctgagttcatctacaaaagacaacgcagaagatgagtgtttggtcggaatatcgagcgataaacaagcaaatatgccgaccatgagtactcaacagattaaagaacgattatgtttgaagaaaagtcagaactcaagaagtcaaaattttctcgagatagagcaaaaaagttcatgaagcttagaataagcaagataaaagacagacgttacacagtttagaagcacattttatgactataaaaacacacgaagacatgataaagaagaatcacagaggtttctgggcctagggtttcctaaacatttttctacagcaaagtagaggatgcaattgacatataaacatgcaaagataagcataaaggaaaccagagacttactcgaagatcagatgtctgggtgcgagcaacgtcaatccaacaagttgtttgtatgagagcactttggcaacttcaaagtctagaatctctctttttcgctctgaagcttacttagcaaagaaaggtgatgaaaatgagtttatgtgccaatgctgtttggtatttataggcaagtcacaaaaagaggta

SEQ ID NO: 160075 - DNA, 512 bp, Cannabis sativa
tttcatctttgaggttttgccacttgtctaaaagctgaccctcttttgctttctaggtatgcaacctttgcacatatccataataattgactgtagacttgaaagttttccttttggatgcatacgttttatccctttctcactcatgtggatgaatctctagtgccacatattgaaattttcattccctattgcaactataattgaatagcacacaattgttgtgatgtaaagagtgctactcttttttccgtgatcaaacgtcgttgcaccctttgacatcttccaattatcaccttggaagtttgtagtgtaacctttcctagccaactgacctactgagatcaagttctttcttaggtcaagaatatgtttgaaatccttcaactcccaaacagacccatttaacttaatcttcactacacctttaccaacaatatcacaagattggttgtaacgccctaaataattaggcacgctacccaaaattattatgaaaccctaatccccta

SEQ ID NO: 160076 - DNA, 563 bp, Cannabis sativa
  modified_base (519)..(529): a, c, t, g, unknown or other
tatgtaattaggttttcaaatcccatatgtatttgcttaggaagttttatttgtcattgatgccggaaaagtcaccagacttgatgccggtgctggaaaagtcgtcagagtagcagtcggtgctagaaaagtcgtcggagttgctgctggcgccagaaaattcgtcggaattagcattgtcgttggaaaaataactaaatctggtttctaagaaaccgattgcttgatgaagaaaccactttcttggtgatttttccattgacaatgccaattgtgacaactattctgacgctagcagttactccgacgacttttccggcaccgacagcaaacttcaaaaaagtcatccgaattggcatagtcgccgaaaaaattaagaaaccagtttcttggtgatttttcggtaatttttctgacggcaatggcaattctgacgactttttagcaccgacaataaactctgagaaatcaccaagaaactagtttcttttcttcatcaagaaaccaatttcttgatgnnnnnnnnnnnttcttggtaattttttttgtattttttttctcta

SEQ ID NO: 160077 - DNA, 637 bp, Cannabis sativa
gttgatgggccatcaactttaagtttacagtggctcgtctttcttcgatttaatcaagtaaatctgctaggagtatgtgattggtaccttaatcgtacgtcaatcttctgtgggaaggtggctcgagttcgacaggcagcatagcttcataaccgtatgccattgcgaatggtgtttgtccggttgtcgttttcttagttgtgcgacatgaccatagaacttcaagaagctcttttggccagtttcttttggcatcttcaagtttttcttcagtgtatcctttaagattttgttgactgcttcaagttgaccatttgcttgaggatgcatcactgcggagaaacttttgatgataccatggtgcgcacagagattagtgaaggattgtttgtcgaactgcttgccattctctaggactattttgtacggtagtccaaactgacatattatgttcttcacaataaagtcttgaactttttttcatgtaatggttacgagtggttcggcttcagtccatttagtaaagcaatgaacccctaccactgcatactgcactccgcctttacctttgggtaattgtccgattatgtcaatcccccaaatggcaaagggccacggactttgcatccgtgttaac

SEQ ID NO: 160078 - DNA, 579 bp, Cannabis sativa
  modified_base (313)..(318): a, c, t, g, unknown or other
  modified_base (378)..(384): a, c, t, g, unknown or other
gcaacccactcacaaaagtgggtagattttaataaaatacaatatgagagtattttttattaatgaatacaaaaaagaggtattccttaacttatcccaattatttttgggataattacataaaacactattttttataaaaaaaaaaattacaaatttacgtctaaagaattatttttacatttttacggttttctatagaaataacacgaaaaaaacaagaaaactacataaaaataacattaaaataacaacaaaaaataacacatagataacaaaaatcaacaacaatgggtaaataccattttggacnnnnnnttttgcaaaagttataaattggacattctgttttattaaatgataaaatggaccctgtannnnnnnaaattgtacaaataggaccctaaactatttttttttgtcaaaataaaatttaataatatctaatctagagatgttatgctaaaactagttacattttttgtatctgttcgtgttagaaattatcttatagttggttatattaaaaaataaaattgttgaaaattgagctcaaaggtcctatttttaccattttag

SEQ ID NO: 160079 - DNA, 548 bp, Cannabis sativa
gaacccagatccgtaccaagactcaaactcgaacctgaaccgggatccagacccgatctcagactcgaaattggaattggaccaggactgggatgagaacccaggctagggactgtaacaggacccaaacctaaaccaaaacttagaccaaaacacatattggtacttggacacagaccgggacccatggcctggaacctaaaccaagaccgagacccggacccagaccaagacccaaacctcaaaattgggtccaaacctaggaccaaagaaccaaactcaaacttgggacccaaaacctaaacctagcctaggatgggacccgaacccaaatcgggacctggactcggacaggaacctgagacatgaacttgaaccggaacacaaacttcgacctggactgcgacctaggacccaaacatcgatgggacctagacctaggaattggtcccccaaaccgggaccagaactagggcctcagaacttggattgcaattcgggacccgaccctagacccaaacttggacgtaggacccacctcgggactt

SEQ ID NO: 160080 - DNA, 761 bp, Cannabis sativa
aacaataagtcggccacaagattgatgttgggagaaagacccccaatcggtttggggcagaatcctttacgatgcggaatccagggatccccccagatcttagtattttgaccagtggtaaccaacttgcaagcaccttttctcaagatggaattagcctaaacaacgcttttccagaaccaagaatcagaatctttatacctgcagctaagaaggtcattcccttttaggtatttggctcttaagactctgcaacacaaagattgtcatccattgaggatattccatccccatttggccagaaaggcctggttcatttctttggtttttcgaaaacctaagccaccaagcgatttcggaagacacagtttatcccaagccttgagatgaatcccatgatttcctttctcgaaccccaccaaaaatctctgaccataccatcaatcttgttaaccatgcgagcagagagttttgttgtttgcatagcatacataggcatagccaatcccacagatttaataagagtagcacgcccagctttagataaagttttagctttccacccctaaagctttgacgtgagattgtccagaataaaattgaagtcagcatccttctgcctagacctaaaaagaggcagacccaaatatttgatacaaccttctggggaatcaatccccaaagcttccttaatttctcctcgtaagctgaccggggtatttttactaaagaaaatagaagttttgagcttgttgacctgt

SEQ ID NO: 160081 - DNA, 554 bp, Cannabis sativa
gtgccaactcttggtttcgcagggtgttcagactagatggacgccaggcggaacacttggagtcagggtcaaggagctcagtttcccccgcatgttaagggtcgtggtagaggtcccaggggcagggcccgtggtcggggttatgataacccgccacaggttgcccaggctgctcaggccaatcaagaagcccaaaattgggagactaggtttgcaaaaatgcaagccaaaatagaggagcaagacagtgagattcaaagattgaggcagcaaggtgctcttgcagtgccggtgccataagttcctgtggcacccgcccctgttgctcaggccgagatagtggtagcgggaaacagaatggaacccctgtatgaaaggtttttgaagcaggcacctccggtttttctaggaggtcctgatgtcatgaaagccgagcagtggctaacggtgatcacgagaatattgacctttatgagtgtcaccgggaatgacagggtggtgtgtgccacctttcagtttcaagaggacgcattagtgtggtgggacatggtgtc

SEQ ID NO: 160082 - DNA, 530 bp, Cannabis sativa
aattttatataaattatttttaatgaaataattttaattaattttgaatgagttaaaatgaaattaattaatattatttaaaaaatagtattagagtaattatagaaaaaaaaaattgctagagtgagaaagatagataagagtgttaaaattttaaaaaatggtaaaaatatgagaaataaagcatgtgaaagagaaagagtgggtgagtagaaaagggtaaagaaaaaaaaaagagaaagaagctaacagagagagaaggtaagcaaagagaggaaaaaaagaagaaaggattaaaaaaaagctaacaaagagaagaaaataataataaaaaaaaatataaaaaaaaaaggaaattatcttgtatattatttttttaactatttttttttttaaaaaaaatttatggtatgagtttctcaggtggtttctctaatagtttttataaaagttgttatacgaattttggttgcgatttaggttgttctgttagttgcaataagagtttctatgtaaaatttggtaaaaat

SEQ ID NO: 160083 - DNA, 509 bp, Cannabis sativa
gatctgcaacgtgcatcttgatttagttatagccggcgtatgcgtccatgaaggacaacagcttgaatccagaggtggcgtccaccatttggtcgattcgcggtaagggaaaacagtcttttgcgcaggctttgtttagatcggtaaaatctatacaaatccgccatgtccagtttggtttcggcaccagcaccggattggccagccattctgggtaatacacatctcgaatcatgccattagtcagtaatttgtccacctctttctccagggcttctgcctttgcagaatcgagggggtctcgcttttgttgaactggtggcatgtctgggttgacattaaggacatgggttatgacataggggcttattccggtcatgtccccttcgcaccacgcgaaaacatccgtggcagcccttagcgtcttaattattttttttctttcctccggctctagactttttcctagccggaggaccttagcagggtcgaggtcgcacaccgatact

SEQ ID NO: 160084 - DNA, 636 bp, Cannabis sativa
tttaatcttcttgtcttctataactgaactattcatatcatcaaaccattttctttcttaagctatacatatttacagctggtattgatatgtcttctccttataatattttttccatgttttgatgcttgttgttgttatactgttatgccatgaatttagataaaatttgttgtccattgatatgtatgactcacatatctaagatatggttgtgatatataagcgtgctagtcaaatggttatttattcaataagaatgagttgtgtgataattaatgttgttattgacatttattagatttattaacccttttatttttaagaacttcacattcttgtcattgattattaatgtttgatttgcttacttcactttagagttttgcaaccaagaggtattttcaattgaatgtttcaaattcgacaacatcaaacaacccaaaatatttcctctattaatctaaagtacaaaaagggactttctgttgcaatgatgtgttaactatcaaacttcctctccttgttgatcctgttttactatgttgcacatgtggcagacaacttgaaggatgtaaagctgaagtttcccttaatgtacttggtggattgcacacaaaatgattgtagtttgat

SEQ ID NO: 160085 - DNA, 611 bp, Cannabis sativa
taagggctcgattttaatttttgttatgtaaggatggtaatatttatggtttatatgcgccctgtgaagtttggagtgatttggataagttttgttaatgtttcggtgagaacaaaaattgggattttcgagtttcaccatttttagttttagaaattagaaattccaaattcctaagataagagattaagattagaaattagaaatcgtatttttgtcataacttttaacttgggtgtccgttttcgacgttcaatataccgtttcaaagcttgcaacgagctctacaatatggtgtacattttagagcaaaaatatacgttttattttagtgtatttataccgcgggtttggtagaaaacctagattatcttatgtgaatattaagtagtgttttaagataaacacttattgatttaccgttattatgacatagggccgagatcatcaggatagttcttaacttaggttggccgacatgtatgaacttagattaaaggtaagaaaagtatattgagctgcatagtacgttgtattgtaatacaattagtattgttgtgaattgattaatattgagatatggttattattgttatataatagaaagattg

SEQ ID NO: 160086 - DNA, 683 bp, Cannabis sativa
ctagtgtgtgtgaaatggaaagagttccgcatgggatatgaacccttatttacaagggtatatagagtgcaactttagcatttgggtttgggccccaagaggtacccaattttttgtgaatgggtgaggactcacaaacttgacccaccacacacgagagcgccgtccgtctgatccgcgccaggttgggttggttggtgtggtgtgacactctattatttttacagaaaaattatttaatgaaataattatttttaatttttttcaatttaattaagaaacgtgtttaattggaacggattacttagtcgtataagagttaatgggacacgttcaaccaaccaactcaccccacgattcaaaaaaattataatttttcaatccattcgtctatataatgcgattgaacggatgggaagaatacatctttttcatatgagaaaaaatacagttttcataaaaattaaaattccatatgcgatatcgaaaatctttgggtgtattcaacggtgctctatagtacagtggggttccgatatagtacgactgggctgttttatcttggggacgaccgataaattctgactacttgcacactcctcggtagtgccgcgaacgtgttaaagagagcgacctagaaatagtaaacgctactttatcacttttattgatgattgttctga

SEQ ID NO: 160087 - DNA, 559 bp, Cannabis sativa
gaggtgcggctggctgagaagagaagtgcggctgtggctgagaagagagaagagaagtgcagctgctcagaagagagaagagaagggtgcggttatgtttagaaaatttagggttttttagttatgaaggaagagagagagagttagaaaaataagataggaataggtttttttatataaatatgtaatttatttaataaataaaatgtctgattatatttatatatatataattaaagatttttttttctgaaaaatattaattaaagttgaaaaaagtaaaatgatatagtgacacgcttagcatgtcgggacacgtttacccacacgcgtttggcatgtcactatagatttttttttttaaaaaaaaaaatattaattaaagttgaaaaaagttaatgatatagtgacacgcttagcatgttgggacacgtttacccacacgtctttggcgtttcactatacattaatatttttttaaaaaaaaaagttaaaaaaattatgggtattattctttagtgacacctcatatttttagtgacacacattataagagact

SEQ ID NO: 160088 - DNA, 638 bp, Cannabis sativa
catctgccagtagcttggagatttttttcattgtactcatctggttttcacccttcctacttagagcatcagctacaacattagcctttccaggatgataatggatttcacagtcataatttttaccaactctagccaacgtctttgtctcatgttcaagtctttttgggtgaagaagaattttagacttttatggtcaatgtaaatctcacatttctcgccatataagtaatgctgccaaatctttagggcaattacaactgcagtgagctctagatcgtgagtagggtacctctgtttatactcttttaattgtcgagaatcataagttattacctttctagtttgcataagtacacaacctagaccttgtcttaaggcatcacaataaatgacaaacttttctttatcagaaggaagagttaatattggggtagtaattaagtgttgctttaactcctgaaaacttttctcacactggtccatccaattaaactttaaattctttcaggtcaattctattaaaggtgtcgctatctttgagaaaccttcaacgaaccgatgataataaccagctaaacctaaaaagcatctaacttccatggctgattttggtgttggccaatcccaaacagctt

SEQ ID NO: 160089 - DNA, 675 bp, Cannabis sativa
gatggttcacaagattggaatggtcgattaaaggatctccatgaatgccaaaatgagggggagtgacttcatactgcactcttttttccttgaccgagttttgtcccattgggttttcccagtgaggtttttaatgaggcagttattatggacattcaagggggagtgttataaatattattattttgtggatgtccaaatcttttatttgttaccattaatgtaatcaacattccttttttcttagttttccttttttttagtttcttaatatttgactcttgtatgtgtataaataggagatcacctattggaataaaacactaaaaaaattctcatctcttctctattttctttctctaaattataatgttacataatactaatatttcataatagttatattaaatttacattttgggttctacacaaaatttaagattttactaaattgtccatccattaaataatataaaactttagaactgatacattctataacaactggctataacaaatctatattagagtgtgttaatactatttatacaatctattaggggtgtggagaaagtcatcccaaccgaccgatctaatcccaaccgatccaatagaatcggatatccaatcataattggatcggatcggatgtaaattttaaaaatccaattggat

SEQ ID NO: 160090 - DNA, 530 bp, Cannabis sativa
tttggggagcatcaattcacaacccgctgaaatttctttggtggagaatcttatccaattgcctccccaccaaaggcaagatcggttccctctttccaattactgacaagaattgccttttctgctcatcctatatagagagtagctttcatttattctgtgactgtatagtttcaagatccatctggtttggatgctcgtggtgtgtgagaacttcggtcccttccatctcaaattgggaggagtggattgattggttcattgtgtcggccaacagacctcatgtaatggacctcaactgcttcttaggaggtgctggaattattttcgaaagcatatggaaggaaagaaactccctactccatggtaagcagccgatccccttgaaagtgcaagtagaatacattaatagtagattttatgaaatggacacaattaaggagtctaccaatcctcccaacattgaatggaatccacctccggaaggttggattgcttgcaactcagatattgctattggccaatcccaa

SEQ ID NO: 160091 - DNA, 509 bp, Cannabis sativa
tgttagctttgccttccgacaaagaaaagtttgtggtttattgtgatgcatcccgatagggtctgggatgcgtgctaatgcaagctgattaggttatcgcttatgcgtccagtcagttgaacgattatgagcagcaatatccgacacatgacctatagttggccgcggtagtgtttgctttgaaaatttggcggcattatctttatggagaaagatgtaaaatttataccgaccataaaagtctcaaatacttctttactcagaaagatttaaatatgagacaaaggcgttggttggaattagtaaaggattacgattgtgagatcctttatcaccctgggaaggccaacgtagtggccgatgccctgagcaggacgggtcccgggcaggtagctagtatgatacaaaagtcacctcagttagcagaggacatggtcagatctaacattgagtttgttgtaggcaagcttcacaacttgatgctacaatctgatctgttagaacgaatt

SEQ ID NO: 160092 - DNA, 694 bp, Cannabis sativa
  modified_base (153)..(156): a, c, t, g, unknown or other
  modified_base (241)..(242): a, c, t, g, unknown or other
tctatgtatcaattcacaaactcatattgtgtccataccacacattttcaatatcatatacatattcattaacataattcaatacttaaagaatttaaatttatgcagataaacacacactacaaaaaagtttacttttagtcacaacaaaannnntgactaaaagtaaaaaagttgtgagtaattataaattattattcctatgttgtcactaaaaggtccgtagctaaaagtattagtnncaaaaattacaatttgttgtgactaaatgtgttttagtcacaatacttattgtgacttaaactaaattagtgacaacttgtagctaaatactatattttagttacaagtaagtttttgttgtgacatttagtcacaaaatatttatgttgtgactaaaaaattatcactaaatgtagcagttttttgtagtgacatacaaaactatctaacttccttacctcaaatcccactacttaagacttgttatctcgtcaatactacctataacaacacatgggtgaaggccctaacattaaaattcgtactcctacaatatagcagataaacattacttttgactaataaatacaagaattcagtaaaagtttccttcataaaaattataggaaattaaattatcttttcaatgatataaagatcattaaaaatagattaaaattgagggagttat

SEQ ID NO: 160093 - DNA, 522 bp, Cannabis sativa
accgacctaaataattgcctaagtgggagaaataatactgcttgtcatgattcccccaccgagtagaaggcatcctaaacctatggagacgttcatcgtaacctataggcctaaggctagcatactcacggacggaagggacataatgtatcgtgaaaggggacttaccagaacccgaagtgctggcatcaggagccctcgtatttggtactggggtcacaggatttggtctgggggtccttcgctccaccggagccccgatacgaagggcccttccggcggtcacctggaccttattataagcccgctcttgttccttcttgaagaggtacttctagtacttatcctccgccgtggcgatgatgtcgtcctggaataccttctccgcggctggcgccctcacattcgggcagacgactttggagagattagagtcgtccacctactgatgccccaggatcagcttggccttccgacagtgctctgtcgtgaccaactccccgacatcaagggctttcttgt

SEQ ID NO: 160094 - DNA, 512 bp, Cannabis sativa
ttctttcttcttctttttatttatatatgtgtctgttcgacccataggcctttttctgcgacaaagacgaccgatcaagcagttcttaaacttgggttatattttttcattttaagacaactagctaaccgggtagcttttaatcctgggtttaccgtgatttgttatctttttcaatgaatactatcccttgttttgataattgtctgtgcaactgtgtttatttacttttaccaatgctttgtacgggtatagttgcccccagggtgaccgagcagactttttactcttggtcacctgtattgcacaagtataatttttgtatgttcgacacaatcaaaatttagatagacatctttattcattcattgttcggaatatttttttaccgtagaaacttacataaaagctattgtatgatctaatccattctttagctaaatttaaacaaaacaaattgcacttaaaaagaaattgtactttcaaagtattaggttttatgccctaaataa

SEQ ID NO: 160095 - DNA, 748 bp, Cannabis sativa
aataagagttgaatatttttatatgtgcttgaatgttaaattattaatattgaatattgaataatttacatataaatatcatacaattccttagtcatacatgaggctgtgacaggtattgtacaaagagttaatatcacttagccatgaataaaacagtcagcaacatattaaatttatggaatctttaatcaacggttgctagtgaagttcactgatgcctgttatttggtgcaagtaatcttgattcagattactgatgtagtatatataacatctaagtgaatgtattgtatataatagagattatacatgacatggactgatatgtaactaagttgtctttatcaaacatgttgtttaccataaagatctaattcatattataaaggtgatcaatagtagattggccaaaatcttgagtaatcatgaaatcatattcatgttattagtttctttgattcactcattcaagtttttcagagaagatgattcttacaacttttgttttaggaatctaataatgtggatggttaggaacatgatctagaattatagaatcctgactttcctaatggatcgaatgttatttccatttaagtgttaatttctagaactgaaaagttgtacaaaaatttagatcagatctaaattatacttaactagcaaattaacggtactaaaggataaagaagtaattagaagggtaaaccggtaatttgaccaaaactaattacgaactgacaca

SEQ ID NO: 160096 - DNA, 583 bp, Cannabis sativa
gaagaaagactgtatagactacgttctgaaatgtgatttgtgccaaagactcacaaacataccaagagcctcgcccaacgagatcaccctgatgagtagcccctggccgttcgcggtttgggggatagatcttattgggtcgctaccaacaggaaagggaggggtaaagtatgctatagtcgtagtagactacttcaaaaagtgaacagataaatgggtaagtagaagccgtcaataaaatcctaaaggtcaccctaaagaaaaagttgcttgcctgtaaaaacaattggcctgaagaattgacaaccggccactcgccattctcaatggcgtacagttgtgaggcaatggtcccgatggaaactttattcccatcccacaggagaacgacttacgatccaacatcaaacaaggctttattacaagaagcgctggatcaaattgaggaactccgggatgagtctgaaaatacaaatggcagcttatcaaaagaaggtggctaaacacttcaattcgaaggtcaaaatagaaagttcactattggtgatctggttctaaaaagggtcttcccggctactcaaga

SEQ ID NO: 160097 - DNA, 507 bp, Cannabis sativa
  modified_base (64)..(64): a, c, t, g, unknown or other
  modified_base (284)..(285): a, c, t, g, unknown or other
gcaggtggcaagagattgaactaccaccctaggaaagagtcttagccaatcatcattgccaagngctttatccagggctgacttgatgtgcctgttgccatctctatggttttgccaggtcatgcaatcccctttaattggtaagtcaaccagagcgtgatcattgatgaggtttgagataaagggggtaaactggtcctttccccaggatcttactctctccgagtcactcagaacaaaattcacatccccaagaattagccaaggtcctccgaacttacgannaagctccatcaagttagaccaaaagagcctcttttcatggttataagggggcccgtagacacaagacagtaaccaaggattcgtaggagggtccgaataaacaagaccagagatctgaactttcgagatcataatagtttcaaacataaacccctatttccaagccaaaataataccccctgctagccccacagccggaaaaacaatattatgataaaaatg

SEQ ID NO: 160098 - DNA, 534 bp, Cannabis sativa
  modified_base (454)..(455): a, c, t, g, unknown or other
tcaactgatgatagcccaatcggagatcaatctttgaaaagaccgtcttcccctaaagttgatcgaaaagagcattgatcctaagtaaaggatacttattcttgattgtcaccttattcaattcccagtagtcaatgcacatttgaaaagtcccatctttctttttgacaaacagtactggagctccccagggtgacacactaggccgcgaaaaccctatgtcaagcaaacccctggagttgaattttcagttctttaagttctgttggagccgttttgtaaggggccttaaaaaccggttctgctcaaggtgccaaatcaatgacaaaatcaatttctctttgcggtggtaaactcagaagttcatcaggaaaaacatctaagaattcccgaaccaccttgatgtcctctggacgaacagattcaagtcgagtggtatccaataccacggccnnaaaccctagacatccatctcgtaacaattccctggctgttagtactgaaattactgagattcgagatccctgaaccgat

SEQ ID NO: 160099 - DNA, 856 bp, Cannabis sativa
gggggttggtaatgctaatcctccgctgattggcagcagatgtttcaagaaatgcgaagtttcatacttcgtcaagaagaagagttgcgacgattaaggcaaccggcacgggctgcccttgtagatcaagtgttaccatcagcacttgtgccagtggtgggtaactaggggtttgttatgccgcatagagactcagtgtttgagcggttcgtgaagctgcaacctccgacttttctgggaggtattgacataatttaggtcgagcattggatgagcacaagcacctctatcctcgataatatggggttgacgggaactgaaagagtgagctgtgcagccttcatgttacaagatcatgcccgcgtttggtgggatattgtgggccaaacccgggatgtcagtgtaatgacctaggaggaatttaagaatctatttgaagaaaagttttacaatattattgtgagaacttcacacatggaggactttttgaagcttactcaagggaaaatgttagtggccgaatacaccctggagtttgatcggctatctaagtttactggtgatctggtgcccattgatttcaccaggaaatagaaatatgtgagaggaccgaatgctacaatcagttgggacttgaagattacacttcacatgacactttgtacaagaaagtggtagagctagccttgattgctgaggaggctgagcaacatgctgcaaaagagcaaactgtaaaggatgtcgtcacggtatcgaaccctcctgctagtggtaatgtcagtaaggggacaaccagtggcaaccctgatcacaaacggaaggttgaggcttctggagcatcagggggtaatagaaa

SEQ ID NO: 160100 - DNA, 588 bp, Cannabis sativa
gggattctgggggttttgatttcctcgaccgcctccggtctcaaccatgttaccctaacttcttgtattctgcggggcgtaaattttataggacttagcctgcgaacccataagctagacaagttagaaagcgatcataaaacttaataccgctctttaggagttaaaggcaacacacttaaaataaataattaaaatctaatatgcttcctagcatgctttaataatcatttaaaatactaaaaaagtacgctcttactgaaccgtgaaccgtgctttccctgatgaagattgtttatgtcttggcaagcttcggtagacaaacctggcggctgtgataccaaaattgtaacgccctaattctaaggcacgctacagtgctttttcaattatagtgcagtctttgctaacaaagaattttcttgaaaaacgtatcaaattaaaacttttgtattaaaaattaaacttcatattatatcaaaatatttacaagtgttgggatcatgttttcataattttaaaacataatataccaaaatacttattattcaggtcgcacaacgatttcaaaatacaattcccagatgt

SEQ ID NO: 160101 - DNA, 526 bp, Cannabis sativa
tcctatttgtattccccaatcacttcgttcaacaattcaatcttatatctcttttttttttcataaaactaattattcccccacacttaaattgttgcaagtatttatttttttatatttatttttcattgaatttttttttatgaaatacttacaacttacaaacattcattgtaagggaataatattttttttctcatcatcacttatacataactatgaatattttctcatcaacaaaactctctcacctttacaaatacataaaacatcaatatactatggtgtgaaaaaggatgaatatggattttctttttagtcttaaaggttattgcatagggttaaaaaaaacaagatgacaatttaggctcaacttgggtaaaactaagaaattaacaaataaggtaggctttgaaaatctcaatcgattaaaaaaaaattgcatatatcatatctcaaaatcatgtgtaatttatcaatttcgcctcaaatgattatcaaataagttctagagtagttgagactt

SEQ ID NO: 160102 - DNA, 538 bp, Cannabis sativa
  modified_base (301)..(305): a, c, t, g, unknown or other
ttattttaaataatatttaattactttctattttattgtctacaatggtgatatatgattttgttgtcatgatatatatattttaattgtggtatagaagctggttagtgtatacaaatatatatactactagtaatatatattttcattattattaatagtatatatgttttggtgaatggtatatgtattttttattatacgatatattattttttaaataatatttaaattctatttttaattgtacttttattgacataatatataattttattagtatcctatatatttttatttnnnnntgttgttattatatatatatttcgattgtaaggtatatattttttcttatatggtatataagttttattgtataatatatcattttattttagatcatgcatgtttaatttttattttattatacataacggtgatatataattctgtaagtatagtataattattttatggttgtatataattttgttaatataatatatacaatttttttataatgatattatattatttt

SEQ ID NO: 160103 - DNA, 508 bp, Cannabis sativa
aaggggcattgatgcctttgcatcaatacttcaagaatgtggcagacttcttcgacttttgctcgaccaagttcactcctaagggcattaaatatctgtctgccctcttcgtcctctacgcttcccagaagtggggtatgccttctcctcatgaagtcagctggctttttgatttgaagtccacccctaagcaagacaggtctgggtacttttatttctctcaaccagacttcaagtggttgacgggcaccgatgattcgaccatcagcaaaattgggcattttgcgaatgagtacttcatggtggatggcacaggcatcactcgcactcggtttcagcagattctgacatatcaccgccctcctctcactcttgctctctgggatagagctcaaaagcttgcttgactgctgggggaagatcaacatatcatcaagttaacctccgaggataactttgtgaagtacaggctctatcccaaggacttcattcctaaaccagtgaaggg

SEQ ID NO: 160104 - DNA, 574 bp, Cannabis sativa
agttgaagcagtcaacaagacactcaaggacatcctaaagaagaaacttgaggatgctaaaggaaactggccggaggaacttcctgaaatattatggtcatactacacaactgagaaaaaagcaaccggacagactctatttgccatggcatatggatatgaagctatgtttcccgtagaactcgaaccaccgtcccacagaagattaacatatagcaaagaggccaatcatgtactcctcgcaaaatcacttgatgaaatcgaagagaaacgaactgcagcaaacttaaaactgatagcccatcagcaaaaagtagctcgatattttaacaaacaagtgagagcacgaaatttttttgtaggatatatggtcctaagaagagtatttttgaacaccaaagacagtatgacaggtgtgctcggaccgaattaggaaggaccatatcatgtggtcgaagttctagaatcaagggcatacaaattgggcaactatgacgaaaagatgcaactcgttttagtaccaaggtattggaacggggaacacttaagaaaatactaccagtaaaagtaccag

SEQ ID NO: 160105 - DNA, 556 bp, Cannabis sativa
gagacccctaaaccgatccaacataaatgaatggatgctcgccctctatttgaaaagttaccatttttcgcttgcaatcaatgcttgcggaatacttggaaagaaaatccatcccaagtataatatcaaactctgttaattccagctctataaggtcagcacataactccatatcctaagtggcatagacctaatatgcctattggagataaccaactccccgctaggcattagggttccaaaccctctttcaataaaatcacatggcctacccaaaagatcgattacctgttttgccatatatgagcgtgtagctccccagtcaaataacacagtataaaaggaatcgttgacaagaagctaacctgtcaccacagaaggactggctgcagcatcaacttgagtgatggcaaacacccgagctggtacgagttttgcctctggcttcttctcttctttcttttcctaagggaaatctttcttgaaaagcctcaccatgccgcactaaaagcatgtcttctagttgcattctccgggatgatgtttcttacaacgt

SEQ ID NO: 160106 - DNA, 559 bp, Cannabis sativa
aaatgtttaatgggccggcccaaagtatttttgtaatttttttttccttttttgtatttttcagtttttttcccttaataataagataaaatataaattattttttaaaaaaataagaaatttaataaatatttattttattataactgtaggttctctaaaaattcttcaaaaagctattttttaactgtttaccaaacacatttttatcacatttttttttttttcaaaaagtagcttttagcttttccaaaagttgtgtcaaacgggtccttaataggccaacgcaatgattgcaatttggataaactataaactattcaattttttttttattgttcaacccaaccctacttaatacaattataaaggaggtggattgggttgggttcattaggttgagatgaatattttaaactttaatatttatgttacaaacagggtaaaattattcaacttagtgcacatacaaaaaaaaatgatacatatgtgtgtgtgtgtgtgtgtaatatagtgctttaaaaaaactaaagtggtagtggtatcattgtgtgagtag

SEQ ID NO: 160107 - DNA, 755 bp, Cannabis sativa
  modified_base (621)..(627): a, c, t, g, unknown or other
ttcctcttcaaaagagaaacttttgtttcggcacctaacagatttttttagtcattttttttttatatatagtgtatattatagttatttaagacattctttaaaattttaagaaattttaaaaaatttaactcgtcgaaaacaatcctctttgaaagtagcgcactaatatactcctacatgtttcgacattcgagagacttttcggtctttttttttcatgatcgtgtacattatagttatttaagacatcctgcaaaattttgaaaaatttaaaaaaatttaactcgccgcaaattattagttaaatattaaaattgtggtaattgttgttaattaatatgatatttttttttattattagaaaattaatataataataagaaatatttttttagtgtaatttttagtgttgtgatttgagtgaaaataatttttaatatcaaatttaatgataatgtaacaccaaatttaatatgtgtttgaagatgctctaaaatcactagtccacttaagcccacagtcgcgggacccataagtcccattgcatatgtatatatatatatataatatttagggacagattctgtcctattattgtacttttacggaatgtattcnnnnnnntacgacagccgttagatgagagagttatttgatctgagggttggggttgatctaggggtaattagggttaaaaaatggtaacgtaccctaaaacctattattacgtaccctgagactcatctaatgta

SEQ ID NO: 160108 - DNA, 542 bp, Cannabis sativa
  modified_base (39)..(42): a, c, t, g, unknown or other
  modified_base (89)..(100): a, c, t, g, unknown or other
tgaaaagggtttcagaagaatttatacattatgtacatnnnntcatgaaataaatcatgtgaatcgtgcaacattaaatgttatttctnnnnnnnnnnnntaagtaaatctgattatattaaatcatgtgaacccaacaagcccaccataacattcaatgatgaagatgttgtcaaaattagatttccgcacaacgacccattggtcgtggagggccagatagccaccaagatggtggccagaactatgatagatgatggagcctcttccaacatcttattcaagaccacatatgaaaagatggggctccaactcaatgatctaaccccttgccttctgcccgtgtatggtttctccggccaaggattcacacctctagggcaaattcgcttacccttcactgttgggcaagctccaatgagcataactataatggcacaatttccggtattagatgttaaatcagcctttaaggtcatgatagaccggttagctttgtatgactgaaaggttgttacgtcgatattccattcatgcctaaa

SEQ ID NO: 160109 - DNA, 542 bp, Cannabis sativa
  modified_base (292)..(321): a, c, t, g, unknown or other
acaaaaaccagttaagtaaaataattcaaacaaaaacacccattcaacatgctccaacccaccaaataattacacacataccatattttctccaaaaatactcactcatgatgttatataaccagttctattttagttataaccggtttgagttatttcgtgttatttatttttattcattataacattgttataaaactagttctattttaattataactgatttgagttattttgtgtcatttatttttattcattatgttacacaaccagttatatttcaattataacnnnnnnnnnnnnnnnnnnnnnnnnnnnnnntattcattatgttataaaatcggttctatttttgtttatatctgagatatctacttctggtaactttttcagtgactttgtttgacgactgtgattttttcggtgacttttccagtgttagtgagttttccagtaaaacttattattgttttacaaatatatgatttttatcttttttttttaaaaaaaaaaatatagcataaaaaatctcatataaatgt

SEQ ID NO: 160110 - DNA, 915 bp, Cannabis sativa
  modified_base (137)..(164): a, c, t, g, unknown or other
  modified_base (294)..(299): a, c, t, g, unknown or other
  modified_base (554)..(558): a, c, t, g, unknown or other
tatggaatctatagcatctatctgcacataaaagtgaaacgatgattgccttcgagcttggcttaatagagataaatggaagagcttttatttccgtgattatattactttatagaaatatcatttataggaagctnnnnnnnnnnnnnnnnnnnnnnnnnnnngggtgaaacggtaaatttgtccctcctccgtgtaaataatctataaaggatctttaattattgggattagaacgacggttaaatgtttatagcgtatctatatcttggaacagatagagcgttctatatnnnnnngagtgcaattccaagttctatgtggatgcaataaggaattaataagttaggaaatttacttggcaaattattgatctgcttattggaagctcggttgtgtaggcccatggtccccatactagttgagacaatactgcttgtaggactcatttaattgattttaattaattaattataattctaaaattatactatgtctcgtttatgaatttccactaagctaagacttaattttgaagaaaagagattctaggnnnnntttgttaattaaaagactttattaagtctaattaataactatgttaaataaatagttttggcatttaagtggttgaattagaaaatatggcatttttgagaaaataagataaatagttgaaaaatcgaaaaattgcaaagtgggggcccacatccatggccaaccacttatgctttattttacaatttacttatcaattttttaatgccaaataattcaaacctaaacctagttggattcttataaatagatagtgatggcctcaaactaaaagatgatgcagtcaagcctttcagtcaaaatttttgacccatctcttctctctattttcgaacacttcctctctctttctctctt

SEQ ID NO: 160111 - DNA, 1119 bp, Cannabis sativa
  modified_base (1067)..(1077): a, c, t, g, unknown or other
gtcaaaatgaccattttgcccctagggctataaagcatgcacacacatacacaagggtatttaaatcatttcacacataaataaacccaattaaattccaaattattcactaataaatgaaatgccaatttctcaattcaaattgcatttcgagcccgaacccggttcggcccaaaatacccggagggactccgttctggaatgagttacagcaagaaggagcctccaaccatcaagatttccagaaaagagtccaaaaatacatcaacctagaagaggcccaaatagtggcctacggggaatactaccccctcggagctcaactccaggaaccttaccagtagccgctccaccgatgagcagcatacaattttccgctaccccaggatatagtcagggtcaggccttagcccctgcatcttctcattttgggaacccctctgggataagtggacaagccccgtctcactccgctccgactgcaagcttagcaggtccctctcaaggctctcggagtaagaggtcctcgaaaggcagcaaccggacggaggataagcagcagaaaagggggtacactccccaatatacccagtacacggagctaacagactccgaagagcgtgtgtatttcgctactaggcataacacgcactaccggacaccgcctcctctgtacaaggatagctcccggagggatcccaacaaaagatgcgagtatcacaacgacattgggcatagcaccaatgaatgcaaaaacctcaaggacgagatcaaaaacttgatccgattgggacatctttacgaatggatcaagaaccggttgcctcacctcaatccggttctggcagcaggacctttgccccaaggagcaccagggggtgcagccggagcattggccccagttgctccccccagagaaggccagcaaattcctggcctaccgccgagacccaacggaagagtagccatgatctcaggaggaccccacatcggaagaactacccgaaaggaacgaaagcgttacacaggggccgtaaagcacagtgaggtttgggaggttactcaannnnnnnnnnnaaggccccggctaatggatcagcccattacgttcacagaaga

SEQ ID NO: 160112 - DNA, 949 bp, Cannabis sativa
gactggaataaggacttggacttggaatcataactgaaattgaacccacaccgggagcctgatttggacctagactaaaatccgtacccgaacccaaactcagtctagtacttgaactacgacccgaactcaaacccaaactcgaataagaatcgcaaatggaactagaaccgaactaggaataggactagtgcgaggacctaaacccaaacctaaacccagataaaaaccccgacagagacctaaacccgaaccgagactaggactcgaaccagaacatagacagggaccaaaacccacacaataaccgggaccaaaacccacacaataatagggaccttgaccaagaatcaggatagggacctgggaaacagaactaggatcaggacctagtacccgatcaagacccgaacttgaacctaggatccagctcgtgacccggcaccagaaatggaaccacactgggacccgagattgggattcaaatctggacccagggcttggacaaaacccgttgtcgatttcatgatttgggacccagccctggacccgaacccgtaccctacgaccaaaaattagaacgaaaaccggaagttgaccgggattggaactaggacttggacttagaatcataccttaaattggacctagatccagaaccgtaaccggaccgggacccatactctaaataagacctagaccggaatagggagccggacccggatcccaacccaaacctggactcggacccgaacctgaacctgaactcagactagggacacaaaaccagggtcgggacctagaaccgcaccccagtctcgatcccgattccaatctctgaaatgggacctgggacgtgagccataatcagagccaaaactgtgacagtgatccagatcttgactcgggattttggtaatggggcctggaacagaccagtagtcggtgt

SEQ ID NO: 160113 - DNA, 697 bp, Cannabis sativa
tatgctatgtctgtgttcttgttgtcggtggaaacttgtaataagttggaatgatgagtaaatattggtggagttcgggttccaatcagaaccgtggcgtgagttgggcgagttggaataagttgtgccgtcataagcatcatggtggacttggattttgacatttacgggatttcaacttagctatgttggaaaaacaagcttggaggttagttacacaagatcactctcttgttagtcgggtttataaggcccgatattatcctcatggttcttttttgagtgcttctcttggtccgaatcctagcttcatatggaagagtatttttgaaatgcaagatttgatcaagaaaggggctcttcgggttgttggtccaggcacaaatgttagtgttcagcttgatccttggcttgcagatgattctcacccgtgggttacttctacagctaatggtatggagaattggacggttaacaacctcatggtggtgggtgaacgggtatgggatattgaggtagtttcggatatcttcaatgatcgagataaggagagaatcttaaagaccaacattgatcaggagactccgtttgacacttggtattggcatatggatctctatggaatatatactgtgaaggaggcataccggttgatgcaccatgcagagatcactaatactagtgattttgagattaa

SEQ ID NO: 160114 - DNA, 514 bp, Cannabis sativa
  modified_base (48)..(49): a, c, t, g, unknown or other
  modified_base (260)..(262): a, c, t, g, unknown or other
gagttgggtttaacagctccaaacatgccactgtttcactaactcaannctgaaaataacacaaaattaaaataaattaaatatttccaactacaataattttacaattataaccatgaaaacaattaattaaattaattttatgaacgctattaaacctttaaaatatataaatttgagccttaatgaacacattatatacacttcttatcttctttccagattcaagtgtgttggccaacctgaacgaaaagtctcgnnntagatagatgccctaatcacataatgaaactaggtaaatcacacgatcaaaatcttaatctggaagaccctaacccaaaaccctaggttctgttatactctctagggattattctaatttaggaaatagagaaacacccaactaaggcacagaatggacgagatttgggaaaacgagacactcaggggaccctaccaaaactggctaaccggttttacaggtacatgtaaaaccggttacccgatttgcacc

SEQ ID NO: 160115 - DNA, 598 bp, Cannabis sativa
ctgtggaaacccaaagtattatagctacaagagcttctagacaaagggatcattagaccaagttactcaccttggggtcctccagtactcttcatcaagatggaagtatgtgcatagaatacagtgagctcaacaaggtgaccatcaagaataagtaccctttgccaaggattaactatctctttgatcaattgcaaggctcgactgttttcatgaaaatagatctaagatctgggtatcaccagttgaaggtctagaaggaaaatatacccaagacaacattcagaacacggtatgggcactatgagtttttagtaatgtctttcggactaactaatgccccagcagcatttatggatatgatgaatagggtgttcaaggagtacctagataagtttgtggtcgtattcattgacgacattcttatcgactccaaaatagtggaggaacatgaggaacccctgaggatgactctaaagtgacttaaggagaaccgactagacgccaaattcaagaaatatgaattttggttatggaaggtggcattcctaggccatatagtttccaaagatggagtcgagatggatcctacaaagat

SEQ ID NO: 160116 - DNA, 570 bp, Cannabis sativa
tgcttggtttctatgcaattagaaacaaattcccattcaaagtgaaaaagtcatgcgcaagaacatacaaaatttgttgtttggattcaaaatgcaagtgggccttaacggcatttagaaacggaccaacgaagtcattcataattagaaattatgacataaaagttaatacacacttgtgatctaaacaaaagatttgcagactaaagacaagctacaacaaagttgatcgaaaactacatcaagccacggtttaccaacataaaaacaactcaaacgccacaagatatcagaggagaaatgaaacataagtatggggtgagaataaactacatgaaagcatggagaagcaaagagcacacgcaagaagaattacgaggaaaagcaaacgaatcttacaagctgctgccaagttttttgcacatcctgcagaaaaccaatcccggaactattgtacacatgcactagatgcttcaataaaaggatggaagaagtgcaaacctataatagttgttgatggaacttttcctaaatcaacatatggaagtacattgctctctgcttgtacac

SEQ ID NO: 160117 - DNA, 551 bp, Cannabis sativa
tttacaaatctcgacctatacagttgagctctactttacagacaagcaataacttgaatttcgtttagtgtttacaaatatcgaccacttatagtcgggctaataacaattgaataatttaccaatcttttgttcaatgtttacaaatctcgacctatacagttgagctctactctttacagacaagcgataactttaattttatttagtgtttacaaatgtcgaccataaacagtctgactctactaatgacaattaaactttttgaaaatctcaaccatatacagtcgagctcaactcatacagttgagttatataatttataatggtcgagctctacacattatagtcgagctatatgatttaatatggtcgagctttcatatttactttagataaaatcatatattttataaatattataatgtctattgccacattctctactaataaaaaaaattactaacagtcttgatgatttaatctatttaagaaaaaattatgtttctaaaatataattgtgacatttcatatttaccatagacaaaatt

SEQ ID NO: 160118 - DNA, 779 bp, Cannabis sativa
tttctcctttttgagttgatcgactgggttctggattgcctcgaaggcacacttgcttattcacgctctgttctttcctcccgagagtagtttttcgtatttcccccatcagggtacgtacgagtcctcactctatgggtttgggaagaaccctggtgattcctaataggtgatctccgttctcctggctaagttccaagatcctcctcattttcatgagggatttcttgttcatcagttttcggttgtctcctttctggtcgttcatcctgattctcagggggtgtctcattttccccacgttgttcttcccaggccttttcctatctcctagtttgtgagccacgaggtctgcctcgtggtcttctcactcaaggttcaggttgatttctacgccgccctagtcgaggctacctctcgttctaactcagcgttttgacgttgtgcctcttctagacgacgtctcaagcggcagctttccatttcataagttctttctcccacagattgggcacctccacggttgagctcttcatccctcgtcttgggattctgatcattcccacgctgagttctcctcgagtgcattatctacgtactaggaccaacgtcgggttgagttctccgaggatgtgtgatccgagcactaggaccatccttaggtggggccctcctggaacgggtggttcttctagactgcggattagtagatcttctagagcccatgggctcttctccagaacgattgttagtttcctcatgtggggtgttaatattct

SEQ ID NO: 160119 - DNA, 673 bp, Cannabis sativa
atgaaggagtttttcgatagagcaaatggctttatcaaacttgaagaagtcatacgacaagcccaggcggggcatgtcaatagcaggtggtcatgagacacccagcagcctcatgacccaccaggctcacaggcaggcaataacaatgctgcctagaactctagtggcaaaaacactagaaacaagcgcagcaccaacaactctgggaggaacattgacaaaaaggggaagtttaacacttttcccacgcgacagtaaaacaaggaggagaagtacatttgcttcacccctctaacatagaagcctaagaccatcttcatggccactcagggaatgatcccatactgatgcatgtcgtatgccatatctaatttactattttttttctaatacttttgttttagtataaaagcaagtaagagtcgatcccacgaggcctatgtttattcaattattcacaaattagtagagaagaggggggttttgagattaagattaaaatagcataaataaaaataaaacaagaaaattaaaattgagactacgatatgagagactagttaaaggttattcttcactattgacaatcattcctaattcttattaatgaatgtaatttcaatttccaatcaaactattaatcccgcagataacgctgaagtagtcaattatc

SEQ ID NO: 160120 - DNA, 552 bp, Cannabis sativa
  modified_base (68)..(70): a, c, t, g, unknown or other
tccttgttcttaagtcaatacaagtaacgaggattagactattactgaactgctcggggctgaacctnnntaaaattcttgtgtctttatattgttttataatattcctgtcgttataaactacctgtcgcttacaaaattagactcactgtcgttggctaagagcgaggtccacattttgatgatttcattgagagttgaactcaaggatcgctcttcattccaaatttagtcacaagtacgatggtggtacagactcgtaggggcgtggtagatccagaaaattcacatacggtggatcttgcactgcagaacccgggaaacacaagtttccgctagctgttaatcccagacagccgtcaaccgcaggtcacagtgtcacgaatcctgtggatgaaatcacgccttctgtgcaagagactggaatacaaattcagtagctgaccagcgcaatcatatcacagtcattccgcccgccaccaatgttcagacaaccattggggatgacactgagatccagaacctccattctgctcttggactcatgcaggg

SEQ ID NO: 160121 - DNA, 592 bp, Cannabis sativa
attgtcgccgaaaaaatcactaagggtttcttcattaagaaactggtttcttcatcaaataatcagtttcttggtgatttttccagtaatttttccgacgataataccaattttgataactttttcagcgctgacagcaactccggcgatttttctgacaccagtaactacttcggtaatttttctaacaccattaactactccagcaatttttccgacaccgacagcaaactccggcgacttttcagccccaatgacaactccagcgatcactgtagtttcatttgttttatcttttaaaaaaataataataaaaaataaaaaaaattgaaggcaattttaatattttttatgtaatttaaagtggcatatcccatgttaagttttcattttaaataccatattttttcctattaagtttcctcgccatatttatgtaaactagccttatttttttcatatttatgtaaatatccctatttaaaaggatttttactaaaatactgaactttggacaaaagtttacaattttaatgtcacgcggaattttttacaaaaataccatttttttttataaaacaacactagaaca

SEQ ID NO: 160122 - DNA, 564 bp, Cannabis sativa
tttcaaggagttactatgatgcatctttctatcacaagggaactgacatcaacacggtcatctacttgttactttatgtagatgacatgcttattataagcaagaagagatcttaagtggatgagatgaagaggaaactcaaggctgagtttgagatgaaagacttgggaatagcatctaagatattgggtatcactataaagagggacagaaagttgggcaaactattcttgacacaagaggactacattcaaaagattatagagaagttttcaatgaaagattcaaagaacacttctcaaccaatactagccagtacactttaacaaaggaacaatgtcctgagactgaagcagagaaggaagcaatgagtaaagtgccttactcaagtactgttgggactattatgtacttgatggtttgtacaaggccagatctggcctttgccatacgtaccttgaccaaatacatggcaaacccaggaaagattcattggcttgcaatgaaatgggttttcaggtacctagtagggacacctaaggttggactcatctacaagcaaca

SEQ ID NO: 160123 - DNA, 518 bp, Cannabis sativa
caccaccaacattgaaaccacccccaccacaaccacaccaccaccatcgcaaccactgcaacaaccactaccaaaatccagatttgaaaaattaaaaactaattctacacacaccacatctgtcacaatatcagatccaaatcccacgaaatatcacctccattccacgtgtctatttaaactatttggtgggttggagcatcttgaatatatatttttatttaaactattttatttaactagtttttatgtgtgagtttttatcttagttgctttacaaaactagttttttttttctcaaatttttaactagttgatatatgtaaccggattttttatattatatttttagttattgtgtgttattatttgtgttatttattttgttatggagctagttcttttcataattatgcctctcagtattttttcaaattgatcctcacctttttaaaaaaattataatcgattttatgaggtattatgtgttatgagattttttattgtagaactagttt

SEQ ID NO: 160124 - DNA, 567 bp, Cannabis sativa
tgaagactataactttaagaaggcgttggactgtgttatcaaaaacatagtgtgtcgatatggcttgcctcacaagatagactcatacaatgggaagtagtttggctgcaaagaattcaccgacttctgcaaccaacacggagtcatcaaaagcttctctgcggtggcaaggccacaaacaaatggacaagcagaagcggtcaataagatcctgaaagtcactctaaagaaaaagctgctggcctgcaaaaacaattggccagaagaactgccaagagtgttatgggcttatcggacaaccccaagaaccacaaccggccactcaccattttcaatggcatacggttgtgaggcaatggtcccggtggaaatgttattcccatcccacaagagaacaacttatgatccaacaacaaacaaggctttattacaagaatcattggatcagattgacgaactccaagatgaatctcaaatacgaatgacggcttaccaaaagaaagtgactaagtactttaactcaaaagttaaaagtaaaaaattcgctattggtgatctggtcctaag

SEQ ID NO: 160125 - DNA, 531 bp, Cannabis sativa
tgatgggcttcttcggggggagcaactggagacaatgctctggctacaccccctagtgctccttggggcaaaggtcctgctgcctgaactggattgagatgaggcgaccggttcttgatccattcgtaaagatgtcccaatcggatcattttttcaatctcgtccttgaggtttttgcattcattggtgctatgccaaatgtcgttgtggtactcgcatcttttattgggatccctccgggagctatccctgtacagaggaggtggtcttcggtagtgtgtatttttcctggtagcgaaatacacacgctcttgggagtctgttagctcgtactgggtatactggggagtgtacccccttttttgccgcttatcctttgtccggttgctgccttttgaggatctcttgctccgagagccttgagagggacctccttagctagtgggtggagcggagtgtgacgggacttgtccactcatccctgaaagattcccaaagtgagaagatgcaggggctaaggcctggccctga

SEQ ID NO: 160126 - DNA, 572 bp, Cannabis sativa
  modified_base (224)..(227): a, c, t, g, unknown or other
ggatatgggggatttaagacccattgcattatgcaatgtgatgtacaagattgtgtccaaagtggttgctaatagacttaagagtgttatattgtctatcatctgatactcaaagtgcgtttttgcaaggccgattaatctcggataacatctttattgcttacgagattatgcatcacttaaagagggaacgaagagggagggatggttatatggcactcaannnngatgttagcaaagcctatgataagcttgagtggggttatctccgggctatgatggtaggaatgggctttgatggtcgctggattaatttagttatgcaatgtgtatgtttagtttcttataccatttcacatggtgggaaggagttggggcccattattgctcaaagagggttgcaccaaggggatcttttatcaccatatctgtttattctttgttttgaaggtttctctagtttgttgcagagttatgaataaagtggcttactcacggggtgtaaaattgctcgaggtgcgccggtagtctcgcatatgctctttgctgatgacagctacatttactgtaag

SEQ ID NO: 160127 - DNA, 513 bp, Cannabis sativa
  modified_base (53)..(56): a, c, t, g, unknown or other
tctgtttctttattgatgttgaataaaatgaattacattgaaatggagttttnnnnagggcataaaacccaacagagtcgagcttatcgctgatgatgattgtaaatatgtcataacgatttttggaagataacctggcggctctgatgctaaaattgtaacaccctactagctcaggtgtgttatcgtgatttttttaattgtgcagtttgttgctaatcaacaaatttattaaaaatcgtgcaatattaaaactttttaaaaattaaacttttacttaaaataaaataaactttacaagtagggataccgtgtttcaaaagttataaccaaaatacaatatactaatacaaagcttgtcgcctagcgactaatcaaaatgcagcctattgtctgaagatcgtacgctctagatctaaccgccctgacatgtacaatcttcatccactcgctctcatggatgctcaaccttagccttgcccttacctacacatgcaaacaatatttgtgagt

SEQ ID NO: 160128 - DNA, 605 bp, Cannabis sativa
caaaggacttggccatgtagaatttattgagcttgctccaaattcccaaatcagtcttctcttcaatcacttgtctcaacacattgtctgcaagattcattatgattacaaatcttgcttgtttcatcacagtatcgatttcgtactccttcactacatcattttccttctctgatttcgtaacaccttcttctagtccaaaatcaagtttctcatatatcaattgttaacgcagtttttcgtcaactgttctaaaaagatcataaaataaaagaggaccacgatgaattaatctgacatgtaaaactgcaataaattaaatggacaccatggatttatagtagttcacccctcatgtcgagatggtaatggggctacgtctactggtagttttattaattggatttgacacatcagagttatgttctcaagagtgtgtggataaaagtacagtaaaagatttctaagtgaaatcttaattgagacttatgaatataaggctcatgaaaaacttgatattcatgaatctgatctaaattaatggttgtaaagttcttgggaacaataaatcaataatttgtaaagaaaagtgtgtatcaatggtg

SEQ ID NO: 160129 - DNA, 663 bp, Cannabis sativa
tcaaataacactatctcttctctccttgattctctcattttttaattttttattaattttataaatattaattaatgtaaaatatatttttatataaaacataactctaaatttaaatcaatcgtcacgttattgttttttagtttaaaaaggatatttttttaaaaaaaaaattaatatatatataaatatatattgttaaatttataataatatgttattaattaattaaaaaataaaaatgtgaattgaaaaaaaaaaactacacacgtgtatttattatttttttaaaatgatatttttttaaaaaaaaattatatatattattaagtttattatattatgttattaattagttaaaaaataaaaatttaaattgaaaaaaaaactacacacgtatatatatataaaggagaagtatgagacggtgatgtggtggtacaaagtcacttcaaatagcactatctcttctttccttgattctctcatttttttaattttttattaattttataaatattaattaatctaaaatatatttttatatataaaacataactttaaatttaaatcaattgtgacgttttggtttttttttagtttaaaaaggatatatttttttaaaaaaatcaatatatatataaatatatattattaaattta

SEQ ID NO: 160130 - DNA, 679 bp, Cannabis sativa
  modified_base (26)..(42): a, c, t, g, unknown or other
ccaccaaatgcaaccaaaccttccannnnnnnnnnnnnnnnnatacacaatatattccagccagtatttcacagaaaaatccaatgaaactcaatttgccattaatcaaagctttgagttcaaagctcaaacttgcataaattcaacacaaaaccactaaatcagctattagaagttaaaatcaatccaaatgaaccctaaaattcgaaacctaaacatcccaagccctaacagccactaacccatgaaatcacaacataaaaccaattaaaaccttgagaaaacttagttaaaaatgtctaggattaccttagcttcaagggtgcttgatttcttagcttcaaaccagccaaacaccaagatttgagggtgattccctctgggtttgtcccagctaaaagagagagagagagagagtttcaagagatatgtattttttttttctaatttttgatttttccttcaaatgagaaaagggtttctctaattaattctttgctgaagaaaggaggccacatgtcacctccctaggcagccaccacactacccctttaaatgactaaaatgccttttaggttaagacttatatatttctaaagctaggggtaaaatagtcaaattccataaccccgctcaaccctgataatttattttctctaaaatattttccactaagaaa

SEQ ID NO: 160131 - DNA, 631 bp, Cannabis sativa
ccaacagcttctttactctattctttaaaatacctcaccaaaacattatttgctttattttacctcacacatttatattacatcatgcatcagtctttttatatttttctctatatcatttaaatattattaattaaaacaaaaaccatacatgaaaatgagtaaaaaaaataataaaaaattaattaattgagtgaaagagagaaagaaaaattataaaatatatgttttacctcttcactattcatgagctaaatttagagaaattttctttggagtttgggatgaggtataatagctaagggtttaaagtatttgttagagctcaattttaagcttttaattatattttttaacttttagctattataactcatttgttgtgagtgttgttaggattaataaaaaaaaattcattaataaatttatatctgttatatactcatcaaaattgcttgcaggtaccgcaactaactataccttagtttttctacaatatgcctatatatttggaaattaacaaaaagacgaaaatcgaagaaaaagcttaaaatacatgataatggactaatctaataataggtcatgaattttgggggcagtgactttaatttcttttcttttttttttt

SEQ ID NO: 160132 - DNA, 513 bp, Cannabis sativa
gtttaaagacctcttggccggtcaagatgtcttaaaaaatgccttatggccgaataatatatatatatatataaaataaagataaaaggagaagtatttaaacagctaaagtcccatgctcttggttcgggtcttctgggccggtaggagttggaggatctgttgtctaaacggaaggcacatcaacgttctggccagaagtagaagtagtcgcctcgagttcaccataagccatctgggaagcacagtactcgagatacatgtctttggcctcgcccaggtaatcaaaattcgcctgagggttagcctttcaaaagtcataaaaaatcttgagaccggctgtctctaaggcatgaactttctcttttagcctcgtcacctctcatttgtacttcttgacctcagttgtaagctcctcctccttagtcttcgtctcttcttccagccgacggaagacagtccgaagaactcccctttcctcctgaaggttattcacttttgccgacaaggtgc

SEQ ID NO: 160133 - DNA, 604 bp, Cannabis sativa
aggggcagatagttcgatcaagcatttgtccttgaagtttcaaacaccagagggtgtgggagttgtgcgaggcgatcaaatgcgagctcactattgctattgcatagaactgcaacacagaaaagccagtcaccagttagtggcagtctttgcagaggaaagcaaaaagaagaatgaagatcttgatcctcgaattcaagatgaaagaaagttattgaaactaattgaagaattggaagaagtttttcttgacccaggaaatcccacaaagtttgtttacattgggaagaacctggacgagtagttgaaatagcagctaataagtttcctaagggcaaaccaggatcaatttgcctagaaccatggagatatgatagggattgaccctaatattatctgccatcaattaaatgtcgatccaaactaccaagcaaagaggcagaaaaggagacccttggattctgagagacaaggggcactcaaacaggaagtagataagttattagttaatgactttatcgcgaggtgttttacccctcgtggatagtcaatcatgttctcgtcccaaaacttaacaaaacttggagaacttgtattgatttct

SEQ ID NO: 160134 - DNA, 835 bp, Cannabis sativa
atttaaagttttttatggcattccgcatgactttttttccatatttgtaaggttttttttttaaaaaaaaatgtcacatttagggtaattaaatttttatgtcataacatatatatcaaaatatatttttattttcccatatttttgtaaatagccccatatctttttggtcgatttgggcccatatttctcatccttaagaagaaagaaagatcataataattttgggccatgaggggttttggtttgatgtaagctctagtgacaacattattttgagaaagaggagtggtaaggatactttctatctcaccttcttttgcactctctctttaatgtaatgacaaatatcaaattttgagtaaagtttatttttgcttaatatttagttatgatattctaatgttattataattatgccattctaactaaattattttattataatctaattacttcattaattttttatttttacttaactaaaaaatatacatatttagaagaaaaaaataactacattgaaaaaatttaaaaagtacaatacatatatttaaattatacattgattaattgtaagtttttatttttttaaaaaagtaaaaactataataaatttaatgtatacaaaaattaatacaattaaaaaaatcaatgacttaaaagtattattattaatctttttgtactattttatattttattagttcttttattatacagtactagtttttttcggatggatcactctatttttaagttgttttttattcttcttatacaagtaaaaattcactccacttctaatacagtatttttcaattattttttttaa

SEQ ID NO: 160135 - DNA, 548 bp, Cannabis sativa
aacctttttgacgagaaaggggtcgaatcgttataacaccttgatcaaacctttttgacgaagaagggatcaaacaactataatttttgatttaaaacatgcccatcgggaaaggaaaattaaaagttataactcccgtataaaactgaatactaacggttcacgcgagctaggaaagtacaaaacgaggcatcacgataccttgataaaagtacttgaacctaagaaatggatagataatataactatatattcatacaagcaaattaaaaatatacaaagtgatagaatcattaaagtatacttaagtttgcttaaggcagattattactgctatagcgaggcagaattgacaactgccaaaaaatcgaaaaagtttggtagattactaactacttcaacaggaagattacgagcaatggaaaaacccaaaggcactgtacatttgatcaaatgtgaataaaaatgcaagcaaacacaattgtattaagtttgaatgaaaatagtacaaggcatttaagataaaaagaaaacccaagttgggttac

SEQ ID NO: 160136 - DNA, 671 bp, Cannabis sativa
cattttgatttgattgtaccccgagtaagcatccatgaagctaaagatttcatgccctgctgttgcatccacgagctaatcgattcctggaagtagaaaacattctttgaggcatgctttgttgaggtccatgaaattaatacatactcgccatttcttgttcggcatgggtaccaatacgggatttgcaacccaaactgggtagaaagcttcaattatgaaattattgttgcatagcttttatacttcttcttttagggctagtgctcgctctttgtccaatagccttcgcttttgttgaactggtcagaagttgggatcaatatttaggacgtgcgaaatgatagaaggattaattccgaccatatcctcatgtgaccaggcaaaaacttctaggttagctctcagaaattttatcaatgttgattttacttcgagcaacaaaccttttccgatccttagctttttggccgggatatctggatctatctcgatctcttctaattcttccataggtccaacattgctacttgggtccccaagtcgaggatccacattttcatccccgccttgggaagccacctactttgaaatattttttgccttgtctgtgctttggctagaggatacttccttcttagccttggccactataaggttgtaacattccc

SEQ ID NO: 160137 - DNA, 546 bp, Cannabis sativa
atttatttgcttcaaattttactttgacttttttaaaggagccgccatgtaataattattaaaaaaattcaattacaatatattaaattttaagacatagaattacatatatatcattacatatatgctaagggggccaattacaatatactaaagtttaagacttaaaattacatatacataattacatatatgctagggggcatggccaccataaataaccatgtacgtccgcccctacatagaaggatgtgaaaccagtgtgtcaaaatataaagttaatttgtgtgataaatctgacgtggcaatgacacgtgttcgagatcgtattgttcaaaccatgtggacgacttataataatagaaattagttaattatattttaatatttgatgatacattcaaaattaaatttatttttatgagaatatagtgtagactaagagttattttagattaaaaatttatttaagaatttcatgattatatttttaagcagtataatattatacattaagatagaatattgatttatggttttaatatg

SEQ ID NO: 160138 - DNA, 864 bp, Cannabis sativa
  modified_base (462)..(477): a, c, t, g, unknown or other
tagaatctgtcagggattggccaagaccgaaaacagtgactgaagttagaagtttcttgggtctggatggttattatcgtcggtttgtagaagtgttctctaaaatatcaacacccttaactgagctcacaagaaagaatcagcgttatatggatagataagtgtgaatcaagttttctagagctgaagcagaggctaattacaactccagtgttagctctgccttctgacagagaaaagttcgtggtttattgtgatgcatccagataggatctgggttgtgttttgatgcaggctgatagggttattccttatgcctctcgtcaattgaaagattatgaacagtgatacccaactcatgacctagaacttgccgcagtagtgttttctctaaagatttggcggcattatctctatggagagagatgtgaaatttttactgaccataaaagtctcaaatannnnnnnnnnnnnnnngatttgaatatgagacagaggtgttggttagaggtggttaaagattacgattgtgaaatcctttaccatcttgggaaagctaatgtagtggctgatgccctgagcagaaagggtcccgggaaggtagctagcatgattcaaatttcacctcagttagcagaggatatggtcagatcaagcatcgagtttgttgtaggcaaacttcataacttgacgctgcagtcagatttgttagaacgtattaaagttgctgagctaaccgatccagagctaatgaaagtcagatagtggaatgctgttgtttaagactagggtctgtgttcctaatagtatggaacttagaaatgagattcttgaagaggttcatactactccatattccctgca

SEQ ID NO: 160139 - DNA, 804 bp, Cannabis sativa
atccttagactgatggacagttcgaaaggacaattcagatactggaagatatattacgagcctgtgttatggatttcgagggctcttggagtaagcacttaccactgatagagttctcgtataataacaattatcaaagtacaatagggatggctccttatgcattgttatatggcagaaaatgtagatctcccattcactgggatgaaacagaggagaagaaatacttaggtctggaatcagtacaatggactaatgaagtaatagagaagattaaagccagaatgcttgcctctcagagtaggcaaaagagttatgcagatccgaaacgcagaaatgtagagtttcaagtaggggatcatgtgttcctacgggtgtctccaatgaaagggatcaagcattttggaaaaagaggcaagttatgccctagatttacaggaccttttgagattctcgagaaggttggacaagtagcatatcgtttagcttttcctccagctctttcagtagttcacaatgtattccatgttacgaaagtacatctcagaccctactcatatactgagttatgaaaatcttgagctgcaatcagacttgtcatatgaagaacaaccagttcagatcctagacagaaaggataaggtccttcggaacaagaccatagctttggtcaaggtactctagaggaagagcaaggtcaaggaagccacctgggaattagagtccgacatgagggctcaatatctaaagttgtttaggttagatttcagggacgaaatctttttaagggggataattgtaaag

SEQ ID NO: 160140 - DNA, 582 bp, Cannabis sativa
taaaataatttccaacactttagagttagattttttgccactttatttcaactaatgaaactaaaatgtcttttctaattttagtacttttttcacctaattattcaaataaataattatcaaataaaatacaatttaaaaatatttattagttagacctgcaaagtgtacgaattaacaaatgaactattatttctctttttttctcaaaattgtccaaacttggtgaaaattctcaaataagagatagtttattttcaaattctaattgacatattaaatcaattagttaagtctacaagatgatattatctcagacaatgtagagaccatgggcctatgtaattaagctcttaataagcagatcttgaaatttgtcgagtaaattttctaacttattaattccttcttattccattatagatttaaaattacactcataattacatagaatgctctatacaccaagtatagatacgccatcaattatctactatgtcaatcataataattattgatcctctatagacggtttacattgagtagggaccaaattaccattttacccttcaatatatttta

SEQ ID NO: 160141 - DNA, 613 bp, Cannabis sativa
gtgttttataatcacttttattttttaattttaaaaacagaaagcaaaagtgtgttttataatttttatttttattttttgatgttatttaagtcgggtccaagtttgggtctgggactggggccgtggtctgggtccgaagccggggccagagtatgtgtcctaaggtctaggttggagtcaaagtctaaaatattgattaagaaaaaaaatcgtttaaaaaaatttgaaagtgactttttttaattttcattttttttttaaaattttgattcacaattgaaaaattgaaaagtgaaaacagtttttttaaattatgtttttagaaaatatttccatttttctaatttaaaaaacagaaaactgattgaaaaaatgttatcaaatgcatccataataactatatatttttatatatgttttttgtttctaacatttttcactatctcacagaaattcattttattatttttttttttaaaaatacaaacacttattatatttctttttatctttttcacattggtagcccatcacgaaagaactccaaagttaagcgtccttgacctggggcgatttcaggatgggtgacctcttgggaagttttcccagg

SEQ ID NO: 160142 - DNA, 626 bp, Cannabis sativa
  modified_base (568)..(573): a, c, t, g, unknown or other
aataccatatgagcgagttggacagcttggacattcgtgtcagaccatatttacaacaagttggataccataaatggtcaagataccacagcaaaaataataggtattcaactatgacttcaaacattgctgaatctctaaatgcaacaaacttatcagctagagaactaccaatcacaacactgatggagtcattgagagctttgataaaataatgaacataaacaaacaggaaaaaggcacagaaaacaacaacatttttaacacctacagcagagaagatgttagtcaaaaactttgtggactcattgacagaaaatgtaaaatctctttaaactttaagttgcattacagttttttaatagtttattttcagtttcctgtacataatggcaattgataaaattgacctaatttgcaagtaaagccaataaacgagagcatgttcgaagtggtagaactaacaagatcatgggtaatcaatctaaaggagaaaatatgcagttgcaactgattctaacttgataaattaccgtgtgctcatgcgcttgctgtgataaaagagatnnnnnngaatgtttacaactactgttcaggttattacacgacaagaacatggcttgaaa

SEQ ID NO: 160143 - DNA, 663 bp, Cannabis sativa
catattaactcagtatatccaatcgttactactcagtcaaaatcataagacctcacaatacataattcataattatgtctttccattccttatatgggacctcctaagctgacctagtgacttagtttaataacaagttaattattcatttctgataggtattcatttagagcatttcttatttccacccactaacataaactcatcttgataccttgtaaatctttacttgttaacacattctttcctcttacaaatctctggaacgactactaattctacatcctatatgaatctttctagcgtagtttgtcctcactcgtacgctttctgagatgactccccagaagattttccatcttgagattaccccaagttaagtacgcttacctccaaggtaagctcgtggtgggttatcagaaagtagatgcttctttttttgttcctaattgtatttcttgctttcattctttcattaataaaattcaattgccaacactcccttcattaacctcttgcaattcctcatcaatttttttttgttcacttaaacttcaggaattcctatcttattttcaacttgaatcttgttcatttctacttattttaacttgcataaatttctcttgaactggcacaactttaaaatttcccaatcactta

SEQ ID NO: 160144 - DNA, 867 bp, Cannabis sativa
  modified_base (565)..(565): a, c, t, g, unknown or other
  modified_base (646)..(660): a, c, t, g, unknown or other
gccaaatagaaacaaaaattcaatttattggtaactagctatagacttcgtgggaacgttctcttacatgagtattacttgttaaaacaatatgtatacttgcgtattgtatttatcaaaaaaggtttttagcgctgttatcgggaactattttagttaatataaatatagttgaattttattctaatttggtttcttctttttttaaaatttactaatttttactgaatgtgtttgacctacaaggtaaatccaaatgttatatcaagttcaataccttatgaatttcgcccaacaacacaatgagtcatttcattctgctcgaggaaaatttatggagcttgggggagattttatcccactttctcaagtgagtgttttaatctattttttttataacagactttgtaacgcctccacttcaagcctacattgggcccttacacccatagaataatggctcttatacatgagtacgccactctggctgcatcgtggaatgatgactgaccctacagaccaacacaagtatttctagcatgctttttcctcactcgcacgcttnctgggaaaacttcccaagaggtcttcctcctgaaattaccccaggtcaagcacgcttaaccgtagagttctttcgtgatgnnnnnnnnnnnnnnnagatgcaccttgttgatataggtagtaccaatcaattcatttaagccctattcaactgtgtagtcccatacctatgcaatctcagagtcattccacttgaccttccctaggcgatgtgggattgcatagcttactcggtattttcccttacagatcacgtgactactgactgtcacaatcacttcccttacgggatccgatgtcctc

SEQ ID NO: 160145 - DNA, 500 bp, Cannabis sativa
ataaaacaataattaataattatacttaataattgataattaataaaataactcaaaaaaataaattaattcttaaaacattaactaaaataatgattaataactaataattatttaattaataacacaaatattaataaatcaatataaaataaattaatcatacaataataaataaataataataataaattaaagaaaaaataaaaaaaaaaaaattgtcgtagggtccgattggtccgaccatcggaccccaccacggagcatcggactgtattttaaaaaatttaaaaaaaaaataaaaaaattcccaaaaccaatcgggtccgatggaccatcggacccatatggggagcatcggactcgggttccaaaaaataaaaataaaataaaaaaaaagccatcggacccagtgggggtccgaccatcggacccattgatggaccatcggaccatcgggccatcgcccctgccaacaaaatttttccccacatcgggcc

SEQ ID NO: 160146 - DNA, 584 bp, Cannabis sativa
tattttcttaaatgttccccatttaaataccgtggtaccagaaagagttacattttttcatcatacttacacaatttgtatgctccttattcgagaacttcgactacctgatatggtccctcccagttaggtccgagcacaactgccgtactgtctttggtgtttaaaactactcttcttaggaccatatctcccacaaaaaaatttcgatccttcacttgtttgttaaaataccgagttactttttgctaatgggccatcagctttaagtttgttgtggttagcttctcttcaatttcatcaagtgattcggcaaggagtacatgattggcccttgatcgtacgtcaaccttctgtcgggatggtggttcgagttcgacgggcagcatagcttcatatccatatgcaatggcaaatggagtctgtccggttgccgttttctcaaatgtttggtatgaccaaaggacttcagggagttcctctgaccagttgcctttagcatcctcaagtattttccttagtgtatccttcaatgtcttgtttactgcttcaacttgaccatttgcttggggatgcgctactgc

SEQ ID NO: 160147 - DNA, 593 bp, Cannabis sativa
tagttatgtcgtttggactaaccaatgctcccgcaactttcatggatttaatgaatagggtattcaaggatttcctcgatatttgcattattgtgtttatcgacgatatccttgtttattctcaatcgcaagaggagcatgagttacatctccgaatggttctgcaacagcttcgggaacacaagctttatgccgaattcaagaagtgtgaattttggttatctcaggtgtcctttttagggcacattattagcaagtatgggatcaaggaaagatagaatccatcagggattagccaagaccgaaaacagtgacaaaagtcagaagcttcttgggttcgaccggttattatcgtcagtttgtaaaagggttttctaaaatctcaacacccttaaccgagcttaccaaaaagattaagcgttttatatggtcagacaagtgtgaagctagttttcgagagttgaaacagaggttaattacagcaccgatgttagttttgccttctgacaaagaaaagtttgtgatttattctgatgcatccagacagggtttgggatgcgtgctgatgtaagccgatcatgttatcgcttatg

SEQ ID NO: 160148 - DNA, 577 bp, Cannabis sativa
gacacatgatgtggatgtaaccttgctttcatataatataagtcattttcactgttatcttaagtttcctaattttaatgcttttactttcactgctttttatggtgcgcctcatgctcgaaataaattgcactcctggcatttaatagatcgactaggttctaactctaggctccagccttggctcattatgggcgatttcaatgattccctgtccctttctgacaaaatagggggtaatatgtctcgaactccatccacacaattctaatcattcatagacaattacgaacttcaccctctcacgccgttaggaaacctctttacttggactaattgccaaaagcaaccacatcacactcaggaacggattaactggtgcctctctaacgaggcttgggatgccatctttctcgcttcccgtctcaatcacggcgatttttttggctctgatcatcgccctcttattctcaacttgcatcacatgagcgatcctcgcactcctactccacgcttcattttcgataaactttggatgtctgaacctggatttgaggattgcttgcgcgatgcttgg

SEQ ID NO: 160149 - DNA, 593 bp, Cannabis sativa
tcttcaacatattgcgaggcaacaaaaagtttgagtggacaaaagagtgcgaagaggccttttagaacataaaaggcatctagcaacgcctccagttttaacgaatgactggggagaccctgtttctctatttagcaatctcagaagatgcgattagtgcagctatagtgcgagaagtgagcaagcaccaccaacgtatttactatgtaagtaaaagtttactaggggcagaatccagatatccccctctagaaaaactcacgttgtgcctagtccatgtgtctcataaactacgaccatacttacaggctcaccccataaaagtgttaaccgatcagcctttgagacaagttttatcaaaaccagatgcttctggaagattgataaaatggtcgattgagctggggcaattcgacataacataccatcctcgaacatccatcaagggccaagctttagctaacttcttgatagaaggtatagctccaaaagaaattccacctaatcgacgagacgcggaaaactagaaattatatgtggatggtgcatcaaacgaacagggttcaggtgtaggggtaatattaatatcacca

SEQ ID NO: 160150 - DNA, 812 bp, Cannabis sativa
gatataaaacggtttatagcagcgactttaccagtgagactttggacttcttttggcttagtcggtgatcgcatttctactaatgctttgatcttcgcagggcttgccgctattcctcgctgatgaaccatgaatccgaggaacttccctgaaccaactccaaagacgcactttattagatttagccgcattttatatcgtttaagtatttcaaacattgcttgtaaatggttgacatggtcttttgcctgttgagattttacgagcatatcgtcaacatacacttccatggtatccccaagcaaatccgcgaacatcatatttaccaatctctgatacgtcccacctgcatttatcaaaccaaaaggcattactttataacaatatagacctcaatctgtaatgaacgaggtatgtttttgatctggctcatacatcgggatttgattatatcctgagtatgcgtccatgaaactgagaagttcatgacctgcagtggcatcaacaagttggtcaatgctaggaagtggaaagctgtctttgggacaagctttatttaagtctgtaaagtcaacgcatgtgcgccatgagccattaggcttgggcacaagtacaggatttgctaaccaatcggggtagaacgattcccgtatgaagccgcatgctaggaggcagtcgacttcttcttttagcgctcgataccttgcggggtccattttgcaacacttgtatcggacacctggcacttcggggtcaatgttcaagcgatgacacattacctgtggagatattccgaccatatctgaatgttt

SEQ ID NO: 160151 - DNA, 525 bp, Cannabis sativa
  modified_base (198)..(200): a, c, t, g, unknown or other
  modified_base (471)..(472): a, c, t, g, unknown or other
gtgtatatgtagtccgagaccgcctggtcatacagcttcttcccattctccttcttgacctccaaatcgcgagacatctcctcgtttttcgtctgagcgttcttagcctcgagctcgacttgctccttggccttacggagttcctcgagctctttctccttagaagtcgcatcttgtttcagcttcttaatgtcttcnnnaagctgaacgttgtgtctcttcgcgatttcgacctccttggatccagtaacaaaagcctttgagaacatggcgatgaactgcgaggctaactccgcagagcgaggaaacagctcctcagcaagagtcttgtcaatctttgactggaaatggtcgctcacgaacctctcttggagagtcagtatattgcgggcttgaactgctgggtcaatcacgaccttcttccctttctcttaaatgctcttagttggcctcttggaagaatccgcgacnngggtaaccaccacatcgctcttcctcttctgaggaacgacaggggaagttgcc

SEQ ID NO: 160152 - DNA, 713 bp, Cannabis sativa
attatacttttataattaatgtatacatttatcttataattgtatttcagatattctgtaatatattatccattacttttaaggcataaatcccaatagttctgctattttcttgctttcctgtcaccattccaaccactaacttagattcgataaagacgctgcctgcaccacaagatctcgaaccaaggaaggtctcattgtttgcaagagaaagtaggagaagaagaagaggaccaaatatgccactatactcacgtccaagctttgccactagaagaagaagaagaagattttttaattttaaaatataagttagtaatagtacgtggactaacaaaaatttgccacatgtatatttttgtacacagtttcagtccatcttggcacttaacagactaaagtggataaaaaaaattgaaactaaagcaaattgaagtttggagagttttaccctcaaaaattcagtaatgagagttgatcgtgtcaaacttaaaaattttaaaaaaatttagctgcaaatctaaaaatgtaagttttatttttatttattttttaataaatttttaatttcttttgttgaaagtttcctcttcaacttaaaatataaagtctcagctttccttagaaactaccaaccatcaatattttctaaaaataaccctatctcaacaaccctgttttctctcacaagcatagaaatgattatagaa

SEQ ID NO: 160153 - DNA, 642 bp, Cannabis sativa
aactcagatgaagaaatgcgcttgaatttcccagaccatatgtgtcacgacccgagttttatgtcgagacaaatatataatatccataatttaagtggtcaaaagtcaaattttaatccttataagaagataaagcttataaatgatcatttaatttgtattactaaatacttatttatgaattaattcctatatcgatatgaaaatatttgtaacaaaattaggacgattcattaatataaaagaacaataatatcccccacagttaggtagtcaccggatagatagatataataaattaataaaatactaagataatatcacatctatcattactcatttctagctagtacaaaattaatttaagtcatctagatcaccttaaatacaaaatcagttttatgtagaataagactaaactaataacgactttcttcctcaacggtaccatcctcatccactagcattaaactgagttcccagaatgagagaaaatagagggtgagcttataaagcccagtaagaaaacaactaatatacaagcacccttggtttaataaaaattcatgcatagttagttttaaaaaaaataaaatacctcattactattatcaaaatgtataacaaagtagaaaaaccaca

SEQ ID NO: 160154 - DNA, 557 bp, Cannabis sativa
gttggggccaggaccaagtccaagttgcaatcagagtcaaatttatagtaaaaataatataattttacacaacctattaatagaaataaatataatattgtattatacatcactatataatacaataaaattcaacctaacacattactatataatacaataaaatgcaaccttacacattactatacaatacaattcaatgcataatactacgatgtatgaaacgagctcttatattttatattagtacagacagggtcagtcctgagtaataatagacccaagtaatttgttaagtgtgtgtttatctaaagtaaaatgtgagtattattgtgcttctttttataaattttttcaaaaatgctaatttttcaatgcaagaaaaatataatatataaaatttttggaccctgggtttgagtgggtctaggcacgggcctagcccaccttaacctaggaccggacctgagtacagacaaagttaaacattggatcacttagttatttttatatatttgtatccaattagttgatgatataataggatgagatgctaa

SEQ ID NO: 160155 - DNA, 547 bp, Cannabis sativa
gactccatttgccatgacatatggctatgaagtcatgctgcccatagaactcgaaccgtcgtcccacagaagattgacatataaccaagaagttaatcatgcactccttgcagaaccacttgatgaagttgaagaaaaataaaccgcaacaaacttgaaattgatagcccatcaacaaaacgtagctcagtattttaacaaacaagtgagagcacggaaattctttatgggagatatggtcctaagaagagtatttttgaacaccaaagatagtacggcaggtgtgctcggaccaaactgggaaggccatatcaagtggtcgaagttctagaatcaggagcatacaaactgggtaagtatgacgaaaaaatgcaactcgttctagtaccaaggtattggaacggggaacacttaagaaaatactactagtaagagtaccaagtcagatgattatgttaagtatgaaacaaaagagcatttactcttaagtgaattgccttttgggcggaccacgcccaaaggttcagataaaattacaaagtactca

SEQ ID NO: 160156 - DNA, 635 bp, Cannabis sativa
ttacgttcttaactagaacgcagtaccaatgaccatacatgtgtggttttcaaccacttctaagtacttagaacatgattaaacatccatatacaatccattgacaaaacactatttcaccgaaactatcatattctacagtttcaatacaatttattcaaccagtctcactaggtactcaaaccatataaaaagtaagtataaagtataattattttttcttacctcaactccgctgtaattaacttttacgataccttctaggccctatcaacaattagcgaaacccttagaccaccgataaactcaatatatttgtaactcttactatacatcaaattttgcttagaatttgactcataaaatgtttgaattagaaatcctactgttcacaaagtttttagataatcgaaagacctttctaacggtatagagatcatcaaaatcagagttataacctagttatgcatattttatcaaaacagtttctttaaaatcctagagcatgccgatttctgagtacagtccaaaaataaaaatttcaaaaatagttaccccccgatctaagtaacacttccttcataaaaaatgtagctcttttcttaagcttcaaaacgagataaagatcttttaaa

SEQ ID NO: 160157 - DNA, 507 bp, Cannabis sativa
ggaaggtttgcttcttttttaaaccgacgcaaaaaccaaatttatttttttaaaaaaatttctattagcattgggtattttattagtgacaaatgagtaactgacgctaattaataatttagggcgtcgttttcaaaatgacgccctaatgttcttctatactattcacgtcggtcaacccagtgaacagtaacgttgactgacgtgaatagtactttttgtagtagtggttatcagggacacacactcgtgctttgaacaacagcattccactgtcagaaattgaaaagtccttagcttttcctgctaagacatcttctcgaatctttaatatttcaggatcttccaactgtgccaccttaattctttccaacaagtctgacttaagtgtcaaattgtgcaatttctcagtcaccaactcaatattttgcccgagacatattcgaggctaactgaggagaaatcatgatcatattgaatatatgatcaggtccttttcggcttaag

SEQ ID NO: 160158 - DNA, 596 bp, Cannabis sativa
tcagccagacgcgtagttttcttcctacgagccatcattgtatggctgggtacggaatcagaaggactagcacgaagacgaggataaacttcgtgcggaagttgaagcagctcctggtctatttgatgctcgggctcccaagactctcctgggttcatctacaaaagacaacacgcacgatgagtgttggacggagtatcaagcgaaaaaaacaagcaaatatgacgaccaggagtacccaacagattaaagaatgatcacgttcaaagaaaagtctaaactcaagaagtcagaaagtttttcttgagttagggcaaaaaaagttcatgaagcttggagaaagctgagtggaaacgcaatgcagttctaaaataagccttacggctgaagctaatgcaaggacatggaaaagaagagttgtagaagtttcaaaccctaggttttcttacagtgttctttctacagcaaaagaaccttcaaaagcacaagcatgcaaatgaaaaacataaagggaataaaaaacttactcaaagattcaagtgttcggattcaagcaagcctgaaatcgtctgtaaactcttcaacaactttgaagc

SEQ ID NO: 160159 - DNA, 627 bp, Cannabis sativa
ggtgtttggcgtatggaaggaaaaactatcaaagacctcattatcaactccatcaaccttggctatcgccatcttgattgtgctggtaaccttttccttcttcttcttcttctcctactaatacttttcatgtcattttcatttcggttttgcttcctacttctgctaagctttaagtgatgtcaaatttattgtcatttctgctaatattagtaggaactgtaatttttctaccaggttaagtgagcgtttaccaactagaggttcggttgtattccgatttcttctattccggaacacctgttttataatgaccgtgaggtctaacttcttttgactttaatataagtacgcttttattagaaaaaaaaaaaattattgttgcttaaaagattcatcatttgtaagtagatggtattatatacattagtattttattaaattatattatttatcatatttttatgtaataatacattaaattttaatttgtattaaaatattgcgtattaaaagaataaaaaaaaatgtgtattttagttagttacaatatatatttacaattaaaaataatattattaaacataccaaaaatttcttcttcttcttcatgcatatttcaatcat

SEQ ID NO: 160160 - DNA, 729 bp, Cannabis sativa
tgagataaaaggcttatcaggtgatgatggactctcgagtcttgctcagacaatcgcttcacaggatactctgtcttgtttgtaaacttcttcattatcatacttctatgcttttgatgcctttttttctaaccatgttgctttattatgtgcagacatgtctcagaagatgcttgatgctctgcagaagagagttggaggaagtttaagctcatcttctccggccaagaaatctaggcgcagtgaggcgaccctatccaagggaaaggcacaggctggggaggttattgatctttctaaggagctaacttttgccgacccttctgctctaaaagccactaagttcaaagattcccaaggaggaagttcggacaggcctgagcaatcaaagggcggatccgagctggctaagagcggatctcagcagatgcgggcttctacaccacatttaccagtgcatttagaggccaagagaggcaaggagatgctcgctcattacatgaaccggttggttcctgaggtgagtgagcagctggccagcgctgacaatgaatcttccttggaactgctgatgggaggagtcttgacgaaatttactagtatgagtctttcttggtagtttcctttaacccctctttacttggctcaaactctaatgttttttctttgtgtaggctggtctgaagttggcttacacctattcccgagctaaatctgctgcctccaaga

SEQ ID NO: 160161 - DNA, 550 bp, Cannabis sativa
aaggataaaagaagaagtatttaaacagctggagtcccaggctctcttttcggatcttctgggccggtaggagctggaggatctgttgtttgaaccagaggtatatcagcattttggccggaggtagtagcagccacctcagtttcaccataagccacttggggagcgcagaactcgaggtacatgtccttggcttcacccaagtagtcaaagtttgcctgaggattagccttccaaaagtaatagaagagctcgagaccaattgtttccaaggcatgaactttctctcccagcctcgccacctcagccgtaagctcctcctccttagacttcttctcctcttccagctgatgaaggaccgctcgaagggatgttctttcatcttgaaggttgttcacttcggcagataaggtcttgatggtctcttcaattcggtcagaaacctcgagatccttagtcaactcagttattttcttctgggcggtaaaaagcttcttgttgacttcacccagctccatccgaacaactccaagttccaccttggcgtcat

SEQ ID NO: 160162 - DNA, 726 bp, Cannabis sativa
  modified_base (370)..(372): a, c, t, g, unknown or other
ttttaattagggggccatttcaaccaatttttacccgaaaccaatcttcatattcacgtcttagtagtacgaattcattgtgacagtggcaaaaaatatgtcgaaatttgtcgggccacatttcacaaaggggtacgtaccactatcagaattgtgagattttcaccatttcaattaaaatgattgttagtgcatgaaaactaatttttctctcaacatgtccaatagcaaaattgatgcacaacggtcttggcttcatccctatgaaatttcacgacttttggagatgtgtagggtgagattttaacagaaaattaacgagtgtaggagaaaggaaaaaacttgttaaaatttcctctgaaaagaagannnttttcaatttttgaattagggggtcatttcaaccaatttttacccgaaagcaatcttcacattcacgtcttagtagtacgaattcattgtgactagtggcaaaaattatttcgagatcagtttgggccatatttcacaaaggggtaccactatcagtgtttcgagattttcaccgtttcgattaaaattctcgttagtgcatgaaaactaattttctctcaacgtgtccaatagaaaagtgatgcacaaaggtcttggctttgtccccttaaaatttcacgacttttggaaatgtgtagggtgagattttaacagaaaataaacgagtgtaggagtaaggaaaaaacttgttaa

SEQ ID NO: 160163 - DNA, 530 bp, Cannabis sativa
  modified_base (501)..(505): a, c, t, g, unknown or other
aattgggatgaaattaaatattgtgtcatattttatttcattttaaataattaaataataaaatcattaattagggtgaaattaaatgttgtatcagattttactttattttaaataaataaataataaaattattaattgtggtgaaattaaatattttatcagattttactttattttaaataaataaataataaaattattaattgggatgaaattaaatattgtatcaaatttcaaaaaaaaatattatatcagatttactttattttaaataaataaataataaaatcaagatatatatagaaaaggttctaaccctaatttgaaaaacccaattcaaaacaccatctctcagagccgcacatctcaaagtttctatctccttctctcggtcgcacgcaacaatagaggagacgacgatgggctttgcacagggtacgatggaggagactattgggttttatgccctaaataaaactctttacaatctgattagtnnnnnatataagaaatttgaagtgatttat

SEQ ID NO: 160164 - DNA, 694 bp, Cannabis sativa
aatatgtatacataccaaaaaatatatatgataaaatagaaattgtatatcatcttaaataaatgatatactatagacaaaaaaatcatataccatacaacaaaatatataaacatacaatattaaaaaaaatatatataatattttaaaaaaaaaattgtatataccatattaataaaattatatacaactataaaataattataccatacttacaaaattatatatcaccttttttaaaaaaaaaaattgtgtatcacctttatataataaataaaaactaaacatgtatgatctaaaataaaataatatactatacaataaaatttatatatcatataacaaaaaacatataccttacaattgaaatatatataataacaacaaataaaaataaaaatatatagaatgctaataaaattatatatcatgtcaacataagtacaataaaaaataaaacttaaatattatttaaaaaataatatgccattaatcaaaatatatatactaacaataataataataataatatattactaatatatatctatactgtactaaccaaattatatactacggttaaaatatgtataccatgataataaaattatataccaccattgtatataataaaatagaaatgaattaaaataaataatatataatacagttaaaatatataaaaaaataataa

SEQ ID NO: 160165 - DNA, 534 bp, Cannabis sativa
agtaagaggtctcaaatatgtttttgtaagccttagaccagacacgtgctgttgagtgtaagtaatgagtagctccagctgcttgaactcggatgctatttagcgagttgaattagatggttgcacagaagggtggagttagtccaagatgaagatgaagatcaaattttgtttatttttgaattaattgttttagttttagaacaatttggatttcaattattagtttgggattttattccctatttttcatattgttgcagacaattcctttaattttggagaatttgataataaagttttctattttggaaattgcactcatgaattgatcttcatttactttatcttgtgtatgccaataccaattatatttatatattttaatgattgtatgtgtatattttttgattattgactcaaattatattgtatcttcaactcttccaagagttaatactacgtaaacacttcgaatttcatttcaatgtttataaataattgttgattctaaaacaattattaagaatttgt

SEQ ID NO: 160166 - DNA, 531 bp, Cannabis sativa
agttgcaatagggatttctatacgatttattgttgcaatttaggttgcagcgctagttgcaataggagtttcaatgtagaatttcgtaaaaatccaaaaaaaattgttctgaagtgtaaaaataaaaaagccccaaaaatttaaaaatctaatacatataatacaattatatttaaaacttaaaatatcaaatgtatgttctatttttatgttatatttttttttctacatacaatttaaaaaaaaaattaaacatttctttaaacatacatttttttatcatttgaaattgttatttattattttatttattttaatttgttattggagacaaaaaaataaaaatatttatttaattttgttgttagttatgtgaaaaaaaaataatttttatcaatactataattaaatgtttatccaagtgcatttttattgttttttcagatttctaatgatgaatttattcatattaaatcacgaataaacatgtagatagagttacatacatagaaacactgttatgatttttaa

SEQ ID NO: 160167 - DNA, 693 bp, Cannabis sativa
gtgatcgcgtagatcgcccctgtgaacctgatatcgtcctccatgcggtgtctccacaaaacctgacctagtgtacctactgggtgtgcgaccatgcaagaatgaggaggcagattcaacgtcattatctcgcgactggggtttgctgcgaggattgcgtcgttcagggtcttcctcagtctgtgcctcctggttgggatatctcacggatcggtccctcgatgttggttgattcaagtcgagtccttctgggttggcccttcgttccctgcgagtacggttattacgacgtctagagttagttacctgaggattttccatgccagcagtgggtgctcgaggaggacgtcaggccctgttctgtccatccaccttggcctgtagggcgcgtagctggtcttggattcggtgtactgaccggtggtcagttggacaataccctcggacactgccgccagaataaagggtggaaagtgccccgttgtggctgctggtgtagatgtttccccggcatgagggcctgtagtttcagggaataggttgagaggtcttacattaccccgacctactctgccattgatgacatctacaggaggtgctctgcctcctgacagcggaacgttcatcattctgatgttgatggattcgttgttaagacctccgtttgcttggtttctagccattatgattttc

SEQ ID NO: 160168 - DNA, 560 bp, Cannabis sativa
  modified_base (155)..(156): a, c, t, g, unknown or other
taagtaggtcacatggcttgtctatactatcaattaccctagtagctatataagaatgagtagctccagaatcaaagagaacattacaaggcaatccgtaaatagaaatatgacttgagacaacagtgtagcttgtggccgcttctcctctggtnngagcaaacactcgagcaggagcggcttggttctccttcttttgtctctttgggaaatttttcttcagatgtcctaggtgcctgcaattgtagcacacccctgacttcatcttacactccccaagatgtttcctattgcatgtggggaaaattacgaattctacataggaccatttcaccccattgttgttattttggaccactgctttcccctttttatcacgatcattattgtgatttccctcgtgttttttctcttattctcttgatttcctccattgtttcttcgggcttcccacttagcagcattctcattctttatatcattttcaagcaattcaacttcgagagctttttctaacacctcagcataaaccgtgttggtccccaccatgattttcacat

SEQ ID NO: 160169 - DNA, 517 bp, Cannabis sativa
  modified_base (468)..(478): a, c, t, g, unknown or other
tttaattttaaaatgatttttaaataagttttaatgaattttaaaatgaaaaataaaaatttatgatgtggactaataaaagggtgacacatggacacttatctggaagaaaatggaaaggtatctacggaagttccagaagtgtgacggaatgtatttttaccgccaaaaatacgacttgggtatttatctgctactcgggataaaacttaggtatttttgccgcaaattactcaatattattttttctttttgtaaaaactttacatttttatgtttaaaggttttttattatacttttgcggtattttataaaaagaacatgaaaacagcaagaaaattatataagtaatatgaaaataacatttaataactaatatcataacaataataaaaaataatatacagataacaaaaaatcaacaacaaataatctcctactaatgttagtgttgggttttatgcccnnnnnnnnnnncaatttcaatgtaatccattttattcaacatcaataaag

SEQ ID NO: 160170 - DNA, 641 bp, Cannabis sativa
ctcaaagcttgctcatccaacaaattagctatcaaaacctgctcaaatcaccctaaaccaacataataaagctactgaaaacataagccaaaaacatcaacaagtacaacaagcaaaacatcaaaaacatgcataatttactttctttaaaatcaagaaactagaagagagttgcttgagatcttacctagagcttggattcacaaaaatttgccttacttgcttgaaaaactaaagaagaaatgaattcctagctggttcctagggttcacgagagagagaaggttgagagaaagagagcttctttttaaatttcttatttttggaaaatggataaaatgagataaaagaatggttttcttaaatcatttcagctaaataaactttaaaaatcagattactcatcaacataaagtccactaaaggacaaaaatacaaatgggcgaaaagaccattttgccgttccacactaaaagtcataaaatgacacttaggggtattttggaaaattcttaaattctgactattcgcgatattcccaatgtctaaactattgtcccgatatactaaaaatactaagatgtgattctaatagccatacaccgcgttccaatgttgccgggcacaaaatatgtaaaatt

SEQ ID NO: 160171 - DNA, 540 bp, Cannabis sativa
tgccagcataaaatgaaaagcgctagcaaaaatgcacttttcccagcgcgtaaatgtgttggtaaaagttagattttaaccattgtaaatgtacgctggtaaaactttgacttagtaaatgcgtctcaaaataaagtgtaatttagacatgtttggtgtctaaattagtaggggtgtacgtcgattggtttggtcggtttatgctatattttattcaacccaatgtaaaaattagattacaaaaattaagtgcaacccatccaattaagaaaaaagaaattagtaacccgcccaatgaaattggtcggtttggtctggctaacccgtcacaaccgaaaattaatgttttatttttttttacattcaattattatattttagttaatttgtgataataagataaatatatatagattgaatttaaagttcaaatcaactaccataaaaaaccatagtattttgaactttatatttttttttaaatatgtatgtaaattatatgataatgtaaatatatataataaaatacatatatatata

SEQ ID NO: 160172 - DNA, 635 bp, Cannabis sativa
ttagctttatttgggtgatttcaatcataaaagttaatcaaaacacatttaaaaataaattaaaatttagaaaaatatttaaacagaaattaaataaaatcaaacctaggaaaagtagcgtaaaacctaaactatacatttctaatatttataactgatatttgaatttaatttttttcaatctaagattttaagtaacacagccatatttttaggggataaggtgatatatacttattttttttttatctattaattaaaaatactcttaaattatattttatttaaatataccaactttgtgagttacccaaataggtatattttaaggaatataaaaataaaagtaaaataaaaacaaagtaaaatacaatgtaatttcatctaattttagacaccaactaaaaaaaattgatataaatcaagataatattccataaaatgatatttcactaaaaaccgtctggtggctgttatagttagcagtttccgtaatgggccatttagccgaagttagcgcaacccaaggccctaaccctgtctcatttccttacaaagagaggccccaatttgtttttcaaaaatgtcatctttaaatttttaggcacatttatttttggggtaagttgaaaaat

SEQ ID NO: 160173 - DNA, 673 bp, Cannabis sativa
atcaactcagcctcaaaggtgacattggggtcctgaggagtctttgatgtacgtggcttgggaggcataatttcaaaatccaagtcacctggtttaaatgcaatcgtggcgttgggtaaaaacaaaggctttgccacatgaataaaggacacgctggatggttctggccaagctgcttcttacaagaatcggcatttacctttggagatttcttgcaagaaatgcctgtagcgactagcaatatcttcccgttgggttctcactatgttttccctaaccctagcatcgttcaactctaatttggaggtgggttttgaagggttgggtttatacaggatggctaattctgtagggaactcaaactctaaaacttctggacgataaattcctgaaccagagtgggacatcgttgcaagcaagaagcagtcccaatccctggagagaattttatcaaacccaaaggtaatgagttggagatcttaaaacaacctacatatttcctgaaccctagtatgaacctagatacagtttaaatcctaagaactaccaaaacaagatgagataacaacaatacaagcaaactaagtaacaaatccacacaatgtaacaaacatgagaaagaagaaagcaacttacattttaaagttatggcttggggcaatgacttgttact

SEQ ID NO: 160174 - DNA, 589 bp, Cannabis sativa
gtatatatctaaattaccccctttcaatttattatatccaacttatattttaatttaataactaatattaaaaaataatttacaaattaaatatttaaatttaatttttaattataaatatatttaattaaatttaacttttagttataaataaatatctattcttttaagataataacacataagttatactttttaaaatttttttaggtaactcactcaagtacctacaaaaatttaataaaataattcaaatatattacgataaaaaattaaacttaagtatttatatggtcgccatttaaaaaaaattgatgattgaaacttcaattagcaagcttattatttgtaatattattcctgtattagaataccatgttgtgtacacttaatataaaaaaaatgataattatgtagtgatagacatcatgccaaatatctaactcttggttacaaagtttaaagtatttttatattttttttaaattgtatttacaaaaatgaaaagaaaataattttatagctttcaaaatagtgtttagttacttttttttagaaagtcacttttagattttttttttttgaaaaa

SEQ ID NO: 160175 - DNA, 654 bp, Cannabis sativa
agctgacattcaaatgatgttgactactgaagttcaccttgtcatcaagaattgcgattgacagatggagcgttatgtctttaatcacagaaacaacgagatttacaagatcaatctcgaaaagacatggaaaaagctccaactcacagctaggattattgttgttattcaagttcccagcgagatgccccaacgagatacactttgcagcatatctaaatccacgtcagcattgacccagtaaaagcgaataaatcacagttgtatgattttcaaataataaccgcattaatttacgtggtgcgtaattaaggcccacgatttcagggaaatatgattgtaggatttgaatctgattgtaattaactaccaccctatgttactatatataggtgcacaatgtactgaaaaagggacgaaaagtccttgagagaaaagaaccctagtctctatcagaataatctgaataagattgactcgtggactatgcagaattttaactacaaaaccacgtaaaaagctttgtgttattttttcttcttttactttctattatttctgtgcaaaacttatcacgaaataagcttattatcgttaacgaaaatctgcgtcaacagtttggtgctttcattgagagcctacgtgaaaaaagct

SEQ ID NO: 160176 - DNA, 614 bp, Cannabis sativa
catatcaagctttactgccatgtacccttcctttccaagccttttccttttcaagtaatgcattacttcaaaggaaatcatgatgttatcagtgatgagccttccaggaataaaagcactctgattattggaaatgaccagaggaagagcaacttttaaccggttagctaacaccttagagcacactttatacaggacattacataaggcaatcggtctcagatcagacatatgagagggattcttcttcttaggaataagcacaatattagtatgatttaatccctcaggtaaggatccaaacataaaaaaagaacgaacttgcttaatcacatccttacccacaatatgccagcacttttggtaaaaagcaggagtcatcccatcaggacctggggacttatcagggtgcatttgaaagagagcatctttgacttcttcatccgtaattggcgcaagcagagcaacattatgatcttcagaaatcgtaggactaatgccattagtaacattcagggagttgcacgtcccactagaaaagagggtcttgaaataatcagctattacatctggaagaccattgtcccaatcggcccaagtaccatcatctctct

SEQ ID NO: 160177 - DNA, 644 bp, Cannabis sativa
attttctatttaattaaatatcctgaaaataataatttttaagtatcaagaatgaaataaacttaaatatttaatttttaatttaattaagtattaattattaatgggaaattacccgttgtactccttttttaaagttttttccgtttttacattttgtttaaaaaaatttcactaatataattctgatttttcattaatatttctattttatcttttaatattcacttttatgtcttcttcctcagtttatctatttcacctcttgtttttattcttcttcttcctttgaccttagctatgcgatttggtcctattcaaaccaaacaaagactcaaatcaaatcaaattaatttttcaataatcctaacaaagaccattttcaatttggaattttgatttgagatttatgatagataagatggtggcattttaaaataaaaataatgaatgttatattttatgaagcctatggagattgcagaatggagattgcagataaacatagggaaatcaaggaaacaaaagtcagatgtaattgaaattcttacctcattttggatttgacaggagagatttgagtgattgaaacacacattgcaatgatttggggacggattggagagctaagctccgacaacttc

SEQ ID NO: 160178 - DNA, 643 bp, Cannabis sativa
atatcctgtctcttattgatccacatattatttttgttgagaatgcactcaatggcatttcttctccctctaataaaggccgaaagaaagaagaacttagaacccttgtcaccttctttcagccaagagaccctggccctttgtttccactacaggtcattccgaacaagggcctcgttaagggagctccgctgatttttttcagtctcccaatctctagagcccgccgggagcttttgaataagatccagtctcctttccagatatcgaatcagagtgtcaattttttttaattgtgatctgttccaatgtaagagagcgactctagtagccccaattttcttgaagatctgggccggcgcccagtggtaactaacagacttccaagtagagtccaccactagtcgactcctttcgtccctagtccaaacttcctcaaacttaaaactccttcggattttatcctccacacccccagagagcaggcacagaggacggtgatccgaatttgaggtctggtaagactagagagccgcctttgggaaaagactaatccacgctccattcgctagtcctttatccagggccgatttgacgtggttggatccggagcggtggttatcccaggtcagacagtctccct

SEQ ID NO: 160179 - DNA, 580 bp, Cannabis sativa
aattattatattattttatttttcagattaatgtgtttaaagttgtgtaaatatgagatttactattttaaatgggtctatatatgttttggatggatattttgtttattttccattgttgtggaggtgaaacccatttttggatatatgttatatgggtactgtttttattttgtgaaaatatatgaaatggatgttggaaattgagagagtattgaaaatggaacaaaaccccttaagcggcgtcgattttggtgaccggagatggtctatacgaccgggtcacgaaccgggtcgcgccaatccgggttgtagacccacggacccatgtgtgggttttttgggtgatagggacgacagaaaatgacatgtcgtacgcctttcggttcagccctcaccgagaaaaaaacgacgggtcgtttttcctgaccctttggatgtcgttcggggcaaacgacatgtcgtacgataatagttccaaccccctttagcagcgcaaaacgacgggtcgtttcatgacccctgctgcatgtcgttttcaccaaacgacatgtcatttttccaaaatgacatgtcgtac

SEQ ID NO: 160180 - DNA, 612 bp, Cannabis sativa
tgtatcttcagttcttttaattctacaggtgtcattcggtagggtgcttttgaaacaggttctgccccaagaattaggtcaataataaaatctatctcccgctgaggtggtaaccctggtaattcctcaagaagcacgtccaggaattcgttaaccactttaacctcttcaggtccaaagaacacaggtttactagagtcaactacaaccgctaggaatcctacacacccactgcgtaataaatccctagctttcaatgctgagattcttgggacacgtgaaccctaaactaaaccaacgaaaacagatggttcctcattctccgattgaaaagttaccattttccgtttgcagtcaatactagcagagtacttggacaaaaagtccattccaagtataatatcaaactcggccaaaggtaactccacaagatcagtgctcaattccctgccttcaattctaattaaaaccgatctaacccattttcttgaaataattaattccccattaggcaacgtggttccaaatcccatctcaaaaacatcattaggcctaccaagctgattaagaactctctatgatacatatgatcgtgtagcacccgaatcaaat

SEQ ID NO: 160181 - DNA, 553 bp, Cannabis sativa
accctaaataggatcaaatgtaataattacagccgtcattttttgaaaccctcgatgggacaaccaaaggtcaccacctcgtgacatctcttcgcctgcctcttgattatagtttctctcatgacctcatctgtcaatcgcgaaactaggggcatgcgttatagtgagattttctcacctagaaactcgagactggactcctattaaaaatgacgtgtattcactttcctcgaggagacctgagatgtcgatgagagaacccttgagtacgaacctcgcctgaaccagactcagcgagatgatgcgaacatgaccgagtctaactgcattcgtatggctttcataatgtaggaccaaggtacggttttaagctcgcatatactagggtgtatgcgagtatcctcgtgatcctcctacaaaaacatagagatcgattctctattctgtgagttggtcccattgacccaatagccttgataaaccgatacagactcgcatgtcttggttctatcagcttgttataagttgtccatataagcgacttcaagaggac

SEQ ID NO: 160182 - DNA, 568 bp, Cannabis sativa
ttgacttaaacaaatttagacttcctctagtgatttaccgcaaacctttgtaatccaccttgctaatctgatccctaaaacacaccaagtagtgaacttccttcagctattgatgtgtgcttactttctcccgaaataaggcttaaacaaatcttctcccaaagatatatgttcacttccttccgaaatgagtattggaaaagtcttctcccgaagacccacacttgtccaaagcttctcttcaacctattctatgatagtatgagatcataataagaaaaccaaaacctagttgaacactctaggtttttacaaataaaacactcttctcacaaagaaagatatgaaaatatgagactagaagagataaaattgtttgactgctctctaggtcctatttataaaacatagcaatcctagaaacaaccacaaaagtgattttccagcttacaaaactttcttaagaaaattcttgatttacaacattagaattgggttttgcaacagcagatcaggtccagaaaggaaactttccaaattgaaacaacatcacgaatttggacttcaa

SEQ ID NO: 160183 - DNA, 570 bp, Cannabis sativa
gtaagtaatgtcaccagtcatatgcatagaaatagttatgctcatattttgcattgcctaattaggcaagcccgtgtcataatataatatcatatataatgtcattgtaccacctaatcgggtgagcccgtgccacaacttggcactatatcgcatcatatatgcaaacaatctcgtaactacgcccggtacttatcatatgtcactaacgcccgtacctacgcccgatacattgccaggaatattgcatcacctaatcacgtgatacccatacattatgtccattagtatcattacgttatcattgcctaatcagaaaatcaataattttggaacccatcatgccatgtggtacattatatttttcttacctcaatttttgttcaggtatgttggccgacttttttggagaacgatcgatgatcatgggccctatatcataataataataaactatttagtgtttattcgaaaacactagttaatagttgtaaaggacagcttagggtttcccaccgaattccataatacaaatacactaaaatagacttatattttggctctaaaaca

SEQ ID NO: 160184 - DNA, 611 bp, Cannabis sativa
atgcacttttttttttttttttttctcttctctctttaattatatacttattactacatcccttttttatacttttacttttgattaaactacctaaattttcagcaactaaattaagaggtgattatatattgagatgaagacatatttatagagattgaagagaataaattaattaaagcagaacacatttttttatgaggttgagagtgcaaataatcttagttactggattagtattttgcgtaaactttgaatattttgtaatttatttagagttaatttataaataatttgtatgtctgatatcttgttattttcgttgatttatagtggtctttttgttattttataattatttttatgttgttgtttaagtgttctataattgtttttatattatttttaagtgtctttttattgtacagttgtttaatttatgtgcatttttttttattgtatatattttgtttattctagacaattttttgttgtatatatgtacatttattttgttattttttagttgttttaagtggttttcaaaatatttttttactgaacaattattttttagttattttttcatttgtgtattttttataatgtat

SEQ ID NO: 160185 - DNA, 503 bp, Cannabis sativa
ctgaaagcttccttggcctaatatgtagtagcctacacattgacgaacctcaaggagagtatgaaacaaaggatatggacagaatttgtaaccaggaaagtgtctatgttagtgttgctactcggaggcaaggagaaaacgtaccgtaatggaaacttaaggtcgagagaatgacagaagcaccacctacaccacactagatgcatcccgagttagtagtaaaatagtacaatgattaggtaaaggatggatgagtattcagaaagtggcaattggatttgtgatttgacgtcctccatgacagcacgtaagagcggagcattaaaaactaatgaaaacaagacgatccttgtattcctagagaaggtgacctcgatttgagttttagtatattttcaagtgttaggtcaaatacaaaacctttagtgaaccgaatgaagtcatgtaaactagcagaagcatcatccaggaagtagccaaagtgacgtactcgtgtatatgag

SEQ ID NO: 160186 - DNA, 676 bp, Cannabis sativa
tttatttatttttttcgaaaaaatatgtgtgcttagtgatattacattcttgactaattttaatattgtgctttaaaagagcaaaaatcatattaggtaattttctagcaattgaattggttaatgcatgttaattgtgaaatgtggaaagttgtttgaaaaattctaaaacttgcttgcttggtatttgaggcgaaataataaattatgcatgactagaaaagtgatttaggcatttgtttggatcgattgtaccttttaagccatccctataattttatcctagttaccctttttgagccttaacttaatttctttgtttctacacatattgagcctaaataagataaacccatgaatatctaaaaatttaaccctaattataccataagtagatctttattttgggggaaattggatggaaaattgttatatgtgtgtgggaataagtgtgaaaatgtagtgaatgtgaaataaaattgattggcaataactttaaaaagaaaaaaaatctaacaaatgtcaaattttttgggtgacataattggagaagcttatggtataggcaagcataaatgaccattttaactactcgtacctaagcgtaacataacaagcctagaaagatcttttgattcttggttgtgcattgatttatattagtggataatagtaa

SEQ ID NO: 160187 - DNA, 615 bp, Cannabis sativa
tcaatcattgtcggccaaaaataaccttgccctataattttcttggataaactctgtcgggctacgtggttgccaaaaaattcatcatgtacttctgataaaagtcgtgcagcttcttcttgtgtgacacacctaagtaatggcatggaaaatcctctactatgatgtatcgcacagcctttctcctcattttccaagcttcatggttctattgtctaggagttccccagtgttgaggtaggttgttattggcgtcatcctgttcggggatgtatcaatcatttcaacatctttcgtgccggtgatactaggttcttcgagaactggacaggaatcaaatttgctttatcatttacattgcccctcggaagtcgagccaatgcatcagcaattgtgttttcttcccttggaatttgcttgagagcatagcttttgaactgtgcgagtagatcgtgtattttgctcagataaactatcatcttttcctcccgagccttgtactcttctaatacatgatttaccaccagctgtgaatcgctgttgatctcaatgtgctcggccttcatctcctgggctagttttaggccggtgatcaaagcttcatattcgacctca

SEQ ID NO: 160188 - DNA, 509 bp, Cannabis sativa
aattatgaaaattagttattaattgtaaattattaatttatgatgatttatttgaattcagaatacattttatagtcatatatagaaatttcataattttgcatgtttactgtccggaaatattggaacgcggtgtatggcttagttgaatcacatcttagtattttagtatagcgggcgacttagttagacattgggtatgtcgaaaatagtcgggaatttagaatttcccatattatcccttagtgatctttagtggctaatagtatggaagggcaaaattgtcatttttgccaagccttagtttgtctttttgtgagattggggtttagtggtaaatctgatttttagtaatgtttaaggctgatattagttgaattaatcaaaagggtattatctctttttcatgaaaaaaatcaaagtaaaggaaaatctcattttctctctattctctgtcattttcgaaacccatagaaccagctagggttgggtgttcttcagcagctcta

SEQ ID NO: 160189 - DNA, 501 bp, Cannabis sativa
aaatagaaaatcatttccttaattagaaaataatttccataaataaaatattctaatatctttattgttattataatggtatggagcctctgataatatagttttggaggcctagaaagattttagttttctagacataaaaccgtgcctatactttttattgttaagtatgtacaaaatgcatgtaaattattattcagcaaaaaaaaaatgtaactaagttaaggatgttaagttatttattttaaaaattgatttttaatttaattaatgtaaggaactagtttttaatttagttatttcgggaaccgatttttgatttagttaatttaagtaactaatttcttatttaattgatttttgtgtgtaaatttttattttagttactttatgaaataaatttctttgttttaaatttttaactaattgataaatataatcggtttttttatattatatatattttgagttattgcatgttattatttatttttatttatt

SEQ ID NO: 160190 - DNA, 661 bp, Cannabis sativa
  modified_base (476)..(488): a, c, t, g, unknown or other
atccatattctaagtatacggtcaagacatcattattttaaaataataaatttttatttaactatttattttaatctatatattttaataatgaaaattattttatttaagttggtcttaaattaattaaaaattaatttttaactttaatttagttttcaagattaattttaaaaatctatatatatatataatattgtatataatttcaaaattaataaaaaataataaaataaatcctaaaaataactaaatttttaacttaaataatttttaaaaatttaattaaataataaattaagtatcctgaactaatcatcttaatttgaaagatatcccaatttaatttgatctaaaattaattaattttcaacttaaatatattttcaagaatatctgaataactacttttcttgaaaaatctactcaattattaattcttaagttgattcaaaattaattttcaacttaaatannnnnnnnnnnnnaaattcaaataattaagtatctagaaaaatctatttggttataacttctttatttaattaaatatcataaaatacatatagtttatcttcaattaatttcattataataaatgtcttttttttttcaaattaatttcaaaataatctgatgaaaaataaatttcatatatctt

SEQ ID NO: 160191 - DNA, 560 bp, Cannabis sativa
aataaacccccttattacctgtacactgtaaaaccagattattacagagatttacaagacagtaaaaagtatttcctaggtggccttcggcctctaatatacctaggcaaaacacttaagttagttacaaagttttaaccactttgtaactaactctctttttctctgcattccactacaacaggataaataaaccagtagcaacataaaaagaagacaaaacatcacaatagaccagatcaaaaagaccaacacaaaatcagatccatagcagaacaatacaacatcagaatcggttccagagagaaaatggccagagattgagtttggaggagtaaaccttgtaacccttggactagggtttcgatatccaactcaaggggagaattgttcatgcaacaaaggaaagaaaagctactgtcagtttcaatctcagagagaaatagagaaaaagagagagtattaaaacactgtaaaatcttagggattaccaaaataatacctgtgtgttttggaatcccaccattgtaatctcttgatcattaaagatccatagtgaa

SEQ ID NO: 160192 - DNA, 679 bp, Cannabis sativa
  modified_base (27)..(27): a, c, t, g, unknown or other
  modified_base (649)..(652): a, c, t, g, unknown or other
cggtctcggcattcctgctgaaccgcncatgagatccataaaggctgccaaagcatttgttaacccaaatgacataactaggaactcataatgatcgtacctaatacgaaaggctatcttcgaaatatcctcttctcggattctcaattgatgatatccagacctcaagtcaattttagagaataccgtcttgccttgaagctaatcaaacagatcatcaattctaggcaaaggatatttgtttttaatggttaacttattcagctcccgataatcaatacgcatccgaagagttccatctttcttccttacaaacagaaccgaagctccccaaagtgacacacttggtcgggtgaaccctaaatccagcattccttgaagttgtatctttagttcttttagttctgcaggtgccattcgataaggtgcttttgaaacaggttctgcaccaggtattagatcaataataaaatctatctcacgttgaggtggcaaccctggtaattcctcaggaaacacgtccagaaattccttaaccactttgacctcttcaggtccaagtaacccaggtttactggaattaactacaaccactaggaatcctacacatccactgcgtaataaatccctagctttcaacgctgagatnnnngggacacgagaaccttgaactgaacca

SEQ ID NO: 160193 - DNA, 575 bp, Cannabis sativa
atattatgaaaattacttaattaagttggttcaaaattaatttaattaattttcaactcaaaattaattttctataaatatatataacagaattgaaattgaaatctaatgtttgtaaaaatatatttttcaaatctcattaaattaaaataaaataaaactagaaaaataattttaatttatgttggtctaaaattaaataaattaattttcaacataaagataactttcctatttaattaaatcttttaagaaaaatatcaaatatttaagtgtctagaataaaattaacttaaatattaattttttatttaattaaatagatctagaaaaataacaaaagtctacctagaaaaaatctatcttgataattcataaactaattacttaatttctaattaaaatataatatatttagtctatttatttaaattaataattaatgaaatttatttgatttaagttgatctaaaattaattttcaaaatcaaaaaatttcgaaatatctacatttaaaataaatgcatttcgaaattaatgtgggaaatgattcttgaaataaaataaaatatatt

SEQ ID NO: 160194 - DNA, 731 bp, Cannabis sativa
gtcttccaaataaatccttcacacgtaaggagtagtgtgggatactaggataaagtttataataatttgttcttgataaattctcaacacatgagcaagaactatctaagaaagaaaaatagttttcctttcatctctgtgtattttgaaaagtatagtgtgtaaagcttcttctgatttctcaaatcaggcttcgatttatagtagttaattcttaattaattaaatcatattatttaactaaataactataaccaaatttgataattgatatttttgatgagggaatctctcaaccacttgagaaaatatctcaactactttaagggaatatctcaaccaacttaaaatatcttcgaccacttttcaaattcaaatatttatctaattgaattaattaaatatttaatcaactcaaagacaaaaccaatagggacactctactatagggtaggcacctaccttgtctgattaaggcaaggatggtgtcttttgtcttaacaatttttgtcttaattttttttcttagcaacttttgtctttctccctagttaattaagtttaacaattatttatttattacaaaaaataaataattaccattttgccaattcaaaatatatttttccaaacaacattacacaactttttatccccgacagtgtttcaaggtggcaattcgagggccatggacctatacttctaaactctaataaactagattatttatt

SEQ ID NO: 160195 - DNA, 503 bp, Cannabis sativa
taaaaactataataaatttaatgtatacaaaagttaatataattaaaaaaaaattcattgagttaaaactattattattaatctgtttgtactattttatattttattaattcttttattatatagtactatttttttttttcagattgatcactctatttttaagttgtttttctttttttttatacaagtgaaaattcactccacttctaatacagtaattttcaaatattttttttatttaatatagcataaaatgaggttcaataaattaatatactattgttaaaaaaaaaattaatatactaagtaaacgatgtattttttttttttaaaaaaaaggtcaatgatagaaaaaaaaaattattattgtagctcaatttttttttttaattcgctatacttttttacagtaaaatatttatagataaatatttgaactattatttatcttatatgtatacctatttttactatatataaaattataataagaaaatatt

SEQ ID NO: 160196 - DNA, 535 bp, Cannabis sativa
ttttattgagggcacaaaacccaacagtgtctgccaggatgtaagctagtcggcgaagtgcctgccagggtcaaggctacacattaagtgcctaccagctttgacaagtgttggtcaggctttgcatgtattggccagtctcagtaggtgttgaccagcctttatacaactttccttaaaaggtcaggcttccttggtcgaataggccctttttggtctgacaaccgccctgtggccggccagcttatgctcaaatcctgaccaaccagcttgtgttcaaaccctggccggccatacaagcttctcctggccagcctatgtactccccttggtcggccagacatggctgtgtagcttcttgatgacttgcttaactcttttcacatgttgcttaacaatgttgccatgccttgtaaggagactttgttctgctattgacaaggttgtattccacgtaaccttagtcttgacttatgtggacatgctgttgggttttatgccctaaataaaactcatttcaaagatcggaagagcg

SEQ ID NO: 160197 - DNA, 532 bp, Cannabis sativa
  modified_base (502)..(502): a, c, t, g, unknown or other
taccaagacctgaaagccatgttctggtggctaggcatgagaaatgacattgctgagtatgttgctaagtgtcttacctgtcagcaagtaaaggctgaacatcagaggtctgcaaggctgttgcagccattgaacattcctgagtggaaatgggaagatatttctatggacttcgtggtaggtttgcctagaaccacgagacagtttgactctgtgtgggtcatagtggacaagtttacaaaatcagcgcatttcctacctgttcggacgaacttctccattgatcagtatgctgaattatatgctagagaaattgttcgtcttcatggtgtcccaaagtccattattttggatagggattcaaaatttacatcaagatttttggagagtctacatcgagctatgggtactcagtttaagttcagcatagcatttcatcctcaaacggatggaaaatttgagaaattattaagttcagcatacaatcgttttaaagtccaantttcttgcaagtaaatcaattaccatggct

SEQ ID NO: 160198 - DNA, 533 bp, Cannabis sativa
  modified_base (388)..(397): a, c, t, g, unknown or other
ttaaaattagaaaaataaaaatattttttaaaataatattctataaaattattttttcttttcaaatttttaattaaaattttaaattttaaaaataataacaaaattattttaatatttttttaaacagttttttttaatcaatgtgttagactacgaccccaacttagaccttgaaaaccaaacttgaccccaatctcagacttggacccccccagtcccgacctcggactcgattccagacccgacttaaataaaatcaataaataaataaaaaaaaattttacagaacacacttttgttgtttgtttttaaaattgaaaaataaaagtgattatagaacatatttttgtttttcaaaattaaaattttaaaaacaaaaattttnnnnnnnnnnttgtgattaaaaaatttaaaaaaagtgttactaaacgccaactaagagtacgtttggtaacacttttttaatcagtttttttatttttttaactagaaaagtaaaaatattttccaaaaatatattctataaaact

SEQ ID NO: 160199 - DNA, 581 bp, Cannabis sativa
  modified_base (229)..(230): a, c, t, g, unknown or other
aaaataatttatattaataattaggagcgaacccacattgtagcaagtgagggcaataaaaaaatatcagaaaaaaatgtatatatattttctttagttacaccatatatttgtaataaaatattatatttataaacataataataggcttggtgtaatggttaagataagttacatatttgttagaggtaaaggttcaaatcccactaacaatatatatatatatatnnatatatatatttttttttaagtttacttttcctcttatttaaaaaaaaaaaaaattagagcccctcactttaaattctgagtctgccattattaataataagttaataagttaacttattattaaaaaataattataaatattaaaaaataataataataacaaactattaatatataataataagtaatttaatttgtacagaaaactaatgtacaattgtacataacactaaaaaaagaatgatgtacctatcatttaataaaaatgttcataatcttccttttaggaaaaattatgaaattaattattacatataaatttctaacacactttttcaaaaaaaaaaaaa

SEQ ID NO: 160200 - DNA, 516 bp, Cannabis sativa
  modified_base (253)..(253): a, c, t, g, unknown or other
cttgcattttatgtgtatttttttctgtaatttctaaatttgcattttacttaaaaaaaaaaaacaaacaaacaaaaccttagtaccaatatccaagtttaggtagtacccatatgaaatgttttttttaatacatataaatatatttcaagttagtttaaaataaaatttttgggtgaaattttagaacatggtgttagatagcaccatatgactctttgaaaaaaatcatagaaatttttctttaagtaancatataaaaaaaatgtgtgttttattattttatgtgatttattttatctttgaataaatagaaattatttgtgaactagttatgtaagtatgggcattttttttttaaaatagtgatatcttatataagtttatcttctttaagagattcttaaaaacaaacaagaaccattaggaaataatgtctccaagaagatcagttcgaatcaacggcaatagaaacatccacgtggatgcagctccagcacccgcaaggggcggagg

SEQ ID NO: 160201 - DNA, 596 bp, Cannabis sativa
aaaactgggcaccccttggggccccaacctaagttccaaacttggacattatatacacttctaatgaagtgtttctatcctatgcgagactccatttacttacacacttcatttttttttataagatttcacaaaattccaacaatcccccactttaaattttttaaaaaatgttttctcaagcagtatcctaagcaataagattgagcataaacagatatatctttcaatttgaacctttgcgttgtgaatgcaacttagaatatactagagtgactcgtagtcttgaactctatctctaatgatgtaccacacacaacttttcttgggtgtagtccaaaagctcgtgctttaatggccatgcacgtctatcccagtgtagtgagtgctctagaaatttgcacaaatttcataagaagcggccccacttctacattcacgttggtgagtctatcaagcgtactcctgtagctcggtacttcactctacatagattatagttctcattaagagtttctattatctcaaccttatatcgcttcaggaattcatgctttacatagcatgatctcattctttatcacatcataacttgt

SEQ ID NO: 160202 - DNA, 506 bp, Cannabis sativa
ctaatttatttgtgcattttataatctaaaaataccacaaaatataaaaataaaattacaatcttattagatagatatcgccccaatttacatagcatcattattacatagatatggatttttttttcaaaacatagaagagcttgagtacatgcatatcaaaaacttccatactacatatatagtacaaatatatagacacacttaaatataaaaaaaccacttccaaataaaattctgtatatttatatatatatacataaattaactaatcttgaatttgcttttctcttgaatgtgttgaattaaatttcgatcaatattttatacctacatgcaaaaattacaatttttattaaaatatatttatatttatgagtagaacgataaatatatattaagtgtaaaaataatataaaagtaaagacaattcaaaaatagcaagactaacaaatatatatatatatgtatttatatatactaaccttgtgtttatcttggagttc

SEQ ID NO: 160203 - DNA, 517 bp, Cannabis sativa
  modified_base (131)..(132): a, c, t, g, unknown or other
ctaaagagttgttcatcagaaaattgctcatttatctgtacctctttcgtattctggctctcttccagctctagtcttgacaggtgatctgctaccaggtttttagtgccctttttgtcctttatctctanntcaaactcttgaagtagaagtacccactgaatcaatcttggctttgcatccttcttggtcataaggtatttgattgctgagtgatctgtatagaaaataaccttattcccaattagatagggtcggaacttatcacaagcaaaaacaattgccagcatctctttctctgtagtggcataatttagttgagcatcattcagggttctgctagcatagtagattgtgtaaacaccctgtcaaccctttgacccaagacagctccgattacataatcacttgcatcgcacatcaactcgaaaggcaactcccaatttggtgaagtgactattggtgctgaaatcaattttagaacctggaatgcctttaaacaatcttctccaaactc

SEQ ID NO: 160204 - DNA, 570 bp, Cannabis sativa
  modified_base (536)..(542): a, c, t, g, unknown or other
ctccttggttctctgcaataagattaggaagtactttcctcaatctattgcagattaccttggttgccactttatacaccacattgcaacatgatattgatctgaagtccaccacacttttagggcaagaggttttgggaattagtgtaatagtagtagtgtttatctcttttaaaatcttcccaaagtttaaaaaagagataacttcttctactaagtcagatctcaccaagtcccaattatcttggaagaaagcacttccatagccatctggtcgagtttctttatccttgtcaatagagaaaatacctaattccacttcctttgctgtgtactctgctaataggatctccttatgacaatctgtgattttaggcccaagatccacaactgattgaaataccttccttcttattggtgttttcgatcctaatagcctctgataatactcaaggaaatctggacatagaagtgaaacgacttcgagcttagcttaatagagataaatgaaagagcgctcattttagtgattatannnnnnnactaaaatatcatttataggtaactaag

SEQ ID NO: 160205 - DNA, 580 bp, Cannabis sativa
gataatatatctaaacaaataaaatgaaataaaataaagttaactaaataaataaacttaaaaaaaattattgttttttttactagaaaaaaaaggaaaaaaaggaattttttttttgtttgtatatatactgaaaggaacggaaacaaacttggaaagaaagagaaaaaaaaaataactacactaagctatgtatctttaaaagagaaaacgaaaaaaaaaaatattgtacagaattaataaaacaaagttactaatttgctacttttataattttttttacaaataaaactaaactactataataataataataataataataaactctactaacctcttgtagcgcagaaacctccccggtaacggtgtcaaaaattgatgtcgtccaattagttacactgcggtcgtggtagtaaacgggctatgttgtatccatagggaggcaaattaccactaaagattagtttagcaagtacaaaatgatagaaattggaatgaactaaaaataataaaatgatgaaatgagaaagttgatcagataaagagtttggtaaggtagaaatgtagttatgtaaat

SEQ ID NO: 160206 - DNA, 515 bp, Cannabis sativa
ttacccgaatcccaagttaagatctggatcactgtcacgggtctcggtctggttctggctcgggtcgcaggtaccatttcaaagtttgggttcgagatcaagaatgggatgcggttctaggtcccgacactggttttgtgtccctagtctggttccatgtttaggtttgagttcaggttcgggttcggctccccaaaccaggtttgggttgggattcaggtccgtctcccaattcgagtctaggtcttattttgagtccgggtcctcgtccggttacggctctggatctaggtccaatttaagttatgattctaagtccaagtcctggttccaatcccagtcaacttccggttttggttccaattttgtgtcacagggtacgggttcgggtccacgtttaggtttaggactgggttcacgtctcggtgtgggctgaggtccttgttagggttatttatgagtttgggttccggatcgagactggggtgcgggtctaggtcccaaccctggttctg

SEQ ID NO: 160207 - DNA, 505 bp, Cannabis sativa
tagggagacaatgatcatcaagagttctactacaacttcaattacctacttccaaatcacccccaaagccattaagtctcttccccataaaatgcttctccaagagtaagaagggttatgaccagggacaacctcaaggatataaaaatgaggaaaataacgagctttaagaaccaaactgggattttttaaggattcgccaagcctgctaagccaccatggcttcattgaaatgaacaagagaacaaaatcccagaccaccacgaaattttgattgacaaagaaccttccaggatttccaatgaatttttctagacaccctagtggaaccccatcagaatttggccatcctaccttcaatacccttacaaatcttaatgggtaacctgaaagaatccatagcataagctgggatagcttgaatcacaactttcaaaagaacctctttaccagccctagaaaaatacttggaagaccaagatctaagaacagaagcaaccttatc

SEQ ID NO: 160208 - DNA, 610 bp, Cannabis sativa
gcttttaggtcaaattttgaaaaaatatgggctttggataaactggcaaacaatgaattcttatttggtattgggaatttatcatctgctaagaactcattcaggggcttgtaatttatgaccaacctttgctttcctcgagcttgctctgatcgattattgacataaaatgcatgacatgcccatggagaggaagttgactctattaaaccctgttgctctagctctttgcactcattggacgccatatgttggtgttctggattcatgcctgggtgactagcctttgtagggttgatatcttcattaagcttaaaaggaaggcttatgaagaactgttgatttttccaaagaggatggtcacatttcttcaggaattctgcatgattattggcacatgaaacttcatgagctctttccttatctgatgaaatgggtcatggggcattaagaaatagtttggtattgtttcccatggagcaaaatatcatttgtaaccaagtccactagggaaaatacgcaaacccttcttctttgtataaagatcgaatccaacaattaagtcttttctaggcaattttgatccaatgactctgtgagtaacagaaca

SEQ ID NO: 160209 - DNA, 555 bp, Cannabis sativa
ttgggcatgagtacgggatttgcttaccagtttgggtagaacgactcccttatgaagccgcatgccaaaaggcggtctacttcctccttcagcgcttggtacctcacaaggtccattttgcagcgcttttgttggacaccttgcactttgaggtcaattttcaatcggtgacacatgacctacgtagatattccgaccatgtctgaatgtttccaggcaaaaacatcaaggtttttcttgagaaaagtgacaagcttttctcgctgttgaaaagttagtttatagtcaattttcaaaactttattattgtctattgttacaataggtacctcgatagtgtccttcgcaacctgggcggttgtggcgtagttgaggatcctaggatccaaatctggttcgtctttatgtggtatttcttctattctgaatacctcctgacgaggaggcggtccctctagcaagtaaatgacattaactgacttcttttctgcaagttttactgctgtgttgtagcgttctcgcaagtctgattggactcctcgcatagatcctact

SEQ ID NO: 160210 - DNA, 588 bp, Cannabis sativa
tttcctggtgaaatctgtgggcaccagatcaccagtaaacttggacagccgatcaaactctagagtgtactcatccatagacattttcccctgagttagcttcacaaaatcttccatatgtgaagtcctcacagcaatattataaaatttttcttcaaacagattcttaaattcatcccaagtcattacattgatgtcacgagtctgtctcacaatatcccaccagacaagggcatgatcttgtaacatgaaagctgcacaattcattctctctgttcccgtcactaccatattatccaggatacggtaattgtactcatccactgctaagctttaattatgtcagtacctcccataaaaatcggaggttgcaacttcataaactgttcaaacacagaatctctatgcggcatcataaacccctggttacccaccactggcacaagcgttggtggtaacacttgctcaacaggggcagccaatgccggcttccttaatcgacgcaactcttcctcttgacgaagtatgatacctcgcatttcatggaacatctgttgccagtaagtaggaggattagcattgccaacc

SEQ ID NO: 160211 - DNA, 740 bp, Cannabis sativa
acgttgtgaactgctgaaagatctagaggcaaagctaatcgatatgccacttgtccaaccttctcaaaaatctcgaaaggtcctgtaaatctagggcataactttcctgtttttccaaaactcttgatccccttcattggagacactcgttggaacacatgatcccctacttgaaactccacatttctgcgtttcagatctccataactcttttgcctgctctgagaggcaagcattctggctttaattatctcaaatgcttcattagtccgttgaactaatttcagacccaagtatttcttctcccctatttcatcccaatgaacgggagatctaccctttctgccatataagaattcatagggagccattcctattgtactctgataactattattgtatgagaactctatcaatggtaggttcttactccaggagccctcgaaatccataacacaagctggtaagaaatcttccagtatctgaattgtccttttggactgtccatcagtccgaggatggaaagttgtgctgaatttcagtttagtacccatagcccattgcaaactctgccagaatttagaggtaagcttcagatctctatctgaaactatggactttggtacaccatgcaaacttattatctctttaacgtataaatttgcatactgatctactgaaaaggttgtcttaactggtagaaaatgtgcagactttgtgaatcggtctaccacaaccca

SEQ ID NO: 160212 - DNA, 507 bp, Cannabis sativa
  modified_base (263)..(264): a, c, t, g, unknown or other
tttaaacaattttttttcttaattaatcttttggattacgaccagacccggacccaaattccctctccacggccctagcgctgaaccctacttctgacttgaactcaaatccgaccccggacatagacccgacttaaataaaatcaaaaaataaaaataaaaaagaactttacagaacacacttttattttctgtatttaaaattaaaaaataaaaatagttacggaacgcatttttatttttcaaaaataatttttttaaanntaaaaattttacttttattttttaattaaaaaattaaaaaacaaaagtgttactgaacagcacctgctaattacaagtttatattaattatatatatatatatatatatatatatagatgttgaaaatataaaaagataaccatgttttaatttattataaagagaatggcgtatgattatgctagcagaggagctcgtctagcactagtggccagaagagaaggcagactccagtcagtggc

SEQ ID NO: 160213 - DNA, 595 bp, Cannabis sativa
  modified_base (77)..(77): a, c, t, g, unknown or other
ggaagactcttcaaatgatgacgccccatctgtgcttgttcgggcagatgctcctgccagcgtgcagagtatttcancttgcatttatttttcttaattttcatgcctctgtatatttcataacttcttctaactgtatcgtttttagtccatgcagaaatatctcagaagatgattgaggcactgaagaagagagtgggggaactcgggcttatcccctccggccaagaagtctaagggcagtgagactctgtccaaagagaaagcaccagctggtgaggtcattgatctttctaaagaacaaactgtcgtggaccctcttaccttgaaagtcactaagtccaaaggttcccgatgagggagttcggacgacctgagcaggcaaaaggtggatctgagctgatcagaagcgggtctgaacaagtgattaatagtgaaaaatatacatttaataagcttaaaggataaaataaattaaatataaattaatgttttcataaaattaataagatttatttttatgttgaaaatatttaatttagatttaatttattgttttttttattgtgggaattagggctcttcatccgatcca

SEQ ID NO: 160214 - DNA, 511 bp, Cannabis sativa
gccattcgaagcaccacgattgtttgagtttgagcctctactgggcatagtacctcgtccctgtgattgacccctgccaggattgttgctgcgattgaatccagaggtatttttgttaaattgggcataatttgcttgcactgtatcaagattcgttgaatggagttgttcaatgcgcatttcttggttctacagcatgtattgaacttcttgtaaggtaagtgcatcggccctagcagtcattaataccaccacagtttcgtactcgggaccaactcctccaagaatatacatagccaatttttgatccgagagtttgtgaccagctgcagcaagggaatcagcaagatttttcattttcaaaatgtactcatcgatgctcatagagcctttctttgtagtctgtattgagagacgaagttgcagttgtcttgctttggattgagtggcaaagaggctctcgaaaacattccaaatctcagcagcggattcacaatgaagaacatgcccc

SEQ ID NO: 160215 - DNA, 710 bp, Cannabis sativa
tagtgggggtgatgcagctggtagtggggttgatgcatctcctggggcctccggtgctggagttgtcgttgacgtatgatgcaacatgcttattatagttttgagctgctccataatcaggttttgaccagccttcagctctatatggctattctcattgccatcttcagcttagcatgacaagcgtacatacccttctggtcagcctcgatcctttccaacctccccactaattccctgtagtcggcaggaccaaggcctgttgaagatggtgcactgggctcagggtctgaagcagtggcctaagaaaatatatcccaaaaaaatacggtaagcatgcggttttatcacaaatcaattacatagatatcaacagtgtaacaaataaggtacataggcatcgacatcatgtcgacatgacattgacaaaatataaaatgacataagctactgcaagttatcgacaatatatcgacatgatgtcgacattctatcgataaaatcacacaacaaaataaaaaacaatcacacaacaaaagttcaaaaaaatggtacctgagtctctagtacatgagccagagtgtcttgtacctagcatttattacaagtatttatcttaaataattactctaaacataagagaaactcatacccgtctagaaaataatgcattgaggtctttcttccctatatcacccttgctcgtccag

SEQ ID NO: 160216 - DNA, 503 bp, Cannabis sativa
aaatagaaaatcatttccttaattagaaaataatttccataaataatatattctaataactctttgattgatcaccataattttgtaaaaaaaaagtcttatatacaatataattgatttagttaagtagaaccatcttactgaaaaaagccctaagtagagatatttgaaccgaatttagaattatttaattgatatattttttaaattgaataaaaaattaagaaaataagagaactaaggagagaataaatagacatattagaataaattttaaaatatcacgtcaccacttcgtgtctcagctttatatatatagaatcaatttatgtattttttaaattgaataaaaaattaagaaaatgagaatattaatgagagaataaataaagatattttaagcaattttaaaaaaccacatgaccacctcatgtcttatctttatatatatggaggatgttccaatggttacatttttattgtaaccatcatggttgcatttt

SEQ ID NO: 160217 - DNA, 565 bp, Cannabis sativa
tggtatcactaaggtaaagaagataacctgaattactttaggtgacatggtaatgatggagagtactttataattgaatgggtagtcaatgtggtttataaggagaccattgaaattctaggaaaggattactttgttaagcaattatggaaaggcatactcacccagaatggggaaaagcttatgaattgaaatgaaatttaatggatatgtatttgagtgattggtgaatgttggatcacaaagtaggttgtttattaaacaacaagctatataattaagtgtaaaataagttttagagtggttaaataagtatgaagatagtgatgattgcaagaaagtaatggtagcgtagggagtgaaacattagtggtaagatagtgatgaatcaacatcatcaatgggagactcgctataagttggtatggtaatttgtaccaatgtgttatcaatataacggagaatatacttgaggtatgtatatttctaggtgtgttgaaaagataatcaatatctctaccaaacacagaaaaaaaatttcaggatcacggaatgatctttgatt

SEQ ID NO: 160218 - DNA, 814 bp, Cannabis sativa
aaaatattaaatatttaagtgtcttgaataaaatcaacttaaatattaattatctatttaattaaatataactagaaaaataccacaagcataccgaaaataactatctagatatttccttaactaattacttattttctaaatataatatattttagtctatttattttaatcaatcattagtgaaaaatttacttaatttaaattgatctgtattgaacaatgcatttcgaaattttactttaatctatttttcaaaaaaaaaaaaatcaaaattatctgtattgaacaatgcatttcgaaattttagtggaaaatgattaacaacataaaataaaataaaatatatttttaaaattattctaattttagttgttctgaaataaaaaatttcaaacctaaatataattttctatctaattaaatatctttgaaaataactaatatttaaatgtttagaataaaatcaacttaaatatttaatcttctatttaattaagtgtatattatataaaagaatcaaataattaagtatctagaatagaatcaacttaattattaattctaatttaatatcaaaaaactattctaatttaagttgatctaaaatgaataaaaattaattttcaacttaaatatatttttataatcaattttagaaaatataattagttactagaaacaactatctataatatatctcattaaactaagtgttttctaaaatttattttaaaataccctaatgaaaagtaaattttatatatttcaaaactaattatgttgctaattcaattttaattaggttagacta

SEQ ID NO: 160219 - DNA, 763 bp, Cannabis sativa
  modified_base (57)..(66): a, c, t, g, unknown or other
cctattgttataaaagtttaaattttgcgcccttttgattagtaatcccgtttaggnnnnnnnnnnttcataagtattttgggtagcgtgcctaattgtttagggcgttacaccatacatggaagcttgagggtcactaaaggttttttggtagtaatgaaaggtgaaaagatcaatggtttatatgttctccaaagagaaattgtcccagttggagaggcaagtatggtgaaagggttagaatcgaatatgaaattgtggcatcacaggcttggacatatcagtgaataaggcctcaaagaactacacaaataaggtatcattaaaaatttaaattcttgtaccttaccattttgtgaagcttgtgttttaggaaaataacataagcagaagttcactttggcaaggcacacaactaaaaagatactcgaatatgtgcacgttgatctttggagaccatacaaggtgcctactcacttcggtaagcaatactttctttcaatagttgatgattatagtcagtgtgtttggacctacttgttaactactaaggatgagtgtctggaacagttagagattggaaaaccaaaccgaccttaaaattaagaaccttaggattgataatgggttggagttattgtggtaattgcaacacgcaagtatatgtattgtttgaacaagtattactcacaaagagtgaggttgatcctacgtacgaagattgtagttaagtacgttaaaattaaattcttacttctatttg

SEQ ID NO: 160220 - DNA, 690 bp, Cannabis sativa
  modified_base (93)..(99): a, c, t, g, unknown or other
gatcataaagcgtaatttattaattatggagattatattgggatatgtgtgtatcgaagatactatttttgaaataaaaatattttatcgggnnnnnnnactgtggaaatttagcattatggtaagaaatatcacgacattgatggaagaattattttgagggtattttggactaggttagaatttttacaatgtcggtttaatggattagttaaattaccaaaatgcccctaggttatttttagaatttaagtttcttagagggtaagttggtcattatttaggataggtatttatattattatgggctgaattttaaaaaaataaaataaaaataaagcaataataaaaataagaaaaagaaatatttacgggaatagcttccaaggcaagaaaccaaacttcctcttctcctcttctccttcgtgcaagccaaaaccaacccaccttgaggattttttcttcagcttctaccctcatttcagagctagttcttgtcccaagtcaacctagaagagcttgaaggtaggttcttaacctttttgaattgaaaacattagtttttgagttggttttcatgtagggttttataattctgtggctgtgtgagttaaaccaggtttgcggtatatttagggtagtttttgagcatgttaggaatggttttaagtggtttctatggctgcttga

SEQ ID NO: 160221 - DNA, 703 bp, Cannabis sativa
gaaaagttttgtggagttaaagcagcgcttgattactgctccagtgctaactcttccttctgataaggaaaagttttggtttattgtgatgcctcgagacagggccaaagttttggtttataaataacataaaataactcaaaccagttataattaaaatagagcggttctataacaatattataatgaataaaaacaaataacacgaaagaactcaaacttgttatgactaaaatagaactggttatataacataatgaatacaaacaagtaatacgcaataacttaaaccgattacaattaaaaacaaagaagaaatcaattcctaaaataatgaaacataaattaaagacaaaactagtttcataataaaatacttcataacacataatacctcataaaaacggttataattttttttaaaaaaaggttgggatcaaatgtcttgaatataataaaaatagaactggttctataacataatgaataaaataacacaaaataactcaaactagttataattaaaatataaccggttctgtaacataatgaataaaaataaataacacaaaataatttaaaccagttataactaaaatagaaccagttccgtaacagtgttataataaataaaaatcaataacacgaaataactcaaaactgattataagtaaaatagaacaggttatataacataatgaat

SEQ ID NO: 160222 - DNA, 516 bp, Cannabis sativa
  modified_base (193)..(193): a, c, t, g, unknown or other
cctcaaatgagcaatggagttaagccagtttgacctacactacgtcccacgcatttccataaaagggcaagcgctagcggacttcatcatagagtgcaatgaagctgaagctaccgcagacatgcccgcaccattagtcccagcgtggaaagtacttgtagacggagcctccaacgagaatggatccggagcnggggttgcaatgatatccccaagtggacttcgactccaagcagccctacggttcgacttctcagcttccaacaacgagcccgaatatgaagccttgatagcagggctgagattagcaaagactgtgggggctaaaagaatagaagtctacagcgactcccaactggtagtgaaccaggtgtcgggagaatatcagacgcgcggagaaagaatggtcgcgtatgcggtgatagtctgggaactgctccacgagttcacggactataaagtggaaagaatccccagagaaaagaatgctcacgcagactgcctggctaagttagc

SEQ ID NO: 160223 - DNA, 514 bp, Cannabis sativa
ttttacctatcacttactgtgtagaaactcttgaaggtgaaaattttatgcacagagccttctctctttcttattttctctcctgtttcacaaactgcacaaaaaataaaaaaatccttattatgctgcctctcttcccttttatagagactctttctttttagtttattattatttttattttttactaaccacccacttaacgtataagtggtgagagtggagagaatatctcctaattttactctcatttgactgaccattttttatcatattattattattattattattttcattattattattttttttactaaaaaaattattcctttacattttgaatgacttataaaggaggtaattattataataataataataataataacctttttttcgttcaacagcattcgtcatttatttgggtctacatatacaatggcaaattcggatttgagaaactctgatttggtatatggtgatgaacatatgtctgcagagcaaaaatcat

SEQ ID NO: 160224 - DNA, 507 bp, Cannabis sativa
aaattaaatatagaaaccagttacttaaaaatacgctaataaaacaaataaacaatagaaaatacagaagctcaaaatgattacacaaaacaaaaaaaaacttacaaacgataaaactataaacagaaaacctaaaaacaagaaaaatcataaaggaagaaaccagtttcttttgataagaaaaagggatttttttcaaaaatatacataaaatgtaatctaattacaaaaataacttaacaaatctcaattacaataatgccttgctacatcataaaaaaataccttaattccaaactaatatacctgaaatgaaactaatcccgaaattctatttttttgttttcctgcatttaaaaagtaaccttttggttacttatgatgttgataagaaaccaataaattactttttcataaaaaaaatattacttttagattatataatttgagatacattttagctagctctaaaacgtatatgtatacaccttaataattaattaatta

SEQ ID NO: 160225 - DNA, 639 bp, Cannabis sativa
gtatgtagtttgtttctattatatgtgtgtgtgttgtttgattgcactggtgttagtttactattttttttgtttgaaaggtcgagatctaattttttttgtagtttctcagttttttactatttatcgatggtttatagatagtatgtcgacatactgtcgatgctaagcaagcaaagtcagggaagatcattattaattgtatgtcaatagtttatcgacaattttctaaaataaggttttagcttgaattattgatggtttgtcaattgaatgtcgatagttttgtctaattatcaatttctcatatttagtactattgattgataggatatctattgacctcaagaattggccaactaacagcagagtcatattgaactgatgcttgtcacgtgttacacaattagaactagagaataaaagaacacaaggatttttatagaggttcagccccttgagttagcgggtaatgacctcctcttctttcagttgaattgataccgagagataatactatctagatcactataggttcgatctgatatagctctcttaaggttataatgcatgaagcagtaagcaggtctttaatgagagagagatgaatctgtggaggtgtgtgtgtgtgtgtgtgtg

SEQ ID NO: 160226 - DNA, 510 bp, Cannabis sativa
  modified_base (58)..(61): a, c, t, g, unknown or other
aaggttcagatcaacacagaaaatgtcaaagatggtgtcttccacaaaatttgagatnnnnctttttgatgggaagaataatttcagtttatggcaaagtacagtgaaagatgtgttggtgcaaagggctcctaaaggcactgcaaggaaagaaacctgagagtatgactgatgaagattgggaagagttgcaggcaaaagcggtaagcactattcgtttaagtttgactcctgaattaaagtatagtatattgaatgaaacatgtccgtctgagttatggaaaaagttagaaaatctttatatgtcaaaatccctaacaaatagattatatttgaagaagcagttatatgaattaaaatggttgaaggagaagatgttaaggatcatataaatagtttaataaaagcataactcaattgttaagtgtagaggtcaaaattgatgaagaggatcaagctattattttgttggcatcattaccaaaatcatatgagacattagtgactaca

SEQ ID NO: 160227 - DNA, 553 bp, Cannabis sativa
aggaagtgctttcgtggttgaagtatgagttctcggatgtcaatgttatcaaatctgattgtttagtattggtacaagcagttagaaatttgaatgttttgtcatccatttttaatggttgaggattttttaagatctataactttttttgtgatgtttctttacagtttgtcaaacaatctgctaatcgggttgtttaatttatagttaaagcatctcgtttgtatgttaatcgtatttttttttggaatctaatctctttttgattgattattatttttttcaattttgaaataattttcatagatgttccaatataattgaagtatctgtaactgtaataaatgaatgtaccttaaatttattaatagttcaatagttcaaaaaattttaccaccaaaatttaagtttaaaagattaactacaaataaaatgatagttcaaagaatttagctgccaaaaactttaataaaatttggttaagttctgtttttgtagatggatcaaatctcacaatccccaactgttggcactatcactgagataaaactag

SEQ ID NO: 160228 - DNA, 539 bp, Cannabis sativa
ccatccataattttcacatactaactaaatgatgacaaataaaaatttaaaccacttctccatttcttaattaaatctaatctgtaaagaacataaattccaaaacccataataattaatgaaagtgtaactataaccccattctaataattcataataataccattttctaccaagttgaaaaataacaataataataataacttattctataaattctctatttccacatcgagatattaatactaatgtaatagaagataataattaaatattttagttattacaatctaccctccttaaagaaatttcatccttgaaatttacctaccagagaataacttagggtagtgtttctgcatgcccgtctccaactcccatgtcgcttctctatcagaactatcactccacaagattttaactaagggtatagtcttattccgtaagactttttaatcccttttctatcacgcgcacagggtgtgccatataactcatgtcctgctgcaagttcaagttctcgtacttaagcacatgtg

SEQ ID NO: 160229 - DNA, 743 bp, Cannabis sativa
aaggccctattttcaagctcatctcgttctggtgtacactgaccaaccattacgccaaatattgcaaaagtcggacgcttctggacggttactcaaatgggcggtggaactgggtcagtacgaatttactttccaaccccaaacagcaatcaaaggccaggccttagcagactttgtggtagcatgcacaggcaaagaagaaagcatatcggaaggcaaccccgagccggtacaaatacctcagccaagtaatagtgaagacaagccgacttggaaactacatgtggacgggtcggctacagatcaactgtccgatgtaggaattgcccttgtcacacctagggggcaacacctgcacgttccagtcaagtttggattcaaggcatccaataacgaagccgagtatgaagctttgatcgctagcctaaagctagcccgagagttgaaagtcgaacacatcgaaatctgcagtgattcatagctggtggtgaatcacgtatctggagaatacgaggcccgtggagaaaagatgacagcatatctgagcaaaatacatgacctgctcacataattcaaaagctatggtctcagacaaattccaagggaagaaaacacgactgcagatgcgttagctcaactggcaagcagtaatgtaagtgataaagcgaacttggttcctatccagttcctcgaagagcctagcattacttgcacgaaagagatcgaaatgattgatacttccc

SEQ ID NO: 160230 - DNA, 527 bp, Cannabis sativa
  modified_base (497)..(502): a, c, t, g, unknown or other
cctggtaaaatatttccaacatacacctgggatggtatttactcttggggtggagcaattgtttgaagaagtgtcaggaaaaccgcaacatcaaactctaccatggaggccaaatacatagctaccgctgaggatgctaaggaactggtttggctaagaaagttcttcacagaacttggtgttgttcctggaatagaaaaactattggttttactttgtgacaacactggtgctatagccaacaataaagagcgtcagagtcacaagagaagcaaacacattgagagaaaataccacatcattagagaatatgtggcaagaggggatgtactagtggaaaaagttgatactgaagacaacttagttgatccaataacaaaaattttgacagtcactacatttgaaaagaatagaatgaatctaggattgattaaaatgtactgattgttttatgttagtgcaagtgggagtttgttaggtcttatgccctaaataannnnnnatttcaatgtaatcttgaatattca

SEQ ID NO: 160231 - DNA, 558 bp, Cannabis sativa
caatgaaagcaccaaattattgacttcaaatttgaccaaccaataacgaaatcgtatttatcattgaaattatcacgtgtaaacaatgagaacaagtaaagaaaaaggacacaataattttataaaagttcaacccccttagctagtgagtaatgacctactccccttttggttgtattgatattagagataacaccactcaaatcacaagtgttgtgaattctagagttgttctcctaagattacaaatagtgaaagaggttaatctcaagtagatgagatgagagagacttagtctctactacactgctaatggtgtgtagatgagaaggtgagctagagttttgagtgcttgaactctatgacttaagagttagagcttcatagcttaagacttagaacttagagcgtagaacttagagatttcaggtttagtttagtgctctttatataagagagagcatacaagagataataggttgatattccttaaaaagaggagatatcacctatttattacacattaaattaataagaaaattgttgggttttatgccc

SEQ ID NO: 160232 - DNA, 773 bp, Cannabis sativa
tttcgttagtgggtctgctaacatgccagtgttaggcgtgtatttaatagggtaggggtattcacggattggtttggtctaaattttcattatttttgaatcaaaccaatgtaacggtttttcgaatattagaaaccaaaccaaactattaagaacggtttggtttggttcgaaaccacggtttaagtggaatttataagttttcatatttttttaagtaattgtactatttttactaagtttttaattttatttttcaaaatatatatatttaacatgataagtaataatagatctataacatataaataacgatataaaaacattctcaaaagtcaaacataacataaaaatttaaaattcatgcaataaaaaacttgacacacaaaaaagttcaaaattagacatataatcatatataatatatatataaattcattatttattataaacagtccggtccggtttaaccgttaattatttattacgaaccgcaaccgaactattacaccgtaaacggtccggattgaccaaaccaccaaaaatggtttctccggttacagtttacagtggttcggattgtcgtggtccggatttaaaccgcgatttttcggtttatatgaacagccctagtatttaatggaaataagagactatgtaactttctctttaacaaaattgtactttatgtcaatgtgtttagaacgggaagtacttctaacatttctagagaaagttactgctgcagaattatcacaatacaatttcagcgg

SEQ ID NO: 160233 - DNA, 771 bp, Cannabis sativa
agatacgaccatgtatcactgtacgacatgcacttagtaccaccatcatactagtgtaggtagggtatgaaccgtaccccgactactgttaagtgttgtaccacatacaccgtgtatcttcccacactagtgctggtaacaccataatgtactcttcaaacattgtacactttaccaatgcactctataccgctacagtacaagtgttggtagtgtatgaatcacaaaaagcatgcatatatatttcacacatacatacattcgcatatatatcacatattatacactattcttacctcattttcgaattcaagtgaattggctaacctgatcgaaaagtctcgtgctggatggatgccgtaatcacataacataaccaggtaaatcacacgttaaaaccctaatcgggcaaacccgaacctcacaacttaaggttctgttattactaaatggaaccacaataccctaggaaataggaaatcacccaaacgaggcactgcgatggacacgaatcgaggaaatgagttgttcgaagaatctgccaaaactggttaactggttttacaggtcctagcaaactggataaccggtttgcaccaggtttccccaaataattcataacctgctcaaaatatgtccaaatgctaccaaaccttccaaacacctataataagcttagataatatattccaagcaataaaacccaaaaaaaccctctgaaacaaaacatggcattgatgacccaagtttgagttttcaaactcaaacttg

SEQ ID NO: 160234 - DNA, 614 bp, Cannabis sativa
  modified_base (138)..(146): a, c, t, g, unknown or other
aattttgtaatcacaaaaatgaaagtaaaatttgtattttaattttttttttaaataaaatatgtattctataaccactttaattttttaattttaaaaatagaaaataaaagtgtgttctataaattttatttttannnnnnnnnttatttttatattttaattttatttaagtcggatctaggtccggatttggagagtccatgactggggttagggccgtagttcgagtcctaaggtccaaattaaagtcgcagtctaaaatatgtattaagaaaaaaaactgtttaaaaaaaaaattaaatgtgattttttttaagttttaaaattttaattctcaatcaaaaaattaaaaaagaaaaatagttttataaagagaaatgctaaaggacaccagtggtgtttagcaccttcctatgtgtcaatatcgctattggtccaagtatcgggtcctatataatttaatataataattttttgggagtattgctagccaatcgcaacacgacatgtcgagaaggtgttaggcaccactggtgtctaatagcaatgctcttttataaaacatatttgtttaaaaatatttttattgtttaattaaaaaaaattaaatg

SEQ ID NO: 160235 - DNA, 504 bp, Cannabis sativa
  modified_base (242)..(249): a, c, t, g, unknown or other
cggcacctggtcaggagcacccggtgatttggaatctctattattacaggacatcaggtaagacagtagttatctcgtaaagttatgcgcggtggggcttatattgtaaatggtatatgtgagtaatcattaaccgagattatggttattacccttacatgagtggtttaattgcctagggttattcccctagtgatatatgttatgtgaatgctatgccatgatatatatgagtatatgannnnnnnnaaagtttgggttatgtgttcaaggcataaccaggttggattcagtaactagaaccgagatgaaccattctaaggccttattgtatttagccgtgtgagcgtaacacgtaggtctacgctacatagacatagataggcatgtgagcgtgacatgcacgtctgtgtcatacagacatatgagaactaattaaatagtgtgataaatatgtttatcattattttatactgtcttgctgggcttggctcacgggtgctc

SEQ ID NO: 160236 - DNA, 617 bp, Cannabis sativa
tccacttgtccattcacctgaggcctggatactgacgagaagctcttaattattttgttccttttgcaaaactcagtgaacaagtcgccatcaaactgggttcagttattagatactatcttcgtgggaattccaaacctacaaacaatgttcttcacaacaaagtcgaggaatttcttcaaggttatggagacaagaggctggacctcagtccatttagtgaagaaattgactactaccactgcgtacttgggtcctccttgccatatggggagtgccccaattagatcaatcccccatatagcaaatgggtaaggtgaggtcatcatccttagttctgttggtggtacgcgaggtatatgtgaaaatctcttacacttatcacactttttgacaaactcatgggtgtccttaatgattgttggccagtaatatccttgtctaatgatcgttttagataggctctgccaacctgcacgatccccacaaaagccttcatgaatttctctgatgatctcatttgcttctgtaggaagaacacactgaagtagaggcacagaatagcctcttttgtatagtttgccttcaattattgtgtatcgaggcactgaatacaa

SEQ ID NO: 160237 - DNA, 590 bp, Cannabis sativa
ttttttttcttcttcttttcctacagaactcctatcccaaccctctctctcggtcgtctcttctctctctctctctctctctctctctcttggttttcatattactaatcttctactggttcgattatgactaagccaaaaccatatctttatgttccctccaactgaccatacacattgcatcttcaagactttcccttttttctttgttccactttcttgtttggtatctgagaaaaagcagaaagtagcaaaccagagaattcaaacttgcaaggtgtggatatttacagtaaagtttccatttttcttttctttttttgatttttcagttatgggttttttttataattgcttcggtaatgattatttgggatttggggtttctttttgtttgtttgtttgtttagtttcacagtgaaaatcaatggggaattcatcatctatgctaactcaatatgacattgaagaagttcaagaacactgcgattatctatgtgggttttgatattttcactcttagatgattttctctctgagtttgtttaattataattatactgatttttcttctgctttagtttctcagc

SEQ ID NO: 160238 - DNA, 533 bp, Cannabis sativa
  modified_base (490)..(493): a, c, t, g, unknown or other
ggtgaccttttatgacttttagtgggggaggggcaaaatggtctttttgcccattggtgttttgtcctttagtggactttgttttaacttaataattagatttttaatttcattctatgttgatatttatttaataaaacaacctattttcattaaattctttatttacaaaaaatgcaaagttggaaatgaagctctctctcaaaactctctcttattcgaaccctatagaatcaactagggttttgaattttgttcttcaaatcctgtgatttctagcaactctaagtgaatccaagccaaggtaagatcctagcaactttccctttggttttcttaagtttcaagttaagaattttgcatgattttgagtatttcagttctgtagctattgttagtgtttgatattattttctaaagtttatttatggttagatatgttgagttaagcatgttttgatggttggtttgttgattgagcaagctttgnnnnttagaactcaagcttggctctttaatggtgaaatttgatt

SEQ ID NO: 160239 - DNA, 550 bp, Cannabis sativa
gactttaaaggacaagatgggattggttgatatataccattcatcttgagggggagtattaagagttagttataagttagtttgtttcggttagttagtttgccagctgtaacagttagtgtaactaactaattcaatatattcatgagctatatatgctccgttcttgtaccttttccatttcaataaaaaaaattagtttctcattcattttctctcttaattctcactgttctttcttcttctccatcactcttccgtaactaaaagtttttaaaattagaaaagtgaaaatattttctaaaatcatgttcaataaaactgtttttactttctaattttttaatcaagaatttgaattttaaaaacaaaaaaaaaaaactttcaatatttttttaaaccgttttttaatcaatattttagactccgaccctaacttagaccttaaaaaccgaacacgaccccaaccccggacttggacccggcctggtcctgacctcggacccgacttaaataaaatcaacaaatgaaaaatgaaaataaaatttac

SEQ ID NO: 160240 - DNA, 543 bp, Cannabis sativa
ttttgctaaactgtgattttcaacgattttatgcgatttttgtgcgatttaaacatgttttttcatttgcctctgttacattttgcgagtttatgaaatttcaatgcgatttgtgtgcgatttagacttttttcaattaccactgttttattttgcgagtttatgcgattttcgtgcgattgttgtgcgattttactatgctgaatatggctctgctattttctgcgattttatgcgacatatatgcgatatttgtgcgactttcatatgctgttttatgctgtgtaccaacctgatcttttctgcgattttatgcgacgtgtatgcgatatttgtgcgataattaatattttttttcgtttttttttttcagatggttgttgttcaaattttgtatcctaggaattgggaggtggactattggaagagcgattgtgagggtgaggtcaccacggtcgatatggggttggctgaggtcgaagaaacacaagccgggacgcaagattcgaccgcattccagacccaagccgaacgggtggcgga

SEQ ID NO: 160241 - DNA, 941 bp, Cannabis sativa
  modified_base (28)..(29): a, c, t, g, unknown or other
  modified_base (56)..(57): a, c, t, g, unknown or other
  modified_base (83)..(84): a, c, t, g, unknown or other
  modified_base (111)..(112): a, c, t, g, unknown or other
  modified_base (139)..(140): a, c, t, g, unknown or other
  modified_base (715)..(717): a, c, t, g, unknown or other
gtgggtgtttcccagtcacttcagggtnnggtgtttcccagtcacttcagggtcannccagtcacttcagggtcatgctcgannagtcacttcagggtcatgctcgaaaannttcagggtcatgctcgaaaacgcatgnngcttaggttactgggatacacccatcctttttttgagatacccttctactcgcacacctggctttccgtgtcctcgtaggatggttagtttttcgcgaggattcaaatcatcctcccaagacgagtttatagtttatatgcgggtgagatcacttactttgtttttttcgcacattcaccacgctgaaaggatcttctatctttcagatgagcgacttatcggatagccagatgcttggctcaggaggcaacgcatttgatggagacgaggaccaacgggaggatagttttatcccgacttcaatctcagaagaggagatcgcaactacgggaggtgcagaattaggcccgatgtcttccgtagacattgagaggatggtgcaggagctcgttgaaccaggaaccattgagattcgagacagcgaatctacggtgtaagcgcgtgattatctcgtccactccaggcatgcccctgacgttgaggtcgaggagatggacgatgattgggcggccccagctcgagagtcaggcgaggaagaagaagatgcaaaaggaagtgggaccgattcggtggnnnacactcagttgaacgagcccttttcatgcgaggacttagtctcgagggtcactacatcagatcttaccactttcacgaggctgaaccttccgcgacttgcttctttacgaccaaaacgtactcagagggcgcacctttcctttaccaatcctgcgatcattcccacagaggatgtggtagtcttaatacccattcttcgctgtggggtatcgatcccttttcat

SEQ ID NO: 160242 - DNA, 583 bp, Cannabis sativa
tttacttgaaattgctttcatcttttttcttagcgataacagatttttctaaagctcctctttgagatttaatcaaacttcctattctccttttctttttaaatttttcattacccgacatatattttctactagacatacttgttcaaattttaggcacaacaaaacaaaactaaaccaattcaatgaaaattaataaaactaaactattgcatataattaccaataatagaaaaaagtaaatgaaagaaacataaagccttgaattattgtaaataaaagtaagttttccaaactcaaatatggatcttttctttgaattttgaagttatcctctctttttgaaagataaagaacggattaaaaaaaaattcaaagttaagaaagatatatcatatatataaaattatatacaaatatgtaatatgtgaacactatttaaatttatcacataaaaaaaattaagtaaaatgaagagttgaatgaaagtgtacctctatgatgatttttttcttgtatatgcaaagttgcaaactcaataccacagtaaattcaacagcaaatgaagattttagaatataaa

SEQ ID NO: 160243 - DNA, 584 bp, Cannabis sativa
  modified_base (26)..(32): a, c, t, g, unknown or other
  modified_base (409)..(414): a, c, t, g, unknown or other
  modified_base (548)..(548): a, c, t, g, unknown or other
aattaataaattaattttcaacacannnnnnnttttcctatttaattaaatttctacgaaaattatatcaactatttaagtatcatgaataaaatcaacttaaatattaattttctatctaattaaatataactagaaaaatacttcaagcaaatagaaaataactatctagattttcactaactaatttctttattttctaattaaaatataatgtattttagtccatttattttaattaatcattaatgaaaaatttacttgatttaagttgatctaaaattaactaattttcaactttaatctattttgttataaaaaaatcaaaattatttgcattaaataaatgcaatttcgaaattatggtaagaaaaaagattaatgaaataaaataaaatatattttgaannnnnntctaatttaagttgttctgaaattaaaatttccaacttaaaaatataattttctatataattaaatattcttaaattaattaatatttaagtgtctagaataaaatcaacttaaatatttaatttttaatttanttaaatgtattaaataaaagaatcaaataattaagt

SEQ ID NO: 160244 - DNA, 562 bp, Cannabis sativa
tcatgggtaatacccattaagaagtgttcatatatatatatatatatattaaacttgactgttattattaattaatctcttatatatatatggcagagcaatccaatggctgttattaggttatttcaggttacaagttatttattatttatttttatttaaattccaaattaatcacaaccatttaattaatagtaatccaatggcttaaaaaaaatataaccatgatagttacaataaaaaaaaaacattgaaacctcttccttttatttaaatattagaagagatataaaagaaaattagtattgcacatttcattgtaatagaattaacaaatacatcacaatcattgattctaatacttaacattagaattttattagtttattttaagtaaaatagcaaaataaaacacaaaaagttgggtgaaaggggtgcataacatgattttagaatccaaagtgtagccctttctctaattttttccatttattttggtccttaaattattgttttattttattggtcttgaaaaatttaaatatataaaaatatgaaatta

SEQ ID NO: 160245 - DNA, 737 bp, Cannabis sativa
tcgagcagcagagaaagcccatatacaagctgcatgggacctctcctttcactacggaagtgcgacaagctcaactcccaagggattttgattatccgaatccctaaaatataaaggtacctctaatcctatagattatcttgaaaaatttaatactataatggaagtggatcaggtaccacaacttgcaaaatgccgcattctcgcggcaaggctcgaggaaaacacccacgattggtttacccaattgcctgaggcttcgatatcgacatgggagacatttgtcgatttatttgtcacgcactttcaagccaggatgacctataggcccccttatacaactctggccaacatcaaacaagaacctggtgagtctttacaggattgttttaaacggtttaacgcggaagtaacaaaagtcgagaagactcccgagtcttcgcttgtttacatgctaattacaggtatttcgtgcagaactgatttctagaaagagttacaagctcgaaggctagaatcgctagtggagttcttcgctatggccgaaccccataagagaattgtgaattctctggcagagttggaaaagggtaaggataagcgtaaatcaccagtaccacgatcacgatctcgcagtccctgagggaagaattctagaggctgaagcccgagaagacgcagcccacggagacagcggagtccaaagctggccaaatctcctcccaagaaggagtcct

SEQ ID NO: 160246 - DNA, 821 bp, Cannabis sativa
atatgtgcaatatgtttatatttaaattacaattaaaagaaggataaataccattttggaccctgtgttttataaaagttaccaattagaccatctattttgttaattgttaaaacggaccctgtatttttctaaattatacaaataggaccctaaattatttttttaccaaaataaaatttaataataatctgatctagagatgttataaaaaaattggttacattttctgcatctgttcgtgttagaaattttcttaaagttagttatattaaaaactaaaatttttaaaaattaagctcatggtcctatttttactattttagaaaatgtagagtctattttgttatttaacaaaacagagggtcccattggtaacttttacaaaactaagggtccaaaatagtatttacccataaaaaaaatatttatgttatgtatcaacatttaatataaataaatgataagagatatatgtagtgagtttaacattcaattgaattttttttttagaaaaaaatagtaaatactatttttgatcctatatttacaaaagttaccaattggaccctctattttgttaaatgataaaatagaccatatactttccaaaatagtaaaaaataagaccctcaactcaatttttgataattttttttaatataaccaacttaaaattaatttataacacgaacagatacagaaaatataactagttttgccaaaaacatcgctagatcaggttatcattaagttttattttgataaaaaaattagttcaaggtcctatttgtactattttagaaaatacaaggtccatt

SEQ ID NO: 160247 - DNA, 524 bp, Cannabis sativa
  modified_base (26)..(28): a, c, t, g, unknown or other
attcttattacgacatatcgtttatnnnttatcaaaaagactcattgtcgtttgctaaaagcgaagtcaacagaaatcatattcgaagcattttcatttttaagcatttggagcaccaagtgccttagccacacagtgcccatgttaacattttttcaacctggggaacttccaagcattaaactaaagaactatcttgtgcattttccttgtcattgtgaaaaataatgaaataagtgctttcaaggaagaaatagaccgatctagatgccaaaaagaaggttcagtgcccaagttgacacctagtgctagtgcagcgcccaggttgacattttgtcaacctaggctaaatccaaagagttttttttcaataagtattctgggaatattctttgttttcatcaaagattaagataaaagtacttctgggaatcaaacagaaccatccggtggcctgaaactagacccactgcccaggttaacacccggtgttgggcccaacgcccaggttgacattttgtcaa

SEQ ID NO: 160248 - DNA, 740 bp, Cannabis sativa
  modified_base (420)..(422): a, c, t, g, unknown or other
attctttcgggtccgatcgtgttcttaagagaattttttcagttttcagatggttttcaaatctttttcattcataaaattgatctaaataattatatgaatatagtaataaatagaggattcaaaataaataccgaaaaataaaaacgaaaaaattacagaccgaaaaataaaaccttcatgtatatatatactcgtatacaatgtaaatactgcataaaatcatcattaatgtatggaagatagtattacatacaattttatgcaataaaaatatgaaagcattgagtattatatataaacatataaacatgaaaaattgtatgtatatacacagtatatgaatataaatatgaatgtgtgtatatatatgaacatatagattatgaaatatgaatataaaaatgtatatatatatannnatataaatatgaatatatatatacataaataaaaagaaaatgtatatatataaaatatataaataaaaaccaatactgtatacgtatatatatatacttgcatatacatattaaaccatataaaatatcatacaaatatataatagaatatgataattaattatatggaaggaaatcaatgaataaatgaataataatatgaaagtgaatacccaaaaatatatatattgtacggtataaataaatgtatataatatatatatgaacgtaaatataaagatgaatatatatatatatatatgtatatataaaaataaa

SEQ ID NO: 160249 - DNA, 655 bp, Cannabis sativa
cggcatcatgtcacccacagtctcgtcgctcacctgccctttttgcgcggagtattggcactcgacagagtttaacccaaacaggttgtggattgctgcagcagaaaatgagactgggacttcacgcaccaccactacagtgggccattcttgggataggaagttggcgtaaaattccttgacaacttccatgaccgccggctctctttgctggacaaaaagtccccaatttcgcttatgaaccgttgcactgacccattcgggcaactcgtcaatatcctcaatatcggctactaatccacgctccatataaaactcctgattgtccaccttctcgtgatactttgtctcagctccctggcaatggaacttgggaatttcatgcagtgatttctttttattcttgttggcggtcttcttaactttcggcattgtatttgctttttcacttgcacactaccccaacacaacaaagttttgtctctgctttcttactcactgctgcccctcaacacaataataacgcttacaatgcacttcactgttcccaacccaatcttgttaaaaaattactactttttccaacccacaccacaccaagtaaaattttgacaccttacacacaatccatgtagtacttggccatgatacttcc

SEQ ID NO: 160250 - DNA, 504 bp, Cannabis sativa
tagaccaggattgaaacccaggccctagacccagaccggggacccaaactcgaacccaaacagggacctagaccaagaccgggatccgaacatggacccaaacctagactcggactcagaccagtacttgaaccctgacccgaaactggacctggacctagacccataacttggccccagacaaggacccagacctaggacctagctcgggacccgagacccaaattggattaggatctaggcccgggacctaggacttgaggcttggactcgacccataatcggcgtctgaatttgggactcggaccaggacccgaacaccaactcgaacccaaactaggacccggaccaaaacccaatcccaggatttgaaactggaaccaaaactaaaacaagactaggaccctagaacgggatcgggactaagattaggacccagaccaagactcataattagacctggctcggaccaaaactgggatcaaaatctggaccaagacgttg

SEQ ID NO: 160251 - DNA, 552 bp, Cannabis sativa
aagacacctatggatcctcggatcaaacttgatgatcaacaaggagaagctcttgaagatccctcttcttatagacaaattgttggcaagttagtctacctaaccttgtcaagaccggacattacatttgctgtgaacatccttagccaatacatgtcctcaccacgcactcctcacttacaagcagctcaccatttactccgctacctcaaaggacatcccggccaaggcctcttatattcagcatcttcatccttacagcttcggggtttttctgactcagattgggcctcttgccccacaacaagaagatctactacgggtttttgcatatttcttggtgactctcttatctcttggaaaaccaagaagcaacccactatatcacgaagttctgctgaagcagaatatcgtgccctcgctgctaccagtagtgagataacttggctccagtatctcctacaagacttccacatacctcaagatcaaccagccttcatctactgtgacaaccaatttgccattcacatcgccaacaaccccactttccac

SEQ ID NO: 160252 - DNA, 724 bp, Cannabis sativa
  modified_base (676)..(681): a, c, t, g, unknown or other
acttaacacagtatactgcagtataaaacttataaaaaaaacacactaaaaaagtaaaaaatactgcctaatggtatttttgttaaaaaaatagcaaaagttagtataccatgtaaatttccctaagagaataagcgacactaggcccagttcatataaggcccatattatataatgctgagactttttaaaaaaaaaatgcattttttacggggatcttacaaaaatatttatttttttgttatttttatatttttactgtcacaccctttttttatacatttttactatactaattttaaaaaaaaaaatacaaagagatgtaaggaagaaaaaaaaactttatagaagctctaataaataaaaaagaaaaaaaatgtaaaaaaaatataaatgtaaaaattccctgtcaaagtataaatgtaagcttttaaaaaaaaaattaatatatggtgtaaacatccatttttttcattacaaaaaatacaaccttctaaaatattcctcacatatacccatatctgtcaaatatataggaaattacacattataccctttttatattgtcctcttttatttttatcctctttttttaaagtatcatttttacctcttttttaaacattgtaccaattttacctcaatcacttgaagatactctccatgtgactctctnnnnnnagaatattttgggtacaatacatataaaaagaggtatatttca

SEQ ID NO: 160253 - DNA, 668 bp, Cannabis sativa
caagtgcagatataacagactgaacctccagacatgactagacattgtaataaaataatctgtcacaaaataacgacacttacaattaagataagaaagtatttgctctaacaaatactactttctaggaatgtgactaaatctgaaaataaaatagcaaagtagaggagatatgttttttattccaaagtgttctatcatcttattttatgtaagatggtcccactacctttgttgtcttgacccaaccgaagaggttaataccatttaaattcttagacaaaagtcgcggtaccttgtcgtggtgggagggtttcaaggaactcactgtgttatgattgtgaagacactcgtgacaaatatccattgttagtttaaacagataatggatcgtcagaataaagaactaagaagtaaagccaagataactatggttaaaaccattcatatggagtaaccaaaaaggtttctattgcaatttacttactctagtgtaagcaacttactttagtaagatgttgaagaatttttctaatagcaatctatagaaggctctagacttttagccatagattttatttatctaaggaaaagtgtcaactattccagaaaagataaaagccatgaaagaattctttaggatgaacaatgagaggtctcaggtatgc

SEQ ID NO: 160254 - DNA, 522 bp, Cannabis sativa
agggcacaaaacccaacatttaggtcttgaattagtttaaaggaccaatgaggcaatggacaaaattaaggctcgaatgcttgctttgcaatggaggcagaaaagttattataatgttaagcacaaagatattgcatttcaggtaggagaacatgttttcttgcgagtttcaccaacaaaaggtgtaaggcgcttcgaaaagaggggcaagttaagtcttaggtttataaagccattcgagatactcgagaaagtggggtaggtagtgtaccggctagccttaccactagcatcgtcagttgttcataatgtattccatatttcaatgctaaggaaatatatatcagactaaactcatgtcttgagttatgaagccttagaactacagtcagatttatcttatgacgaacaaccaattcaaatccttgataggaagtaaaaggttcttcggaacaagaccataatattggtcaagattctctggaagaacagtaaggtggaggaagccacctgggagctaga

SEQ ID NO: 160255 - DNA, 561 bp, Cannabis sativa
ttaatgggagggtatctccggtttttccttcctctctttccaggctcctggtgcatgctctttcagtcctctcgatcctgagggccaagactcgctttagggagcttgcccctttgcggacctttccctttcaggaaatctaagcggactttttgcggatcctgcacctttttctttcttttggggattgaagtgggatttttcccagggttttcctcgaaagggtaccgtatagggcttggttccctggtcttaggtttctgagtgcttggtgaagactctttcgatatttctttgagtcctgtcgggatggcattagggtgtatatgaatccctgccgtctccatggctttgcatggtgaccaacacctcttgcatttttctattttgctccttttgggctacgatcttagcttcatgatcagcagccttttacctcaagaccagcaactctgtatagctaccctcatcgtaagcgtcatactcgtcaaagttctcttcgtattcctcgtcattggcctcatctcgctcctcagggcccacatttaccctggaagctac

SEQ ID NO: 160256 - DNA, 670 bp, Cannabis sativa
  modified_base (58)..(58): a, c, t, g, unknown or other
  modified_base (615)..(621): a, c, t, g, unknown or other
tagattgcctaaagtaagcatatacaaataggagattctaagattgaggatttatatnatttcgggatagaatgttaggaatataattatatgcaccattcaattttataagagaaagtagaatgacatcataattagatgatttataaaccattcatccaatgatatactatgtaagcaaattcgaaatgaatcagctaagaggaaaaattaggataatttggattaaaataagaatccaacaatatcccgataggcgagagtcaaaattattcttattttacacgaaatttacaactacaattaataacagaaaacaacatgtttcaatataaattcacacacaattcagaacttattaagcatttagcaagcaacaaagatatgtgaaaatacaaaacttatcatatcttaattaatttccaaggtttccaacaaactgatatagtgtcctggtaggcaacagtcaaagatatcattcattgaatagagttgtcaggtcatttaaaatggacaccattctagcaaccttttattcgatgaaaataagtatccaacattgttccggtaggcaaaagtcaagttattcttatattatgagcttccaccattgtnnnnnnntttataaatttatctctaagtagtaatcgtaggagagagtctaatagag

SEQ ID NO: 160257 - DNA, 780 bp, Cannabis sativa
  modified_base (435)..(445): a, c, t, g, unknown or other
gagaatttcattcctgagttccacactattaggaacacaaaccctggttttgaagaatagcatcccattgtttgatattgtaaagtctctggcttgaccagctgaaacctcttctctgatctttactagctctggatcagttaactgagtgactttaattcgttctaacagatcagattgtagcgtcaagttatgaagcttgcctacaacaaactcaatgctagatctgactatatcctctgctaactgaggtgaaatctgaatcataccagctacctgcccgagacccttcctgctcagggcatcggccactacatttgccttcccagggtggtaaaggatctcacaatcgtaatccttaactaactctaaccaacaccttagtctcatattcaaatctttctgggtaaataaatatttgagacttttatggtnnnnnnnnnnntcacatctttctccatagagataacgccgccaaattttcaaagcaaacactacagcggccaattctaggtcatgagtcgggcatcgctgctcataatctttcaactgacaagaagcataggcaataacctgatcagcctgcatcaacacacaccccagaccttgtctggatgcatcacaataaaccaagaacttttcttcatcagaaggcagagctaacactggagctgtaattaatctctgctttagctcctgaaaactagcctcacacttgtctgtccatataaaacgcttattttttttagtaagctcggttaagggtgttgaaattttaga

SEQ ID NO: 160258 - DNA, 531 bp, Cannabis sativa
  modified_base (392)..(394): a, c, t, g, unknown or other
aaaatagattacattgaaatggagttttatttagggcataaaagctaacaataggttgcatggtagtgatgttgttttgttaatttgagtgagtgttgcttggatttttggtgtgttggttgtttgatctctagagggaattctaggattttatttttcttgccttgaattcaagttatttgttaatggtatgttgctgatgaaaatttattgagatgcatggttttgaagctctagttcaagagcttgagctctgctaagtcaaagcatgattttgggttatttgtgcaatttgaattttgagagttgttgttgttagctctctattgtgatgattttttatctgtaagaaggtaattttgggtatggtatgattgaggttcaaatttatnnnaaagttggcatgtttaggccttaaaaatggagtttatgggtgttctgaaaccagtcgtcgcgacgggatttttggccgtcgcgactgggtttgggagtgacaagtctgtttttcccgattttgttttggccataact

SEQ ID NO: 160259 - DNA, 678 bp, Cannabis sativa
  modified_base (145)..(147): a, c, t, g, unknown or other
gtaactagagatttagtacgcttttaagtaaataaagatttattttccttcaatcaaattcttcttttatgaccaaaataactccctacaaaattaacaaggaagacaatttgcctatacttaggaatctactttttaataaagnnntgttaattcttaaatcgggaataaatacttaaactagacaccgagagcaagaagtaccacagagtttgacatctgaagtagcactcaaacaccggggcactaggaatttggtcttaaattattcaatgcccaggggatggtgtgagtgttcaaaaagtaggtggatgaattcgttgttgatgatgttttccatactctaacttgtgggaggatgttaaggatacttaaatacgaccccaaactgagtttggaagactcgactgaactagaggattaaaagatcaaagctattggttcaaagagctggctttcaaaaaaaaaaaagaattcttatttcttaatacagaacttgtggttgatcctacaagcgtgatagtattcaagagctgtcggcgcacaaagaccgaagagagactaaaagcttccttggcctagtatgtagtagcttacacattgacgaacctcaaggagagtatgaaacaaaggatatagacataatttgtaaccaggaaagtatctatgttagtgttg

SEQ ID NO: 160260 - DNA, 623 bp, Cannabis sativa
catcattattggttaatggactagctgtaattaaagcctaaattacatgatattgcttccctccataatagtaatcttcattatccccacccctatcaccaaggttgttatttgttttcttgccacttgtactctattctgacaaagtttgttatttctgttttgagaccttcttgcaatacttttgatatataaacaaaggttcaactctttagtttttaagaacttttacaattctttgtgtcctatctttattgttccagttaggaattgcattgataagcttctctttcatggtatcagagccatatccctagtgggctttcgatccacacctatccagatggttagctagccgcacgagatccagatggtgcaaaagacgcttgagatccgaacaaaaataagcgagcaaatggcatggcctgtgataaggtgattcaagattggtgagaaaaaatagccaccatcttgaggggggatattggtaaacattgtcccacatggatttggattaaatgtaaaagtattgagccatatataagagcatgggctactccacttatcaccaattggttttgagatgaaactccatgattctcaccatatatatatatatatat

SEQ ID NO: 160261 - DNA, 526 bp, Cannabis sativa
ttaagattgaaaattctatttttgctttttttttttgcttttttttgatttttttcgtttcgttctctctgatttctccctccatggcgaggaagaaaaaatttggaaggaaaccagtcgctcgatcacttgacgatgagattgctgcaggaaacgaaggcctggatgaagtcgaagaggtcactgctgttgattcacatgaagcagataggctgaaggttactgtagagatggctcgttctcaggaaatacaagagacggagatccacagatctgggagtagtcgaaccaaaagttgggcggaggaggttgaagatgatcggaatgtgagattggataaccagcaatcgccaggctctgctaaacaaatctgtgagacattcacgaaggggaaaactcagagtcgagatcagcttctattgttcactgaaccgttaattcgggatggcatcaaaattgcacaagtcgacttggacgaagtgcaagaagaggaaaaaaactggaatacagcagttatttgcaaagt

SEQ ID NO: 160262 - DNA, 692 bp, Cannabis sativa
  modified_base (657)..(665): a, c, t, g, unknown or other
caagtatggaggtgtacaagagtactgacaccaacatagggtcagtttttgccccacatcaagctacacgagtactaaccttctccaatggtcagacctcatatatggtgttgtcatccaatgaggagcctcaacaaacttgttacatgagtattgtcacctttcttgcgccagtactcacccaaatactcccttacacaagtattgaccctcctttgtgttgggattttatacctttaataaaactcatttcaatataattaattttactaattaataaaagatcagacatcattttatgttgtatggttcacatgattgctttcatgattatatgtttaatgtataaattctattaaatcctgaatatatagttattcatgattatagtgttgtctacatagtggaaaataatcataattatatgttacaaagttcttagttccataatttatcagtgtactaaatttatactgattgtgataatcagcaataaagtttattttgttggagattattttaccaggatctagatttactactatatatgttgtttaacatcctaaacatgaatttctaaaataataaaatttaaacacatataaagttcaagaaaccttacattgattgaggtggaattaaatgactccttccacnnnnnnnnntaacccttgttcctttctatcgcagag

SEQ ID NO: 160263 - DNA, 596 bp, Cannabis sativa
ccactttcattactttctactatggctagggatgcacattttcctcatggggatgggccctcgcagggacccgcccttaatggggcgggaatttcccgtctaaatagggaacggggcggggacggagatcaaattttgtccccgaatattaaacggggcgaggacggggatgacactccctaccccgacgggacccgtttaatttattaattatatttttagtaatattttatatatgcgtttgtatttttttttagtatattgaatagtaaataatatgtaatattttatcttttatgtaatttaatagttttatacatttaaatttttataataagatttatttctacaataggagattccccgccccgtaggagatttcccgccccatccccgatggggaataagcgaggatggggattaaaattcttaacggagatggggacggggagagcactccccgctaattctccgccccgtgtccatccctaactattgctcgtttgactaaacatttactttttttaatagctaaaagtataaaaagtaatttttttttatttatttgttatgtttgaataattattatataattt

SEQ ID NO: 160264 - DNA, 601 bp, Cannabis sativa
tacaaatatttaacaagaatcaaacttcttcttcttggacttctttcccttcggcctatctttagttgaatatccttcataaatcttttttaggccatagttatacaaagtcacagcgaggtcatccctatagtgcgtaatcatctcatccatattaggaggaatctcattaatcttgccccggatgaacagatcagcatacttaatcacaaatacactacaatcactgaaaaacaaaacaaaaataaataacaatgcataaccagttttaagcagaaaaaataaacaaataaagaatcacataagtcataggactaaaaataactagttatttaccttttgctttgagtggggagcttgtccacaaactcatatgcaataggagtatccttcagcacaacataagggcctgactccaaactaatgtcgttcctaccatcataaaaatttaagaaatcaaggaagtatggcagtaactcacactacggaaggagatcagacaagatcttcttttgattcgtctttgtattcttcatggaattgaatacgaagatcttcctccttaaaatgctgaagtgaagaaatatccaatgttgttgaa

SEQ ID NO: 160265 - DNA, 607 bp, Cannabis sativa
acaaagtgtgaccggagcaccaccacgacctcaatcacatcccgactgctaactccggctagccctaaccaaccccactttagccccgatgttgtcaatcggcaaccaataaccaacccaaaataattttttaaaaataaaataaaaacctaaaattaaaaaaaccctaacttttaccaacattcattctcatctaaatgaacccagaaaatcaagctcaccctccatctctctctatctctctcgtctttctttcttcttgtcgaacagccacgcccaagctcgacgctggccattatcggtcctccaagctcgaaaggaacccaaaaaaattgaaacccatactcgaccttccaccctcgagccctagcctgtctgtctttctccttttctccctcttagatgtatggcagtgatggggggtggggtttcgtgtgaagaagaagaagaaaaagacgaagaagaagggctctgggtcaaatgggaccgcggacggtggtcgaagggggttggtggtgctggtttggggttgggggttggtggtaggtttctagcatgagaagaagaagaagacgaagaagacgatgaagaaaagaaagaaaaagga

SEQ ID NO: 160266 - DNA, 1083 bp, Cannabis sativa
  modified_base (305)..(324): a, c, t, g, unknown or other
  modified_base (664)..(671): a, c, t, g, unknown or other
tttctttttgttggattagttcagggatctcggatcccagtaatttggtactaataactagggaattattgcgagaaggatgtctagggtttctcgccgtggtattagataccactcggcctgactctattcggccagaagacatcaaggtggtttaggaatttttagatgtttttcctgatgaacactcgggtttaccacctcagagagaaattgattttgttattgacttgtcacctagagcagaactggtttctaaggccccctacagaatggctcaaacagaacttaaagaattgaaaatnnnnnnnnnnnnnnnnnnnnacatagggttttctcggcctagtgtatcaccctagggagctccaatattgtttgttaagaagaaagatgggtctttacgaatgttcattgactaccgagaattgaataagttaacaatcaagaataaatatcctttacctaggattgacgatctttttgatcaacttcaggggaagacaatctttttcaaagattgatctcgaccgggctatcatcagttgagaatatgagaggaggacgttccaaagatggctttctgcactaggtatggacattatgaatttctagttatgtctttttgactgaccaatgttcccgcagctttcatggatctgatgannnnnnnnttcaaggatttcctcaatatttgtgttattgtatttatcgacgacacccttgtgtactctcaatcagaagatgagcatgagcaacatctccggatggttctgcaaggacttcgagaacataagttatatgccaaattcaagaaatgcgaactttagctatctcaggtgtccttccttgggcacattattagtaaagatgggatcaaggtggatccaggaaagatagaatctgtcagggactggccaagaccgaaaaccctgatagaagttagaagcttcttgggtctggctggttgttatcgtttgtggaagggctttctaaaatttcaatacccttaaccgagcttaccaaaaagaatcagggttttgtatggacaaataagtgcgaagcaagctttcaagagctgaaaca

SEQ ID NO: 160267 - DNA, 704 bp, Cannabis sativa
ttggtgacacacctcaagagaggcatggaaaagctccgtctgtacattatctcgtctaggatcaggtacatagtagcttttcttcttagtttgtttactccaattttctcttctggcatggctctggtttggaggtatgttttgataggcgtcacccatcttggagtgtcatccaatatatcaacttcttctgggataacaatgttgggttcctctaggagtgatatgggcaccaagttttcttagtcaactatggtgatgcttgctagacgggcaagtgcatctactgtggtgttttgttctctgggaatctgcctgatcatgtagtctttgaattgacttagcatgtctttgattttgctcaagttggccaacatttttacacctcgagcagtatattcacctaagacttaattcacaactagtttagaatcgttgaatatgtctaagtggtcagccataccccatacttcatgtgccagcttgaggccagatattaaggctttgtattcagcctcattgtttgaggctttgaagccaaatttgattgctccatgtcgttgctgcccccaagtgttgtaagggaaatgccagagccggacaattggtcagtgtaactttcgtcaacatggagtgtccatgttagttctttgagattttactggtgttgttactcttgcttcttctctggctctttcttttct

SEQ ID NO: 160268 - DNA, 541 bp, Cannabis sativa
aattactgagatatgcattcaagaaaattgcaaatataaagaatttgtggacaaactgttgcgaaaacttaactgcaacaagaacacaactaatctaaaagtgtagttttaggtacaatctagatatccaacattaaagatcacagatgatgaaaatttaaatttttaattgtagttaaaataaagaaaaaagaacatgacaaaatcattctttgtgcatatatatggtccccaacacaaatacaatagtaaaattaccatttttttactgaggttgacacagggcaagaagtccacatgcttgaatatgaaactcagtcaggagaacaccaacacatcaacaaataaaaaacacaaatgaagataatgaggcattcaactttgttgactatgcacaaatagttgttgtagaaataatgaataaactaacaagacagacaactgatcaacaagaaatcaataatgaagaagcattagacatcacagataaacaacatccataaattaaaaaagggtagatttacaaagataaagaaatatt

SEQ ID NO: 160269 - DNA, 541 bp, Cannabis sativa
aagtttgattcattggatgatttgcttttgtactataaatatatggaaacaagaaggatttggtgttaagaagaaaacaagtcgtaattcaacacatggaaaaatgaaatttgtttgcctttcatgttcttgagttaggaaatctcaactcaagaaacaaaattttcttattcctaattctcaaacaagaacagattgcaaagcaaaaattaatgttactttgtatgaatatgggcaatgcaaaattaattctattatgcttgagcataatcattgtctaagtcctcgtaaatcaaaattctatacatgcgatatggaaataggcataggggcaaaaataaagttagaattaaacaatcgtgtagggttatagtgtggcaaaaaatttccaaacatttgtagtgaagctggaggtcataataaagcactattcttagaaaaagattgcagaaattttattgataaaactaggcatttacgtttgggggttggagatgctaaagtcattcatgattattttatgagtatgcaatctaagaat

SEQ ID NO: 160270 - DNA, 618 bp, Cannabis sativa
aaaatctgtgttaacagtttagtgctttcatgagcctctatgaaaagctcacaaaaggcctcttaacataaaagtgattgatgacaccgaagataataatccttaagaaggaatcaatcatcgcctcggagaagaaccattgagtcctcagggatctattgagtcatcgcatgaacagactgctagacctaggaaaacccagtattggggtccctagcttgacagacttcggataaacagcaatcggccacttcctaaccaggttgatgatgatggcgcctacgacccaaacagatacataccaattgtggaattagaaaatggccatttaaggcgtcgattggaggaagcaaactgctgtattgccgagttagagcatgaaatagccgcagtaagggcaacacaagagaatggtacccaaaatcaacttgaccttgggagaagagattcatgaggaaaacctcgcggctcgcaaaccaaggggtaggggacaatccagagatatactcagaggccctgaaaagtacttagaaatatgtataagattgactcgttgactatgcagaattttaaatgcaaaaccacgtaaaaaaccctgtgttcatactctttattttg

SEQ ID NO: 160271 - DNA, 523 bp, Cannabis sativa
attatggcagaattccaactctcaacttgctccttgacttcctcaatatcaacttgggctatcttttggccattttttagtaaaggttctgtatagcagagtctaacctcagatgacttactctgttctttggcaaacgaattccaaaggttcctggcagattcatggaatttctggttttgaacctcttcgagctcgacttctcttgcccagcttgaactaggcggtggagtaagaaattccgagatgatgggagaatgacggttctgacctacatcccctgcacccacttcgccttcttcctctgaacaaacctggaacgagtcaggcatttcctctctttgatcctccttctccttcgaatcaataatagggatgagtgatctaagttttcgcacagtacgcctcttcttcgccatggaagggagagagtctgtgacgcgcacctttgggtcacaaaaaataaaatttattttatatcattttacttattaaaaatttataaatagtattttaattattt

SEQ ID NO: 160272 - DNA, 613 bp, Cannabis sativa
ccacacattatttggtgggatgcaatacaggaaatattttttgtatttaaaacacgtataaatcctagaattatgtgtttgttatatttttaaacacattccgttaccactacccacccctctctattaaaaaaagagacgaccaatcttctttacaaaattaaacaagggagagagatatttctactgctaaacccatcattcctgctaaacatacatatttctctctctctcactcacagtctccactcatgaatgaataccaataataaacccctgttctttgttttaattttttaatctataatatttcccattcctttactccatttctaaacaaacaaaacaaaacaatatatttgtaattgatcagttgcagttatacatgcaatcgtggccccaccctaatcatcctccatcctttgctacacgttaccatctatagtctttcaatctctatgaatatctctcttcttacaaaaactcgtacacatagttgtcaaaatgacaaatcaagatcaataataaatttctttttgttttcttgaaatattttttttagagattaatgtgttctgaaatgatattaaaattttgaataaattgaaataag

SEQ ID NO: 160273 - DNA, 512 bp, Cannabis sativa
aaaaaataaattgtatgtttataattatttaagataaaatttttaaaaaaattaaaatgtcaaaactcaaaaaacagagtagttacatttgaaattcttttattttatagacagtaaaaatatttttgatattgtaaagggaattttgattttatatacttaaaaaattaaaaaaatttattattaaaccaaaactctaaaccctaaaaaactatgatattttttttcaaaacccaaaaataccccctcacaattcacccattctctctctgcatcatctctctctatctcgcatcccaaccgcccaccctcaccactacctccgacctccatccgctgacctccgaccctcaccaccacctccgaccacccgcaccaacaccccgacccagccccactctctcggactacccaaaagtcgtaccccttcagcccactctctcatcctctctctgaaattgcaaaaaaaaataaaataaaataaaaaattcccccaggtccgatggtcggac

SEQ ID NO: 160274 - DNA, 629 bp, Cannabis sativa
aaaattaaaaaaatagtatatgggtaagtaatttccttaaaaatagatctaatagaattcaataatatatataaatatataaaatctaatctcaaattgatttataaaaaatatatctaattaattttattaaataataaaataagtaaataagtttaaatattttaaatataatataattaatatatttattataaggtatatgcctgattaataatttaaatttaaattaagacttatatataaaaaataattatttaatctgttgatactttaaatttaaatatttaaaaatatttttttaaaatttgttaaaccaataagttttgtttaatatatatacatataaattagatagatgttacgtgtcaagtcacgtatgttaattttattttagttttaaaattaataatattcaatgtagtaataatcattgaaattgaaagcataatagtgatttaaataaaaacaaaattactattatatatactttgatagtaattaaaaaaaaaaatattattcatcaaatttatcttcgcattgaatgaaaatgctcatgtggttaaactatcaaaacattcaaatttaatttaaactaatatttaaaatttaactaattctaaatatca

SEQ ID NO: 160275 - DNA, 527 bp, Cannabis sativa
atcatggtcttttatggtcttcaaccaattttaaagaacttgaatttgatctgaacgaccataaacgaccttgaatttacactatgcgaccataatagtctcttatgtccttcaaataattttaaagaacttgaatttgctctgaacgaccataaacgaccttgaatttatattatgcgaccatcatggtcttttatgttttttaaccaattttaaagaacttgaatttgatctaaacgaccataaacgatctttaattacactatgcgaccataattgtcttttatgttcttcaaccaattttaaagaactttaatttgctctgaacgacctttaatttacactatgtaacttgaattttctctgaacaaccataaacgaccactaaggtcggacacggtcgcacaagtagcataaggttgcacatggtcgcactatctattttcatacaacgtgtgaccttattcatttagttaaatttgtaattctttttatactttttatatttatgttcttatcatttatat

SEQ ID NO: 160276 - DNA, 578 bp, Cannabis sativa
  modified_base (432)..(457): a, c, t, g, unknown or other
  modified_base (532)..(552): a, c, t, g, unknown or other
aaaaaaaaaaaaaaacaagaaactgcgcgtcactgtatagagcctgaagcattgatataaatatatcaaatattattgactaaagtgaacaggcttattattaaaagctattgcctctaagtatttatggcagacatatttttgttgaaagcatttattgaagatatatgaatgttttgctttattactatttttagatatcaaaatatgtgtatatataaatatcttacctaatatataaaatatcggatcattctacaatctacctccttaaaaaagatgtactgatgtactcttacttgtttcggcatctaaaaaaaaatttagtctatttttttttcatattcaagtatgttacaattatttaagatatcctataaaattttaagaaattcgaaataatatataatatagaaaacaatgttcaaacannnnnnnnnnnnnnnnnnnnnnnnnnaatagtcacgcgtacaacacactgtttgaacacattttcggagtgttaaaacttttttgaatttcttaaaatttnnnnnnnnnnnnnnnnnnnnnataatttacatgaccatgagaaaaaa

SEQ ID NO: 160277 - DNA, 704 bp, Cannabis sativa
gaaagaacagagcatgacgaagcaagtgtggcacgaaggcggtcaaagacccacaattgatcaactcgaagaggagaaagtactcaatgagctaatgatcaagaaagcatggaaaccactaaatcggcaagtcactcaaagacaaagtccatgagaaggacgaggtctgtgagtaggatgcaatttgtgagaaagacgaggtttgtcagcaattacgcccaactggatctacgagatcacttgaatcgaaagaaacctgaccttcacaaataactaggttcaaagcaagaggagcccctccaattgcgaataaacttgttggtggacaagttcaggagatatcaagtgggggaactagggagacaatttggatactactaagacgaggagcttgagccgtatcacacggatgtcataaatacctcttttccctcggtatttttaaacccgcatgtctcgtcgtatgacggaaccactgatctagtctcacatttgaacaactttaatacaataatgtgagcaagtaatgtgacgaacaatttacgatgtatcttgttccccacctcgcttgttggagcagcaagcagctggtttaacaagtttactcaccattcaataacttcctgggaacaatggtcaacggatttcaagaaacagttctaggctactagggatagacaacccgaagcggcctcgctaaccaa

SEQ ID NO: 160278 - DNA, 581 bp, Cannabis sativa
tcatgatttagaattggccgcagttgtttttgcactgaaaattttgtttttttttaatgatacggcgaccaccgagatctacactctttccctacacgacgctcttttatttaaatattatttttaaaaacacattaattattcaaaaatgtattttagaaagggtgaaatcctacttttgtaaaaaaaaaaaaatattgtaaatactataattaaatgatttgactattaaataaattataagaggaatttaaaaataaaaaaaaattataaatattaattactaaaaaaaattttgttaaatattaaattaaaaattaattattttcaactaaagcgttttccattaattgtgggttgagaatcgtaatataaattaaaattacaagaagttagttatgtcatgtgataaaaatgacaaattaaaaaaagtacgtgagaataattgcatgacaaagaagttaggtaagaaatttgataaaaatgataaagaaagtagttaaacttaaaaaaatagaaagaacttaagagcatgtttagtattgttttctgttttttgttttaaaaaattgtttttagaa

SEQ ID NO: 160279 - DNA, 511 bp, Cannabis sativa
gggtcattcaagccctcatagcatcatcaactatccttgggtaaataagagaatctgggtggaatttgttggttcagattcacttatttatcctttagttgtataacaccactcagagggtttgacaaatatacccttacatcagatacaacaaatatcaagactaaagaacataaatacagttacaaagacagttacaactgaaacagttacaaatattactctagggctctgccctagatcagaatcacagatcagtataaaaggaagtatttttctcaaatacaacaagcaataatatacagagcaaaataagagatacaagcagtaataaaaagtcacagccagagagaacaacaacagaaaataacaacaaagaaaagagaggcttttggctgtgagttgtcatcttcatgtgagctcctcctagaatgttcatgtaatagaaaagagagttttgttagtatcaaaagtgagaaaaacagagagaaatataaagttgtaaatcaaa

SEQ ID NO: 160280 - DNA, 1113 bp, Cannabis sativa
tttttctaagaaaatttcataaaattttttatttttattttttatcataatatttaaaattaatttatttttaattgataagtatattttttaggaatatgaaatggaagaaaaaagttaaaaaacttagtacaattaatgatataaattttatataaaataaaaattattaaaatagggtgtcctcagaaattgttggggtgtaaataaattttaccttaaataaaataccaaaaaaaaaaagtttcagatttaaaaatgaaaaaagaattattttttttttgcttattaaatttataatttgagaatttataaaattgggaaatttgaaatttatagactttcaattagagaataattttaaaatgttgtatttaaaaatttattgtaaaagttattcaaaaaaaattatctaaaagagaaaaattattacaggactaaaatactattagacaatcatttttaattaaaatgtcattggagaattaatttgtgtctttaattaaaaattatggcattttatttttatataaggtttgggatttttaatttggggtatttaattatatcaaatttttatttattaaaatgaagtaaataaaataaattttgtaaggaaaattgaaaggtataaatagaaaatgataaaaaaaaaccctaagtgaaaacctaatgtcgtctctctttcattctcccgatcccctctctctagcttctctttgtgcggcgcgatggtggaagagctggaacccgaagctctggaacaggccgagctgaactccgacgatcaggcccattcaaacgctgaacacaacgcaccagatggcgatgcatccgaagaaacggagccgaagcggcctcggcattttctctctcgctgatgtgtcaggtatcgttgtcttttgctcccgttctctctctctctctgcattttctctctcgctactggttcaaatgaaccagaaaaccccaacccctctccctcatccttctctctctcttgctcctgttctctctctctttctgcattttctctctctgaaatgggtaaagttggaagagcttgcaggtattacaaattagaaattgatcatagtggattttgacatttgt

SEQ ID NO: 160281 - DNA, 749 bp, Cannabis sativa
  modified_base (534)..(539): a, c, t, g, unknown or other
  modified_base (670)..(677): a, c, t, g, unknown or other
tatctttctaagtcaatatcactttgttgatcttagatcaaaagatcttaatcatgatatggttaggttcgatcttaagagtgttatttatgttcttaaacttgctcgttaaagcttaccaattggttcgggccaaaacatacatcttggaaacatgataatacaattaagtgggagcgctaatcataaatatagaatctatagcttctatctagacatagaagggaaatgatgatttccttcaagcttgagttaatagagataagtggaagagctcttatttcagtaattatattagtttactgaaatatcatttgtaggaagctaagtcttttaaggataaaatacattaaaggatagaacgggaaattggtccctacttgatgtaaatcatctgtagaggatctttaattatttggattagaacgatggataattcatagcgtatctatatcttggaacatatagagccttctacataattaagagtgtaattctgaatctatagtggcacaaggaggaattaataagttnnnnnntttacttggtaaattctagacctacttattggaagcttgattatataggcacatagtccccacactagttaagataatactgcttgtagactcagttaattggtttgaattaatcaattataattctaaannnnnnnnatgtcttatttatgaatttttacactaagcaagggattgtgaagaaaagaggttttatgatttatttgttaa

SEQ ID NO: 160282 - DNA, 557 bp, Cannabis sativa
ggtatactgttacctagtcatgcctttcggactgaaaaacgctggcaccacttatcaaagaatgatgaaccagatgttcaaaggcctcctggggcggaatatggaggtatacgtggacgacatgctagtcaagtcaaaggcgtgcactagccacgcagatgacttagaagaatgttttgaagtggtccggagatacggaatgaagctcaacccgaagaagtgcactttcggggttaagtcagggaagtttctgggcttcattgtcagtcagagagggattgaggcaaatccaaaaaaaattcaagccctcttgagcatgccatccccaaagaaacacaaagacgtgcagagcctgatcgaaaaggttgctgccctgagccgttttatctcccggtccgcagataagtgcattcccttcttcaacatcttgaagaagtgtcaaaaatttgaatgatctgacgagtgggaggaggcattcaaaaaactaaaagagcacatggccaagcctccaatcctgtcaaagctcgttctcggagaggacctgtttctatacttgg

SEQ ID NO: 160283 - DNA, 505 bp, Cannabis sativa
aacatcttgaaagaatgatccttctaacagaatcataaaccattcataacccacgtcttccaaatattgatcttgacttggatctgttaacttgagaaatccttgccccatccaaaggttaattaaagttctcacctcaattttatggtctttaggaaataaagtacaataggcaaagcaaagtttcaaatgggagggaagatgatcataactcaatttgagagtgggtaagatatcatcttcatgttgatttggtatttttgaaaattccttattcaaagaagaccactctaattccaaccttttaccatacaataaatttcctttgcacaatgctagagtaatccagctcttgtgagtcatcttcaaaagccatctttttaaacaaagaccaagattgatcttcatcaagaacacccagtcgatagggtggttgtttagtagttaaaaatttagcaatgttttcactacgagtagttattataactctactcccaacattttc

SEQ ID NO: 160284 - DNA, 501 bp, Cannabis sativa
aaagcaatacttactcgagacttgaaccaactaggaaactcattctcttgaattgtgtcaagattttgatcaccctaagttgtagctcattcctatgctcactacacacaaaatggaagaaaggttagagaatgtcatcagtgaagacaactaaattgactatgcgaaagtatcttacatgatatacttctctacttcattacaattgttcaaaatgtaccactctgcctttagtttatcttgcattgctaaaggaacaatggtcctctaaccaattggtcgttgaacatgcttaaatgtagagaattccctttcaggcttatttgggaggacatcactatttcgatcttgatagttaaattgactttcaacttctcggaagtacattgaacaaaaaatgaaggcttcgttaactccataagcttcacaaatagatccttccggtcgagatcaatttttgacatattgtttgtacacagacatggctcgttcaattggata

SEQ ID NO: 160285 - DNA, 514 bp, Cannabis sativa
  modified_base (64)..(71): a, c, t, g, unknown or other
  modified_base (482)..(487): a, c, t, g, unknown or other
aatctatatcttaatcttaaatttcatctcaaattttaaatatttttaagacattggagaaaannnnnnnntttgttatgttattattaattaatatatatttaaaaagtgctttttattttttaaatattttaattataagaaaagaaaaaaataagtatatgaaaaatgtgatatttttgttaggagaaatgctaaaaggcaactctccttgatatcataccactattgatgtaattaagtagaaggtctcatataactttaaaaaaaaataagatttagtaaatatcgctaactaattgtagtgtgtaacgttcccgcatcatgttgggattttatgccttaaataaaatccattacaatccaatctgatttgttcttaataagagattagaaatgatttatgttaacccagaacttatagtcattcataattacagtgatgtcaacatagtggaatgtgattgtgattatttgattcnnnnnnctaagtccctgtttcatcagtgctctg

SEQ ID NO: 160286 - DNA, 631 bp, Cannabis sativa
  modified_base (33)..(40): a, c, t, g, unknown or other
tattttattaaagcataaatctacaaattgatnnnnnnnnattattttaataatttttctataagaatataattttttttaaaaaaattagaaataaaaactaaattccaaaaaaaaaaatattaaaacttaaaacaaatataattaattgtaaattttatttatatacatacataaaatatcaatcaatatatacacattaacaccttttggaataataataataataataataataataataaaagaatcaattgcacgtgatacttgaaataatattttaattatttttaccacgtttaaattctttattaaaaaatattatttaatttttaacaaaagtatactttatgtctttttttgaaactataactttaatgttaagtatcacataattataactaaagagcattgctattggacaccaatgatgcccaacacctttcataggtggtaccctacgattgattaacgatattccttaaatcttatcttttttaaattaccaaggaacaaactaatgaattaccaaggaatattgtcttttagcatttctcataactaaaatatcacatttttttttatatatatttttctttttttaattaagatatttaaaaaataataataa

SEQ ID NO: 160287 - DNA, 609 bp, Cannabis sativa
  modified_base (574)..(583): a, c, t, g, unknown or other
gatggatttcttatccaagtatttatccagtattgattgtaagaggaagatggtgatcttccaaccagaaggcgaaccgtttgtttttttcgaatcagttcggggatctcggatcccggtaattttagtactaacagccagggcattgttacgagagggatgtctaggatttttagccgtggtattggataccactcggcctgactctgttcgatcagaagacattaaggtggttcgggattttctagatgtttttcctgatgaacttctgggtttgccaccttagcgggaaattgatttcattattgacttggcatctggagcataaccggtttctaaggccccttacagaatggctccaacaaaacttaaagaattgaaaaatcaactccaggggttgcttgacataggattttcgtggcctagtgtgtcatcctggggagctctggtattatttattaagaagaaagatgggtctttacgtatgtccattgactgtcgggaattgaataaacaaacaatcaagaataaatatcctttacctaggattgatgatctttttgatcaacttcannnnnnnnnngtcttttcaaagattgatctccgacc

SEQ ID NO: 160288 - DNA, 632 bp, Cannabis sativa
  modified_base (248)..(258): a, c, t, g, unknown or other
  modified_base (320)..(322): a, c, t, g, unknown or other
agagtcatcacctttttgtctctgagagacccgagcaatatctttgcgtagtatggcaagctcagccataattccctcgttcagcgttcccgtggagaccgccggtgtgtgtttcttttgatccaagtgatcccgtaggtcaccttgttttccattgatctgatatcttagatcgacgggagggtatctctggttccttcttcctttctctctaggttcctggtgcacagaaacgctttttcggtccnnnnnnnnnnnagggccaagactccctttttggaattttcccctctgcgaacctttccctttcgggaaatctnnncggacctttcgcggatcctgcacctttttctttttccccaggatggaggtaggatttttccattggtttcctttagagggataccgtatggggctaggctccctgaacttatgcttttgagtgcttggtgaggactcttccgttgtttcttcgagtcctgcatggatggatttagagtgtatgtggatccttgctgtctccatcgcttttagcatggtgaccatcacctcttgcatctttttgttttgctctttttgggacgtgatttcagcttcatgatcagtagccttttgtctcaagagcagtagtt

SEQ ID NO: 160289 - DNA, 708 bp, Cannabis sativa
ttgtgataatgagataaatataaatattgaatttaaagttcaaattatccgccataaaagaaatatagtatttttaactttttattttttttttaaatatgtatataaactatataatatataaattatatatataataaatatataaaaaaaattctcttaattatcaggttggttaggttagttcgggttgattgaacgagttgatattattttcaaccagcccaatataaagattgggcaggttatattttcgtcatatttttcggtttgccttttttgttaggttatttcagtttaatttaggcggattgttcgagttgggcggtttacaaaagttcatgtacaaccctactttcaacaatggaggcgagtacagataagtcctaatctttacatcatagaattatgtgtgacaataaattttttcatattttattaaatatttgatattaattttttttctatgtttggtaagtgttcttttggtgaaatggaagtcacaactctcaggtttgaggttttcttttctcatattaataaggtttaattgtctaattgggtatttatgcataagcttgtgatagataatgaacttttatagatggaagaaaatattccatttttttgcttaatgttgttatttttgttattttaacctttatcggtttccccaaaaaaaaaaaaaaaaattaacaagagtacaac

SEQ ID NO: 160290 - DNA, 797 bp, Cannabis sativa
ataccgtggctcaaaaattaatgaaaaatgacagaaagaaaaaaattgagatggatgggacttacggggcttgggcgaggggtggttgggagttatggggcttgggctctatttatcccacaatgtagatcgataccggaagaagagaaataaaaagagagagggagatgaaaagtgtggtataggatgttaagtcatgtcttatttttgcatttaacccatccaggtatttttctttattgctaaaatcagttggcacaattctcgaggccaatcttaccaagcggtcaaactgagtcgtgtattcagtaacactcatattttctttctgagtcagctgagtgaattctttccttttcgtgcttctgactgcctcattgtaatattttacattgaataattcctggaacttttcccaagtcgttattgtaacatcatgagtcagggaaaccatgtcccaccacactagagcatcttcttggaattggaatgtggcacaggccactctatcattgtcggtgatgcctataaagttcagaattctggtaatcactgttagccactgctcggctttcataacatcaggacctctcaggaaaactggaggtgcctgcttgcggaacctttcatacaggggttccattcggtttactgcagcaactggtcctgactgcacaacaggggtaggagctaccagtatttctggaacagggattgcaggagcagcctgctgtctcaagcaccaaatctcttcatcttgttcattaatcctagcttgcatgtctgcaaacctattt

SEQ ID NO: 160291 - DNA, 522 bp, Cannabis sativa
cctcataaagtagtcgttactaggcttattaatcatagtgtaatagctgcagaaggggggttacgccgtcagacttttatatttatgacagtaccaatacgccttctaccatgcgacattaaatgcgagatgactgttcagagggggtttgatatctcccggaagtgctttgctatagattcgccctccaggagtgcgtggtcccctcatgccttctcccgaaggtgcctctttagccgtccctctaggtttgcaaagacttagccaaattataccaaagccatactgttcagatctacgtgtcgcgatcgcattggtccacgtattttgggcaaaatcaggggcaacatttaccccccaagcctcgtttggtgtgaagtaaatgaagcttgcttagatgcctccggttgtcatattaactaacgggcacgtgcctcgggcgcatgggttgcatttatgactgtcattattgcagttttttactttttgcaggcaacaattcgtttcctgtccattaatgat

SEQ ID NO: 160292 - DNA, 557 bp, Cannabis sativa
  modified_base (39)..(50): a, c, t, g, unknown or other
aattaaataaattcataaataataataaaataataaaannnnnnnnnnnntgcctttactaatccaaattactaaaggggtcattacataggttgtattcagggcaggttatgtactcaactcctataaaaggaaggttgaggacacataaagaggacatcaaaagaaaagaagagtttctctctaaaaatctcagttttcatcattgctccttattatcttcccttacacacaaccatcccgtctcatcaattttcttcttacacacaaccatcccgtctcatcaattttcttcttacacacaaccatcccgtctcatcaattctcttcctacacacaaccatcccatcacctctgccaagaaccagactgctcatttagcaagctcctataaaaaccaggctgcttatttagcaagctcctataaaagctaggctgcatatttagcaagctcctataaaaactaggctgcttatttagcaagctcctataaaaaccaggctgcttatttagcaagctcctataaaaacaacgctgcttatttcataacctttata

SEQ ID NO: 160293 - DNA, 617 bp, Cannabis sativa
  modified_base (155)..(163): a, c, t, g, unknown or other
tgttgtttggtgttaagagtatatggggaaggatggagagtaaaataaatattaaaattactattttatcatttttaatataattatatattattttttttcaagggtagaaaagaaattttgtatcattttttgtctttttcttgaattccccnnnnnnnnnagggattaaaaataatgtgtttggagggagaccctctccttccatctctcctcttccttcttctctccctcttgccaaacaagaggattttccaatccctccatccctctccctccacccctccccctccctccttctctcccctctaccaaacatagtgttaaatttaatgtttgaaataataaattgttgaatcggtaaagtaaaaaataacagagtgtagatgtggttaatcaatgttttgtctttcaatcatcacgtgagtttataataaaattgatacgtgtcctcaattaataagagggacagagaggagacagagagttttgagacagaagatttttattgttaaaattaaatgtagcttgatatgatgtatgtcataatactaatgttatatgttatgatatatttgataaatttaaaattattttatgactattctattaggttt

SEQ ID NO: 160294 - DNA, 503 bp, Cannabis sativa
  modified_base (135)..(136): a, c, t, g, unknown or other
tgatttgaagcttgttggttgaaagaaaggtgttggaggcttgaggcttaattgtgcaagtgtttgaggtagttttcttggttttaattttatgcttcccttgctgaatattgtggtagaaacatgcttaggttnntttgattttgggtcttgcatgtgtggtgaaaaggatgttaatcttgtggaattgagcttctatttattgtgtgttttgtggttgagcttgggcagtgattacatgctatttctaggttggaatttcatatttaaattggtgttatgctgctgaattgtaataggtttgagttgggttgagttcatgctcttgaatttgagattttgatgagtttgaggcatgtgtttgtgtagcatgcaatttgaattattgagggtttaatgctgaattttgatgtttgatgctatgatttaaattccttgttgattgctagcatctatatttggttaattgaatgtttggttgagttttgggatggaaaagattg

SEQ ID NO: 160295 - DNA, 615 bp, Cannabis sativa
  modified_base (446)..(446): a, c, t, g, unknown or other
  modified_base (472)..(476): a, c, t, g, unknown or other
tcaatgcccgaggaattgaagccaatccagaaaaaattcaagccctcctggatatatactcgccaacaaaaaccaaagaagtgcaaagcttaactggtcgaatcaccgcactcagcagattcgtgtcaaaatcaatagacaattgtgttccattcttcaacatcctgtgaggaaacaaaaagtttgagtggacagaagaatgtgaaagagcttttcaagagctaaaggcacagcttgaaaaacctcccatactttctaaacctctggacggtgaggagctggggatatacctagctgtcacggagcatgccttcagtgccgtgctgatcagagaagagaacaacgtacaatacccagtctattacattagtaagagactcatcgaggccgagggccaatattcgttgatagaaaaactcgtctactgcctcattctagcaacaagnaagttgaggccttatttccaagctcnnnnngttcgggtatataccgaccaaccgctacgacagatactgcaaaagccagatgcttctcgatggttactcaagtgggcggtagaattgggtcagtacagaatcaacttccaacccagaacagcaatcaaaggccaggcct

SEQ ID NO: 160296 - DNA, 501 bp, Cannabis sativa
aagatcttcttaaatatttatttaattacttaaaatataggaacttataattaattaaatctaaaaatggaatttttacttattggtaaccttttattataggtaaaaaaaaattggaaccacatggttacaataaaatgtaaccattgaatagtcacccttatttgttaatataatgaatacgataattaataattaaaacttacagttttttgatattgtatgtaacggttggggtttgcacgtccgacgatatcagtcatgtatttcaaaacataaaacacattcttagtttttaggttgtctggacaatttgctagtgaaattcctggccatggcctgagatacacatttgatgtccctataatctggtatgctctgttttaaaaattatattaacatttcaatttattagttaattaaaaaatttgttacataaagagtaattaaattattacctttccaaaattaatgtaatttgtaagggaactttgtggccac

SEQ ID NO: 160297 - DNA, 789 bp, Cannabis sativa
ccaaaccaaccagtcattgagacaaccaggtgtttctatatttgatagactgggaacagttcatgatctcagaaacgatctgaagaggaggagaggattggatgacccgcatgatgtgccaatcgtacagcccagaacccgcgctctaaatcccgctaaaatatatgttccaaggcctatccggtcagaggaaaaatgatctcgagctggaccgagcacgcagatcccctttctccccagagattaatgtcttggaattgcctcacaagtttaagatgtcaacctgaaagatgtacactgggaaagaagatcccttatcccacctcaagtatttcgaaatgcaaatggacctgcaaggagcacgaggagatgtatgctgtagagtttttcctgccaccctctcagaggtcgctcaacaatggtatttcaagttggtgcccgaaaagttcaactcatggaaggctttctcctcggagttccatgcacaattctcctcttcttgccagcttccgttgcacctaggagatctagtcgaagtgaagaaaagaccaggagaacctctctgagcctacatgagcaaattcatgacggaggcaactaaggttgcacgggtgactgaagacggaaagttgtccgcgatactggggggcattgaagttattggcgaactttcgaaggatatcaagaagaatggaccagtagattcaatgagtgacttccttgaccgcgcagaaggttttattaagcttgaagaagccattcagtaggcagaagttgagcaaaaacctg

SEQ ID NO: 160298 - DNA, 561 bp, Cannabis sativa
  modified_base (495)..(499): a, c, t, g, unknown or other
cattagttgcacagacaaatgcaatagaatagatggaatacaatgcagcaacaacagaagactcaacaactcaacaacatacaatccaagggacaatgctagaaggtgggggagaaaatttcaacatcatggactacgcaaaacttgtggcagaggaaatagttgagcaactggaaaacaacaaaaatagggagccagaaatcacagattatgatgatctactaatcacagatccacaacatcctaaaatagaagaaacacaaatatacaaggacaaagaaacacttcaaagtatgcttggtttctatgcaattagaaacaatttccaattcaaagtgaaaaagtcttgcgcaagaacatacaaaatttgttgcttggatccaaaatgcaagtgggcactaacggcatctagaaaacggacaaataaagtcattcataattcgaaaatatgatagaaaggtgattcacaattgtgatctaaacataagattttcnnnnnaaagacaagctacaacgaagttgattggaaactacatcaagccaaggtttaccaacataaaa

SEQ ID NO: 160299 - DNA, 510 bp, Cannabis sativa
tatatatatactttcatattatataatcctgattatatatatattcatactcaatttttatatatatattcatattcatataattccgattatacagactaaatttttttcattaaaattaaagtccaatttttatgtgttttaattgcctaaaacatacttgaatctctttatttatgcatggagattcaaatgggattgattccatgaatttttatcgtcggaattcgttttttctgttagggtttgggtcgggtccgtcgaacccacgtggctgaaaaacgggtcaaaaacgacccagttggctgaagaagacgaccccaaacgacgtgtcgtttttcaatatgtgggtagccttctagaaaaaaggacgtgtctttttacatatagctaaaaaatgacatgtcattttcggggcagtaactttcaaaaaaaaaaaaaaattccaaatttttataaattttttttatttggaatattaattattttcctattttgtgttaatttagt

SEQ ID NO: 160300 - DNA, 535 bp, Cannabis sativa
actctttgtaaataagaaccacgacgacacaagacacgcatcgtcgacctcggaaggaaaaatggccccagctcgctattgagatcactggaacaaagcttctgtcgagacaactgcagatacaataaataaggacgtgttcaaaatacgatcattttgacccagttaaagcgcgaaaatcacagctatatgattttcaaatcataatcgcatttacactacgtgatatgtaattaaatcccatattttagggatgatttttgtaaacatattacaatcaactttgtaattaactgcccactatgtaattataaatagtggcaaataagatcaaaaaaaggaagaaaaaatggatacgggagaggccctaaaagacaatcagaaatcgaaataagaatggctcgtggactatgcagaaatttaattgcaaaaccacgtaagaaaccctgtgttcatgcttttgttttttacaacttttattttttctgtgtgaaatcactactgtgaggctcaaatttggttaatgaaaatctgc

SEQ ID NO: 160301 - DNA, 686 bp, Cannabis sativa
catggacatataggagtccttaggtgatgagaaagattgttcaaataatatcgaatggggcatgattagaagcattggcacgtcagcttagtgttggcatcttgccacacatgctaccttgatcacgagtgactaggtgagcgacggtgttggaatttttcttatcatagtgagaacctatggacagtggagtatcttagctagagtgcatcaatgcatggatgcactcatggatgcttgtgagcatcactcatcgggagttgttcgagaggcgaaagtgtgcacgaggcacacggtcacgcgaaaaatgagcccattattactcggatggttggaaggttgaccttggctaagacaagtcaaggtggtgcacaggtgttctgctgcctaaaaaggtgagcatgtaacagtttatatcagagctatgttcatctcaatgggaggtgaacctggttagcttgtcctagaggggatgtaggcgtgtggaaggactaagatggtttgaatgctggaacaagatgtcgttgagccaattaatctcctaaagtggatcagtagactgagatggagttgagactgggttgcttttctttgtgagaatactagacatcttagagaggagacgatgatggttgcttcgaattaagttcagagatgctagaaagacaactaccacgtgcaattgt

SEQ ID NO: 160302 - DNA, 623 bp, Cannabis sativa
tcgggacctagacccggacccaaactcaggacccaaacccggacccagacccggacccgaacccagacctgaaacctaaacctggacccctataactcgaagccagatccagacgcgtgacccagacccaagacctaggactcagacccaaatccagacccgaacccgcactactacaaaattgggctttagagacagtttttaaggacttttagcatcggttttgataaaattcgctaccgacgctgttccaggtgacgctgtagggttcataacaaccgacgccatatggtcttggtatttttcagctttacaatttctttttttagcataatttatatacatattattttattattaatataattaaattaaatataaattacatataataagcataaataaaaattaaattaaaatgtgaaataaatacacatttacattagtctaagtgtttgtatattagctatctttttattaatattttatattttacattatgtgtttgtattttgtagtttattagaatcatttttataatcttttaagttatattttgtataataattagtatattaaataataaataatgtgtaatactttaatttttatgtaatttaata

SEQ ID NO: 160303 - DNA, 517 bp, Cannabis sativa
cttcttgatgaaaaggagaatgagatttataaactcacagctgatctaattcgaaccaagcaagctttacagttcattcgcccaggcattgctactatcaatcaaaccctacagcttcagaagccctatggtgatcgaacttccttaggatataagatgctatagaaacaagggaatgatctgtctgttgagcattctttgccctccaatgtcgattcatcaaagaaggaagatgagttacctgacacctcaatcaccattaacgaatctgactcatttgagaggagacaggttccaactggacccattaaactcaagtttgaaggaaggaggactgatgctgacaatctattacagaatgacaatttcattcctacatgtcatttctgtaataggagaggccacatttgtcccaagtgttacaaattgcaaaactacttgaaagccatgatcaatcgtccaaatagtttccctcaaccaaataagtcacatggacgcaaacctcgtcgagaatgga

SEQ ID NO: 160304 - DNA, 577 bp, Cannabis sativa
atctttccactgccaataattaaacaatatttctactatctgaataacataagaaaaataatagtaaaataaagtgaacaaattcagaaaatatcagatgtgttttgtctcgtgacattgatgaagactctaattgttcttctccatcatattcttattgctcttctccatcgaattctacttgttcatctccattagattcagcttgttcttctccatccgattctatttcttcttgtccacttgattctgatttttcttctccatttgtttctgattatttttcaaaactttccattgactgatttaaataaaaagaggtcatattatatcaatcgagtaacataatagtcaagctttacccacaagtggttgagctcaactcaagacagttgagctttatactaacattacaagaatttagagactacatctcgaccataaatggtcgagctctactctacatagtcgagttttacactaatattttaagacttttgactacattggtcgagctctactaaaagcaatcgaaatttatactaacattttaattataatctcgaccatttatgtt

SEQ ID NO: 160305 - DNA, 516 bp, Cannabis sativa
ctgtagaaagcaactccgcaacaaatctgtggtccctgacaggagacccaatgggcttagggaggaaattcttcatgcgagggatccaaggatcctcccaaattcgtgtatccctcccatccgccaccagtttgcaagcacctttccttaagatggatttggttttaatcacgtttttccaaaaactaagaattagattctttgaaaccacagttaaggaactcttttcttttgaggtatttcgcttgaagcaccctacagcacagagactgacttccattaaggatgttccacccccacttagctaaaaaggcttggttcattcctctagattttctgaaccccaggcccccaatagattttggaaggcaaattttatccctcgcttttaagtaaatctcgtgattgtctttctcaaaaccccaccagaagtcacacaccatattatcaattttggtagccagacggttggagagtttagtagtttgcatagcgtacatcggcatcgacaggccc

SEQ ID NO: 160306 - DNA, 628 bp, Cannabis sativa
  modified_base (551)..(557): a, c, t, g, unknown or other
agggtccaattggtaacttttgtaaaatagagggtccaaaatggtatttaccctaaatttaaacattataaacagataatttgactttgctttgttagttattatgtatgattagatgttttttaattattaattataaaatagatagtttatttttttcttaaattatttgttaagagtttttttttatttttacacttcaaaataattttttttacattttcacgaaactccacacagaaattcctatagcaactaacggaacaacctaaatcgcaaccaaaatccacatagcaacccacatggaaaccaccgcagcaaaccaaactgtaaatttaacaaaaaaattaaaaaataatatatgaggtaattctcctattattattaaggtattatatacattttaaaaatgtaaaacttaaaagatatatacctatgtaaatctgaaaaaaaataaataaataaataaataaaaaataaaaaattgttgtgtcctatgttgataaaatttatttttattagatatttttgtttttttattattattattnnnnnnnttattattattattattagcttaattgaagttttttttttaaaaaaaaggtaataaaaaagtaaaaaatta

SEQ ID NO: 160307 - DNA, 536 bp, Cannabis sativa
atcgtattttgacaatacctctagttttctttaggtacaatgatatagttatccgacatcaccactcatctggtgtctactcggttcaaatgagttatcattatgcagcgtctcttgaagatattgacaacagctcaagctcatctttggcagatcagtgtggaagttcttttggtcactccagttaccacaaaaaatcaaaaattttgcctggcgtacttacaatgatgcgctccctgttgctactattttggtcagaagaaaaatcattacagatgctacttgttctatttgcaactagggctgagcaacagtcggtttggtcgggtttttacacacaaaacatcaagaatttagttttcgattttcatggttataatttgaaaactgaccgactattatataaatgtaataaaaaccgaccattttaatccacgatttggtcagcttaaattgaccaaaccgagcttcatctttttttttttttttaaaaaaaataagcctttaaatttgctataattatttgaaaactaaaa

SEQ ID NO: 160308 - DNA, 553 bp, Cannabis sativa
gaggtcctcatccctatgcagaatatcaggaagatgtgaataatttgccaatggatgaagcaaaagccattggaaattactctcaaaaaaacaacaactatgggtttaatcaaggaggaaatcgaagaaatagtgcgttctatcaacagagaaatcagaaccagtcacagaaccaacaacagactcagcaacaaagctctagtgcaaattctagtcttcagacagatttattattgcaattcatgacagagacgagatcttccattaaagacttacaaactcagatggggcaactggaaactcagacagcagctcgtcctcatggtaacttgcctagtacagccgaagtgaatcctaaagaaaattacaaggcaatcaccctgcgaagtggaaagaaatatgatgggcctgatatggtacaaccagtggatgaagaaattaaagatcaatcggcaccaactccaacatcaacaaagacgaaggctactaatagtcttgcaccacaacaacagcctccaccaatcagtatagatcatcatgtgaagatacctta

SEQ ID NO: 160309 - DNA, 606 bp, Cannabis sativa
tactgtaggtatagaattaggtccgatgtcttccgtagacatcgagagaatggtgcaggagctcgctgaaccaggggccattgagatttgagacgctgagtctacggtgtcagcccactattatcttatccattccaggcatgcccctgacgttgaggttgaggagatggatgaagattgggcggccccagcgcgagagtcaggcgaggaagaagaagaggcagaagggagtgggactgattcggtggacgacactcaactgaacgagcccttctcgtgcgaggacttagtttcgagggttaccaaatcggacctcactacctttacaagactaaacttgttgcgacttgcttctttgcgacctaaaccaactcagagggcgcatctgtcttttaccaatccagcgattattcccacagaggatgtggtaatctcaatacccattctttgatgtggggtatcggtccctttttatccctttattgcggccatcctcacacgttcgatgtgtctcttttccaactaacccccaatagttatcgcacagcccttgctttgtatgcgatgtatatggagtacgtacatagggctcccacggtagaagag

SEQ ID NO: 160310 - DNA, 788 bp, Cannabis sativa
cccaatctattgaattttgaagcatcaggtggcctcagtgattggctggtttggccggtaggttggctagaactgtcagtttggatggagttattaggtataactccacctcaagaacggtcaaatagggtctagccgtctaccgcttagcccataggtgggacctgtgatcgaggattagacgactgaccattatgagtctgggcagtatgcccagcaagaatttcttctgtaccactcagtgggataatgaacgtagcagtcgattgctgatagcaactttataggcttttcgtatcagtacggtagcctaccttgtttggtcatcgatggctgcttgctgagcctttaatgtttccatctccctatccctccactcaattaactggcatcgctgctcttcaaacataaggtttattacagcacagagatcctcttgatcatgatgcaaggtgttaagtgtgaccttgcatgattccaagggcgttacagaggttttgaatctcagtgtcatccccgaccatcgtctgagcattggttgtggacgggattccagtgatgtgagtgctttgattggttgcagaactggtattcccagtctcttgcacacttggtgtgatcccagccaaaagggaagtcacaccttggcccacagtaggtggctgtgtgttaggctgctcagaattggttcctggtgggacccttttattcccagtggtttgcatggaaggatctgtgagcaatgggtcactctgatcaaccaagcctctacgagtttacaccaccat

SEQ ID NO: 160311 - DNA, 546 bp, Cannabis sativa
tttttttttttttttttgctacttatttaaaagagatacactcatacattgttatctgttatcttaatctgttttattatccaaaataatttttagttaaattttttctcatggtcatataaattatacttgtttaaggcatcctgcaaaattttaaaaaattcgaaaaagtttaacacatcgaaaattgagttcaagcaatatgttgcacgcgtacctattttattttatacgcctgtaaaatagattatttaaacattgttttctatattgtaaattattgtaaatttcttaaaattttgtaaaatatgttaaatagtcataacatacatgaatatcaaaaaaaaaaaaaataaactaataatttaattcattggacacattattttctatgttagtagctcccaataacaattgggatcaacattgttttcagggttcaggtccgattttgggtcggagattggtgttgaccccaaatcttttgtaaatattatattacaagctaaaagggaccatttattatgtattaaataatacaacata

SEQ ID NO: 160312 - DNA, 650 bp, Cannabis sativa
tacgacgatacctttcctttgattggagactagttagattgaagaagtgtttgtttgtttgttgagtgagatctctcatacttaatgatcaggtcacgtgtctatcacatggtactttttataacattggctattgatttgaaatggtgcagattttagctcgagtatgcgatagggtgcagaaagtgaggtgagtgaagagcacttagttgcttgtgaatggcataattttttaatttcttgaccaatttaacaatgtcaccacttgttttgatataatttttcaagagcaataaaataaaataataatttatagactagaataaataaaaaaaaaaatcaacactactacaaaaaccccctttagaggcagtttttaagtcattttagcgtcggttttcgcaaaattcgctaccgacgctgatcagggcgacgctaaaggatttatatgaaccgacgccatatatatgtacccctatggcgtcggttatttgttaggaaccgacgaataggggtcagttcctaacaaataaccgatgccatatgtagcgtataaccgacgccaaaagcaagcgaatttcagttttttcaatttttttttaatttaattatataattttaattacattttaattatatatttattaatt

SEQ ID NO: 160313 - DNA, 726 bp, Cannabis sativa
  modified_base (309)..(311): a, c, t, g, unknown or other
taccccaaataacataaaaacaagcaaaactagggttcctaaaaatcccccaactggtagactagttctgcaacaggaatttcggttctgggaatctctgaaccctcatccgaaattccagttgcacaaccggaattccggttcctcgcaggatacttttaaaaattcataacttgctcaaatcaaacccaaaccatatcaaaccttccagacctgttctaaatacccctaagaacatttctaaagcataaacacagcccagaaaacacagaatcgaaaatcattattaaagctccaagctttgagttnnnaactcaaacttggttaaatctaattacatgcatccaaaccagctcaaatctacctaaacatgcatataataacttcagaaaacaacaacaagcatcaacaaccaccgcagcaacagattccaatatttcactttgaaaagcatagttttgagctaaaatatcacaactttaaacaacataactatcatgcatcacaagcagctctattttactcaaataaacaagattaaacctataaaatcattccaaaaacatagcagcaacacacctcaaattaagcatgcaattcatcatcatttcatcaaaatttcaacaaaaaataccaagaacaagttttaggatcttaccaagcactttgaacaacacttagattgaatgaaaatggcttgaaaaatcaagagaaatcccagcccta

SEQ ID NO: 160314 - DNA, 524 bp, Cannabis sativa
  modified_base (208)..(210): a, c, t, g, unknown or other
taaaagaccaaactaccctgaaactttagcattctgacctctcctaacataagtaaagcgcactttggtcctaacagaacaataaaaagatttatagatattgaaacaaaatgataataaacaaaaaaatctacaaaaaaaaaaaacaaacaataaaactaagatggaacaagcaaaaattattatcaactaaaataataataataannntaataataataataataaacattctcgtttatcacagcaaataaatgaatcacactagcagcaaaataagttcaatccatgaaaacgtcatataaactgtaaaaagataagacccacggtacaaaaacataattacactcttaaggttatttttgtaaattaaatgcaaaattaggtgccacatgtaaattttccattatttttcccatccatggaataaataatcccatacatgtgagtttttttatcgttttttttttttcaattttaattttgttaatatatttaatatttaataagaattttaatgaaag

SEQ ID NO: 160315 - DNA, 661 bp, Cannabis sativa
ttttatttttcagatcttcctaagtataattttataaatattcaatcaaaattatatttagagttatctaaattagtaatttaaattaaataaatatatgttaaaataaaaagattaatgtatataatcaaatgaaaatacaatccttaaaataatgagcttaagttataaggacattcgatctccattcttggttctacatagttcttattttagtgagatttgtccctaatagatggacattcattagcaatttaacgttgtagaatctcaagagataagttttatcccaatttttgcactctgacgtgacatcacatgctcgtgacacgtggacttgattctccctgcctgcccgaaggagatgttccgagtagagtaacgcatatacctacacgggcgaggtcctcccggccgagcagtggacaattcgagcaacatatcaacacttagcaattcaagcatttgcatcatgaagcacatgagcaatccctataaatctgggatcatatcacagagatatgacaagctttctaaatcccacaatcagtgtattctaaatatgtaatatgtatgcttactaattatagatattgtaagtataaggaaaactttccctcaagcatgtagtcctataaatagtgatccattctcactggta

SEQ ID NO: 160316 - DNA, 625 bp, Cannabis sativa
atgactctatcccacgaatgagttgcaatccaactcaaagcttttttaatgcctagtatctcagcaatttcaggttgaaaacaaccaatctttcccttcttgaatgcttctacaatagcaccatgatgatttcgagctacacaacccatgtcaaagcgcccctcttgttcaaataaaaccccatcaatattaactttgatcttgtttaactcaggtgcaatccaacgctcaagattttgccccccatcatgtagcggagacaacgaaagacccttccttccttgagtaaatttatactgattaagcatgttcctagctgatgccacaatatttgatgcagaccaactcttcttttgccaaacaaattcattctgcgcgcgccaaataacccaacttaccacaaccacttcttccatttcaccttcgtgccctctgccgaatatccccaacagccagctgttgaatgtggcagccccagccccgacgtcgaccatgctgcaattccaagcagctttaacaaactcacactccactaacgcatgttgaacggtttctacatgagcgatacacagcgaacaatcagcattgacggaaacatgacgtttttggagctgaaaacaagttg

SEQ ID NO: 160317 - DNA, 725 bp, Cannabis sativa
tccgcttctagtttcgattccagtttcaagtcacgggatacgggtttgggtcgagtttggatccgagtctaggttcgggtcatgatttgggtctgagggaaggttcaggtccgggtctgggtcaaggtccaggttccattcaaagatcttggtcccgttctaattcatgtttcagttttggttcacgagtgtgggtcttggtcttggtatgtgtcagggtcttagtttaagttcgagtttgggtttaggttctagtctatgtccttgatccaaacaccgagtactggtcgggtccaagcatcgagtcccgaatcccaggtgtcgatgtgggtcctatgtccaggtttgggtcttgggttgggtcctcgatcctcatccaagttctgagaccaagttctggtcctagtccaggtctgggtcgcccatctatgttcaggtcctaggtcctggtccgagtccaagttcgtgttcaggatcaggtcgaacttgaacttcggaacagatcccaaacacagactcggacccatacctacaccgggatcaaaacttgggaccttggttttgactgagacatagacaaaatctggacccaaacctagacccaagccgtgatccggacttcgacacaaagcaaaccctaaactcagacaaggacccaaaccctgacccagacctagacccgaacccgaattcggacacataatcgaaatttgaactgggaatag

SEQ ID NO: 160318 - DNA, 758 bp, Cannabis sativa
atgcgaatcaaaataccaaaaggacaactgttgacctcgcttctagccaatgacaataagtcaaaaataaagagattaagattattaaaagaaagcaaaaaataataaaataaagtgaataccagattgtaaagaggttcggccccgtaaggatggatatggcctactccccttgtattgtattgacttgagagaaaggaacaaagtgttcttcctcttgaaagctcttacaatggaatttcgagtatgtttctcacttagatcactctttcttctctagaatgtatttctgcagcaattctttcgatgcctttcatagtgagattaggccactatttatagggacttaatagatgagggatggtttcccttttgcttataatgaataaaataagaaactccattaattctataattacaattcaagaaataggaaacttaaaatatgttgtcattattctctgactcaatcccatcattatagggattgtctttgcgtctggacacaacgagaataatctttgaagttgccatctctcatacttcgctaggcacaaacatgtcccaacctcgtcgaacatcttctccacaatcctgctcggataacagatgctggttattcatttataggctacgagggatactctcctccgtccaggtatactactacaaaaattatgtttaacaacacttaatcaacaacccttgaatagatcgtgtttctaatttatctatttttataattacacacactaaaa

SEQ ID NO: 160319 - DNA, 746 bp, Cannabis sativa
aaacccaacaaagacgagtgtggttgtctatacaaaccatttttttctagagttagtggtaaccttagaaggtccccagacatcactatgaaatagataaaatggttttgaaggatgataacaagattttatgtaaggttttcgttggcttttggccaataaacaactttcacattgaaaagacaaaagatttaacagtttaaatagtgttttaaataaaaaaaactaggatggcctaatctataatgccaaaccattatttgatcataaacagagagagaactaatgctactgaatccttgtgcaattttattttcagaagcattatcttcgaaataatagagtccattaatcatcctagcattgccaatcgtcttccccgaactctggtcctgaaaaacacaatgagattcgtggaaaaccacacaacaattagaatctttagataatttgttgacagataagagattgcaattaagtttaggaacatggaggacagatttaagatctatccccttagaaatcttaactaaaccttttactcaatggatgagaaattaccatcaactattttagctttttgatctcttgaacaaggtatatatgattcaaaagatttagaagaacttgtcatatgatctgaagttccagaatcaattatccatggtggatgatttttgataacatcttaaagcatttatttctaatactttgttacctgcatatgcaatagaggcagtaggaat

SEQ ID NO: 160320 - DNA, 599 bp, Cannabis sativa
tttttgcccttaattgtcgacaacttgtcgacagtatgtcgatgtgtcgtcgactgttttaggaaattgcttacaagtttgtattgtcgactgaatgtcgacaggatgtcgatattttgtcaacattatgtgaaattgttgcccgattgaaattgtcgactgaatgtcgatattttgtcgacataattgaattgtgttggctgtttcataatgtcgatatcatatcgacagcatgtcgatattatgttgaccattttttaaattttttggcagtaatattggtttgttttttgttttttcagatggctcctacactcataattccagcacccaagcattttactggccgcgtgacatatagaggcaccagaatttttgcaaaaatcaaagctcggtttgaggattacaacctaaataacacggcgaaggaaagccgtttcgacaacttttggaatgtcgttccccttacattctcctcgctgctatttcaccagttgatgctgcacaagatgaaggttgatgctcaggaggagttgaggatgcggttttacattggtcggaaggagctcagattcagagtgcttgagtttgcactcatt

SEQ ID NO: 160321 - DNA, 607 bp, Cannabis sativa
tttgagcagccacaagatgagaagatctaggtgttcccaattattgacataacttgttaaacgacaagctcaagtcaggtcgggttatggtaagatattgcaatttaccaatgattctcctatataaggtggcatcagcaaggggatcatctttagcatcttgacacaactttagattagcttccataggagtattcattggtttgcatcccaagtatcctagatcttccaatatttgtagaacatatggtctttgggaaacaaaaattccttgttcagatctagctacttctaaaccaaggaaatatttcaattttcccatgtcctttagcttgaacttgctgtctaatctaatcttgagggcttcaagttctttcaagttgttacttgctaagatcacatcatcaacatacacaagtaagactatgaaaccaacttgtgagtgtttgatgaaaaaggaatgatccgtagcagaatgtgtaaagccttcctcttcaagggcattggaaaacttttcaaaccattgcctagatgcttgcttcaagccataaagagacttttgaagcttgcaaacagcattggtaggtagctcccccttaggactata

SEQ ID NO: 160322 - DNA, 514 bp, Cannabis sativa
tggtccatattctgtaggaattagggagcctcttaattataccttcattcaaaagaagaggtaaattttctaactctataatagaaactggttttattaatattcctttaattttatttttataaccagttttataatatattttttatgtttgatatttttatatttttgtttgttaaaacttttattaaatgcaatgattgtggagtttttgtgataaagtttgttgatttgttcatcaatgggaagataaatgagataccacaaaatatggctgataggattgcaacttacagagatgatatggctgttagtttatttactcatgcttggaggaaacaaattggtgggtatcagactgaagatgatgttcaagtcagaaaggaaaagtcaaagaaactaaagaggaaggaaaatgctaaaggcaaaggaaaaggaaaagaagtttgagaagaggatgttgatgttctggagcagtctttttgttaattttttttatttcatttagataact

SEQ ID NO: 160323 - DNA, 535 bp, Cannabis sativa
attttaacagaaaactaacgagtggaggagtgaggaaaaaacttgttcaaatttcccctgaaaagaagaatattttctatttttgaattacggggccctttcaagcaattttcacccgaaacctatctttatattcacttcttagtagtacgaattcattgtgactagtggcaaaaaatactccgagattggtccaggccacatttcactatgggttaccactatcagtacttcgtgattttcactgtttcgattaaaattctcgttagcgcatgaaaactaatttttctctcaacgtgtccaatagaaaactgatgcacaacggtcttagcctcgtccccatgaaatttcacgagttatggagatgtgtagggtgagattttaacaggaaactaacgagtgaaggagtaaggaaaaaactttgttaaaatttcccctaaaaagaagaatattttctatttttgaaatagggggtcatttcaagcaagttttacccgaaacctatctttatattcacatcttagtagtacgaatt

SEQ ID NO: 160324 - DNA, 552 bp, Cannabis sativa
aaatgagtaaaaatattataaatcatgatcgtttgttattttctaattatttttaaatttaaatgaaataattttcaaattcctattgtgtcaccttaattttcttattgattcatttaattattataagatattattagtaattattacaaaaaattaattatatattcattaatttaatcataattagatctattatattattatttatattttgtagttgtatataatttttttagtaagtattaggaaaaatatgaagaaaaatttataaaatgacacataaactcttcttgttccttttcttagtgttttcttttatatttatatatagatatacatattgatttatttgttgaaaattgatttttttttaattttaatattttgcaaatattgaaaaatgcaaaaatatgtgtaaataaataatatctatcatttacatatcatgatagaatatatataacttaaaaatttaacatctacaatagtctcttatcaaagaaatatatataaaaaaatatatatttaaggtgtcttattattctaata

SEQ ID NO: 160325 - DNA, 528 bp, Cannabis sativa
  modified_base (105)..(126): a, c, t, g, unknown or other
gatcctgttacaaaatacatttacaaaagtttgctattcatatacaaaagttttgctgcctagcgactacatagcaaaaggccttgatgtcccaaagatcgtacnnnnnnnnnnnnnnnnnnnnnncatgtacaatcttcatctgcttgtcctcacatctgttcagccttagccttgcccttacctacacatgaaagtagcactgtgattcgacagactcagtaagaaaagcataacataaaacataatcatatctcaggttataacctggcacccatacacccgatcataaccctatccccgtgtctcacacgatacagagtctagaacgttcgtacaacaataccattgaccataatgtcagcctatactcaatataccggtcctactccaaccatattgatgtgacaacatctattagtattcaaccaatatacatttattagtaatcaatacaactctacgtatattattactgctatcaatgtactctaacaggtatagactaacatgcacactaaacatgta

SEQ ID NO: 160326 - DNA, 547 bp, Cannabis sativa
tcatgtattttgctcagatacgctatcatcttttctccccgaggctcgcattctccaaatacatgatttaccactagttgtgaatcgctgtagatttcaatgtgttcagctttcatctcccgggctagttttagacctgcaattagagcttcatattcgacttcactattagatgctttaaatccaaacttgactgcagcgtgcaggtgttgccccctcggcgtgacaagggcaattcctacatcagatagctgatctgtagcttactcgtctacatgtaatttccaggttggcttatcttcactgttacttggctgaggtgtttttaccggctaggggttgctttctggtatgatttcttccttgcctgtgcattctaccacaaagtctgctaaggcttggcctttgattgttgttcggggttggaaagtaatttcgtattggcccaactccaccgcccacttgagttgtcgtccaaagcatctggcttttgcaatacttggcgtaatgtttggtcagtgtacacccgaacaggatgagcttgaaa

SEQ ID NO: 160327 - DNA, 539 bp, Cannabis sativa
ggaagaagtgctagctttcttttgtgctatgggagtagagatgacagaacctaaaacctatgaagaagctatgacaggtaaggatgccaagaaatggtccaaggccatggatacagagatggaatctctgagaaacaacagaacctggatactagttaagaagcctaaggggaagagcatagttttatgcaaatggcttttcaagcataaggaaggactaactgagacagatcctaagaagtttaaggcaagactagtggctaaaggatttacacaaaaagaggggatagattttaatgagattttctcatctgtggctaagtataaaactattagaattatacttaccatagctactcaatttgacctagaagtggaccaaatggatgtaactacatcatttctacatggagagcttgaggaggagatctacatgcatcagcctaagggatatgaggaaaaagggaaggaagacttggtttgcaaactgattaagtccctctatggacttaaacagtcaccaagataatggaataaaa

SEQ ID NO: 160328 - DNA, 512 bp, Cannabis sativa
tttatttttttaataattttaatatatatgggttatcacttattatgctaatatttgacatttaaataattatattctaatttattttatatgacttgtgtattgtagttattactagaaaaaaatataatttttgttcttactgtgatactaatagaatttttgttcttgaattattttcttttaaaaaatcccctcttaactttgaaaattgtaaatttgctctcctttggttgcatttcattcaattttgcaaacaatttcctaatataagatcgatccttgattaatatactataattattctcaaactttaaaaataattgcaaattttttctttcagttttatttcgttcatttctgtaacaattgcttgaagtaaaattgaactaaagttagtctactataattcgagagtttaaacaaataataattgtatagacaatattttaacgataaaatctaaaaaaaaaaaatcttaattttagagttaatgtataaatttttaaaac

SEQ ID NO: 160329 - DNA, 566 bp, Cannabis sativa
tcttttctcaagattgtcgaacagattgggaaaccaattatgattgatactattacagaactagggagaagctgaattttcctcgagtattgattgaagaatctatacaatagaaattccctaatctcatatggtttgaaaatgaatatggtgccaatgtgtcagttgcggtattttatgagtggaagccgatagtttgtgggcattgccatggaatggggcataacactgcagactgtcgcaagaaggaaggtaaaaaaccagagcagattgtaaaaggaggagagaagaaagtggatgctgaacaggttgataaagggggccagggcatgaatactgttgttgttgaagactttcaacctgttacgaatgggtggaaagccaaaacagcagagaaatctgcatcaacttccaccattcataagggataatacctatgtctattcctgtggagacaaaagaaaaagggtcaataaagaaacaaaaaatataaataatttgactcaaaccaccattcataagggattatacctacccacaagaatcacttgtgaagatcgcccata

SEQ ID NO: 160330 - DNA, 503 bp, Cannabis sativa
gtgtgcattagggaacacgatctccaaagcatgaacaatgctttgtttgatgcctatccgacacaaaggctaagttctcaacatcaccaatcacttttttcaattttcccataaaataggtccaagaattatggctttcactgtcaactacagtgaaagctatcaaaaaaatatacctgcctgcatctagtgccactgaacacaatattttcgcaccatacctagtcttcaagaaagacccatcaacgcatataacaagtcagtaaaacctaaacccacgcttataaggacctagagagaagaaataatacttaaagcgaccatcctctaccacaaaatctgtgatggtacatggatttctccaatgtagcatgtgcaagtaacaaggtaatttcaagtatgcatcttcaagtgtaccccgaactaggtgtagtgccttctctctgcacctccaagccttttcataactcatttggctcacgtaattcttgtgcatatctttc

SEQ ID NO: 160331 - DNA, 508 bp, Cannabis sativa
  modified_base (414)..(418): a, c, t, g, unknown or other
gcattggtcctcgcctttctcctcgcattgattaggccgttctgaatccagcccatttcaaccaagatttttcttatctctttttttttattattttcagctattttgcttgtgtttaagacaatctttattttaatagctgttttattttttaaggggagacaattattaaggtctgtccccgggccctttgtatatatatatatatttttttacctgcccttagggccaggatttttatatatatatatgatccttttctatgcatatttttcttttgcacctgccctttgggtcaggatatttatacatatgctcttttttgatgcataattttctctttttggacctgccctttgggtcaggatgttttacttttagcttgtttctcgtctgtccgtgtggtatgccttnnnnnccccctgagtggcatgaaaacttagtttttaaggcactcagttttatttaaaatacagaggttgcatacacttagacggtacaaaccctt

SEQ ID NO: 160332 - DNA, 504 bp, Cannabis sativa
  modified_base (284)..(295): a, c, t, g, unknown or other
aatttggaagaggaaaagagagagggagaggtcggctatagaaggatagtgagtggctcaattttctgaaaggcaatctcttgaatcacaaaaaaaactcttttttttttttgtatgagccatcactatctatttgtaggtaaccactaggtttaggttagtaattatttcgcattaaaataataaaaataataattagaaaaagcctatccaagtggccggccatggtgttaatgggccccatttggaattttgcagttttaacaattttcatttctattttnnnnnnnnnnnnaatttttcaattctaaccatttaatgttctctttccatttagggaagttagatccatttagcttattttcagtcaacagtgataaaatgggattggccatggtcaaataggatactacaaaaaaataaaaatccattatggtttaacacaaaatctcattcataaattattagcacatagcaagtaggaatgacaagagaaaatactaa

SEQ ID NO: 160333 - DNA, 512 bp, Cannabis sativa
gatgtgttattccacatgttaaaaaaatttaatccatgtactcacataaacgcatccatacagtatctctattatccatattgactactaaaaaaaattataaatttcttgtggcaaaccccattactatggtggacacctttaatttatataatctttgttttgtattcattctctacaaatagtttaaactaccatttgatctatatactggaaacagtttttaacattctagtttcaagctttcttcccgaagctaggaaccacatattcaaacactttaaatatatatggtgaatactatatattttctccatgtaaaatatatatactcaattcaattgtaataatagcaataacaataaatacatattaaaataaaaataagcaaagaaaataaagcttactcgggatcttcatatttggcaaagataaattctaaaaaacttttctcgcaactcttcaaagatttagtgaatttgaaattttcaaaactatatttatttggtgtg

SEQ ID NO: 160334 - DNA, 646 bp, Cannabis sativa
aagcgcggtccacctttcctttttagcgaagactccttctttggaggagatttggccaacttcgggcttcactgtctccgtgggctgcgtcttcttgggcttcggcctcttgaatttttccctcggagactgcgagatcgcgatcgcgacactggtgacttacgcttgtccttgcctttttccaactctgctagagaattctcaattctcttatgaggtttggccataacgaagaactcgactagtgattctggtcttcaagcttgtaattccttccaaaaatcggttctcggcagaacacctgttattaacatacaaacaagcgaagactcgggagccttctcaacttttgatacttccgcattaaaccgtttaaaatagtcttgtaaagactcactgggttcttgtttgatgttggtcagagtagtatagggagtcctataagtcatcgtggcctgaaaatgcgtgaggaattagtcatcgtggcctgaaaatgcgtgaggaataagtcaccgggtgaaccaatcatgggcgttttcctttagcgttgctgcaagtatgcgacatttcgcgagctgcggtacctgatccacttgcattatagtattgaacttttctagagaatctatgggattagaggtacctt

SEQ ID NO: 160335 - DNA, 646 bp, Cannabis sativa
  modified_base (51)..(64): a, c, t, g, unknown or other
aaaaactataaaactcgaaaatccaaatttttgcactcaccgaaacactannnnnnnnnnnnnnaatcactccaaacttcacaaggcgcatatatatcataattattaccatccttgcataacaataaataaaatcgagcccttaagttaaaaatgccattaacgtttggattaacctttgaaaagttcaaaacttgatttctaactgaaaatcacctaaaattcaacaagtaaacatcgatattagtcccatatgtaccaaaaaaattattctacgaagtcagaatcgccataactattctaattcacaaaatcctatagaaaaccaatcgtttttagcttaaaacgtaattaaaccataccttaagctttccatcttcaaggatttgccatctcgcaactatcagagcttagatcgctaggttttgggttaaaaattgaagaaaatgaatataggaggagaaagttttatcgaaaggagagaacaagaatttcgtccgttcgttcgttctccagttactgatatgttttaaaatatataatatagataaaaatcgataagtttttttcgtatatatataatataataataataaaaaaatattaataataatataatatgatataatataatataataataata

SEQ ID NO: 160336 - DNA, 505 bp, Cannabis sativa
gatagtcccacatcgctaatgtgtggaaagataatagaatatataaaaggaatgagctacttctcccatcgctaattggttttgagatggaaccctattcaccttatcccatattctaacatggtatcagaacaaaaaaaaacttcacgactatccgaccaaaaaaaaaaaatcgatcttagtagagccaaaaaaaaaattgagccaccaaaaaaaatccaaaataattgatcaaagagccaaagtcaaaaaagccacttgtgattcgggaatagtgagccaaaaaataaaaggaaccaccataaaaatatcgatccaaaaagtagagcaaaaaagagtcctttgtgattagggatagtgagctaaaaaaagacctgcttatgatcgagtcgtccaagatggttagcaaataaaatagctaccatcttgagggagatgttagatagtcctacattgctaatgtgtggaaagataatagaatatataagaggaataagttactcct

SEQ ID NO: 160337 - DNA, 522 bp, Cannabis sativa
  modified_base (138)..(141): a, c, t, g, unknown or other
  modified_base (428)..(442): a, c, t, g, unknown or other
ttggcgtcattgctaaccctcatgactgtcatgacttggttgaaccgtgataggtgatcgcttggatccgaggtcccggtgtaagctgccatttcgggcatcttaaaatttttgtggagctctgcttccaggatgtgnnnngcacatggctcccgatcctcacagtcagagtcagagtcgtcacctttctgtcttcgagagactcgggcgatgtcttttcggagtatggcaagttctgccattattccttcgtttaacgtccctttggagaccgcgggtccatacttcttttggtctaggtgatcccggagatcaccatggttcccattaatctgatttctcagatcaatgggagggcatttctggccctttcttcctcttctcccgggctcttggtgcacgcaaatgctttttcggtcctctcgatnnnnnnnnnnnnnnntccctttttggagtttgcccctctgcgaacctttcccttttgggaaatctgagcggacctttcgcggatcctgcaccttt

SEQ ID NO: 160338 - DNA, 641 bp, Cannabis sativa
cttcggcaagcctgagcccatgaggaattagaggagcaaaagagatcctaacaagtattgtaactccataaggatattgggcatacgaccgacgaatctcgccaattgaaagaagagatagaaagtctcatcgttcgaggccattttaaacagtacgtgaaaagatagggccatggatacaaccagcccagtctgcccaataacccaaaaaaccaggggttacaacatcttcttgttgaaggagaggacatcttgcttatatcgtgagggccacaatcgcaggggaaagaaataatgcctagaaaagatatgtgaaagacataaagaacgagcagtcagcctttgccccaaaaccttccaagaaggtgaaaattgaggaacctcccattgtattcacggaggaagatgagaaaaacgtgagatatcctcacgtcgatccattggtgattaccattaaactcgccaataaaaggatcaagagagtgttaatagaaaatgggagcttggtaactatctcttataaggaaactttacggaagatggggctagaaaaggccaaattaaggccttgtatggtgaatctttaccgattcaccggagacaacattgcaagtctttgcataatcgagctcgcattaacc

SEQ ID NO: 160339 - DNA, 595 bp, Cannabis sativa
  modified_base (401)..(402): a, c, t, g, unknown or other
acccaaaggcaagtgataactgttactttgttgatctgattgatacaattgcgagtgagaaaaagttggtagaagatcctctagaactgagtttaaatgaagatgatctgacagagcaagagggaaaagaagtaatgggttatgtgaaatgacttgactctcatgggccattgaacagaaggtattatgaggagctgggagtagtgccaaaagagcttatgccatctactgaaaaacctccagagcttgagttgaaggtgcttcctagtcacttgcggtatgagttcttgggagaagataaaaagctgccagttattgtgtcaacttctctttctaatgtggaaactgagagatttctgagagtacttcgggtgcacaacaaggccattgcttggacactnngtgatgtcaagggaatcagtccctcaactgtgatgcaccgaattttgatggaagaaaacgttaagccaacaattgatgcacaacgcagactcaatccacggatgaaggaagttgtcaaaaaggaagtggtcaagtggttggatgctggagtggcctatcccatctcagatagtaaatgggttagtccggtgca

SEQ ID NO: 160340 - DNA, 691 bp, Cannabis sativa
aatctaatccctacagccacggaaacacaaaaccctaaccttaaaccaaccaaaattcataaaattcacaacctataaggtgtaaacttacctcaatcacatctaggttgatcttagattgaataatatactccaagggcaaagaaaaatggtgagaagagcctctcttgtgggctggttagcttgcacgaaggggagaagaagaatagagtgttttggttacttatttcataagttatgagtttatatacatattagtttccttttcttattttttttttttaaaaaaaaaagtataataggcagccctaaaaaagtcaaatgggcaaaaattaaaaaatcactaaaagaaaaaatatacctcccaaaacttttaaaaataacataggggcattttggtaattttactaatctattaaactgacattctaaaaattctaacctagtccggaatatcctcaaaataattctcccatcaatatcgtgacatttctgaccacattgttgctaaattccacagtcgccgccgggtccgaaaaatatttttattttataaatgatatcatcgatacccacatatctcaatataatcttcgtaattaataaattacgcttggtataatcattcaataattccttactaattaccctaagtaagatcataatgttacttcgttaccaaaataattac

SEQ ID NO: 160341 - DNA, 619 bp, Cannabis sativa
  modified_base (555)..(559): a, c, t, g, unknown or other
tggactccggtacgcttccgctattccttaatcttattgtttgattctcttgaattaattagggctaaattaagttttacagtatttctaacatatatatgacatgatatatttacctatatatataacatgataccacttacactttcaacccaggatccatgcttcctgggaaactatcgcgcaacccaacataaccgaaattaaaattcaaccagaaagagaaccaccattaattccggtgacttcacctgagaagacaaccagaatcaatcaaaataggggctatttcgaattcattaaaaaaagtgtataaaactactacaaaactaaaattctactgaaaatctagaaatccagtttaatttgcataaaactaatgttttgacttcaatttttagatccatgaaaggtagatctcaaagagttgaattggagttcccaaacaatccaactcaagtataatctaaaaaaaattacatcaatactagagtaaaatatttattctggtatatttttgatattttccaaatttctaatggtgaatttgttcannnnnaataataaagagacatgtagatagagttatgtacgtggaaatactattctgatttttaat

SEQ ID NO: 160342 - DNA, 651 bp, Cannabis sativa
tatctttatatatatatatatatacttaaacacacaacatatacacatatccatatatatagatacacaaaaatatatataaatatatgtatatgcacaaatatatatatattcatataaataaacataaatatatacagatacaaataatatatacatatatatacagtaaaagtgtaaaacaaatagtttggaaaaaaaaaattaattttagcttgtatacataattttttaactctatttttcttttctatttttgcccacaatcttaatttgtacatatctatactatatagtatcacaaaaaattaataaaaataaataaaatccaacaaaaaaaaaggaaaagaaaagtattaaaatcagagagagaccatccttattatcatcaatcaatctataattttttctctatagcccaaaaatccaagtacaaaaacatgtttaacaaaatatcataaaaaaataaattaaatgaaaattttctaatatatatacaccagatatgtagtgagaatattataagaaaatttttattatatatatttataaacttactaaatttttcaatggaaatgccagctgggaggagcggcggttgtgggtgcgccgggggtggttggtgaacggaggtcggcaattgatgatgtt

SEQ ID NO: 160343 - DNA, 630 bp, Cannabis sativa
  modified_base (66)..(66): a, c, t, g, unknown or other
agtgtttccagcgtgctttgtccgaaaactccccaggaggtcacgtatcttgaaattaccccaggncaagcacgcttaactgtggagttctttcatgatgggctactagaaaacaagatgcaccttgttaatataggtagtaccaataaatccatttaagccctcttcaactatgtagtcacatacatacacactctcaaaatcatcccacttgaccttcccgagggattgtgggattgcataatttacctggtatttccccttatggatcacgagattacagactgtcacattcacccccccttacgggatccgacgtcctcgtcgaccacacttctaactgtgtcaaggctctgataccatttgtaatgtcctcgcttcaagcctccattagacccttatacccacagaataatggctcttatatacaagcacgtcactttgtatgcttcatagactaacgactgaccctacagaccaacacaagtgttttcagcgtgctttgtcctcacttgcacgctccctaggaaaatttcccaggaaatcacccattctgaaatttccccaggtcaagcacgcttaactgtggagttctttcatgatgggctactagaaaacaagatgtacctt

SEQ ID NO: 160344 - DNA, 806 bp, Cannabis sativa
gggtcatccagtgaagaacatcactgagttcaatgagagggctcaagtgttcgtccgaaaaagaggaagctagaaagagatgaacttgttgaaaactggctcaggaggccaacccagcaatatttcaacaagtactgtctcaactagagttgataactcccctctggctcaaagagaaaagacaattctaaggagtcgtcaaatgacaaaaagaaacaaaagaagcatgataagtacgtgccagtttatactatttatacagagcttaatgaaactcggaaaaatatttacctcacacatgagcacaaggttacctccagcaagcccaagctcatgaggcatgcgaggcataaaagagatcctaccaggtatttcaaataccacaacagacgagtgtcgtcagtcgaaagatgagatagaacgtctcatcactcggggccacttcaaggagcatgtgaagagacagggcaatggacataactagcccaatctgcccaacaacccaaaaactagggattacaacctcttcatgttgaaggagaggacatcctggtcatttcgagagaaggccgcatattgcaggagagagcaacagtgcccaaaagaggtatgtgaaagaaataaaaaatgagcggtcgatacttgctccaaaacctccaatcatattcttgaaggaagatgaaaagaacgtgaggtatccccatgttgtaacattgggaattactatctagctccccaataaaaggataaagagggtgttgatagataacgggagttcagtgaacatcctttacaaggaaacgctg

SEQ ID NO: 160345 - DNA, 865 bp, Cannabis sativa
  modified_base (817)..(836): a, c, t, g, unknown or other
accaaatccgagtctatcccttttgaaaaagagcttccagaagactttggagtctcctctgacagtgaggaaactgaactagaacacgagccacctttgacaaaatctgctccagcacctcctcatgcatcttcagcagccaaagcttctgctgctaccaaaggcaagcaccctatgtagagttcatctcctggtaatatctctccttctcaagttgtcaattccagattttattatcgtgataagcaacgtgattggaatctttatgctacccgaaagtttgaaagtgagaggaattatgatttccatgctcatagggtgtatggtattgttaagtttgttcaataccatcaatggaaaaatactctctctggttttgaaaggtatattaaaagtattgtcaaagaattttatgccaatttgactaatgatttgcttgatgagaactctgagttgtttggtaaagtctatgtttgggggcattggtttgcttttactgtcaaggacattgctgtggttttgcaattacccgaaggtgtgtccaatgctatcatgtctatggatcgccatttgatgctcactgaactcactggtgcacgggttgaatggaaatctgggcatagtctttgaattacacatctcagttatactcatgcatcactcatgaggtttgcacttagaaattggcttcccaattctgaaaaaattgtggtatctcaagatttggcatcctttctctttcgtatcacctcgggagcatccattaacctggcttcttcaatcttggaccagattgttgttggattttgtgccctannnnnnnnnnnnnnnnnnnnaatcagatttactaataaagatcataaat

SEQ ID NO: 160346 - DNA, 571 bp, Cannabis sativa
  modified_base (232)..(232): a, c, t, g, unknown or other
ttgtaactaaattagtaatttatgaaaagtacgggcgttacaataaataattactattttgacaaatcaaaatagattttttgaattccatatacaacttttgtttctcccttgatagtgtttcaaggtggcgattcaaggaccatagacctataattataaactccaataaactagattatttattgaatctcatcaaccaaacaatcctgtttattaattccatgattantccactataaatatagaattgaactcatagtaattatagaattatatttactgagttttactacaatgtccattgatataactaattccagtaattagccgtccttgtgtcagctcgtaattagtttattttaaattactgttttaactttctaattaattctttatcctttagtatcgtcaattcactagtgaactaatttagatccaatttaaatttgtgtataactttttaattccagaattaacacttaaatagaatcaacatttgattcgttaagaaagttaagattccataattgtagatcatgttccaagccatctatattattagattcct

SEQ ID NO: 160347 - DNA, 657 bp, Cannabis sativa
  modified_base (611)..(613): a, c, t, g, unknown or other
taaaataaatttccaacaatattaactttattaaataaattagcattctcaatacaaaagatgtaagagttcaccagaaataaaaatatcagaaatgctacgatcagattgataccgagaatgtctagcaacataatgtgctactcgatttgttgattgtctaatgaaaaataaattaatacttgggagggtagataacaaaagttggtagtctttgattaaaaggccgaaagtggacttcattgcttggttgcttcgaatagcttgtacagaaacaagatcgtccgtctcaatttgaacatgttgccaattattggtctttacccaactgagagcttctttaatccccatggcttcaatgacttcagttgcatatcttccaccatggcaactggcccatgctgcaacaaggtgaccaagatggtttcgggcaacaattccaaaaccatacttattgtccctatcaaagagtgatgtatctacattgatcttgattgtgttttctgcgagtttagtccatgactcagcaccatcatcgatgtttcccagacatattgatgacaacgaaattttatcctgagctttattccagtgatcaagagctacttgtnnngaagtaagcacgtcattaacagaggagtgtttctttttccaaac

SEQ ID NO: 160348 - DNA, 614 bp, Cannabis sativa
  modified_base (116)..(118): a, c, t, g, unknown or other
tattttgtgatcattctacatacattttgtaactccataatgtatgttacaatttgacaaaattaatactttgtcacacttaattatttacaacttaattatttaatctaaatatnnnattatataaaataatataacaaaatctctgatcatgccatctactttagtcgccaaatagttaaaaagtttggtagtttgcatggtgtaaactggaagagcaagcccaactaatttaattagggtggctctaccagcatttgaaagggtcttaactttgcaacactgaagcttggacacaaggttgtccaccacaaagttaaaattttcattttttttgtcttgatttgaacaacggcaagcctaaatagttaatgttcctcaacatttcatcaatactcagagcctctttaggtcctctcttaatgccttcattagtataattaataaattacgctttatgtattcacatattaatttttaactaattatcacacaattagcctaagtaagatcaaatcttacccaaatattaatgcaatcacatatttaataaaagagaaatgctaaagagcactagtggtgcctagcaccctcttatgtgtcaatatcgctat

SEQ ID NO: 160349 - DNA, 532 bp, Cannabis sativa
  modified_base (139)..(150): a, c, t, g, unknown or other
tgtcttatttgtgaattttcactaagctagggcttaattataaagaaaagagattctaggatttatttgttaattaagggacttttgtaactctaattaataaatatattaaatggaaaatttatttgataattaattnnnnnnnnnnnntaaatagttttgacatttaagtgggtgaattggaaaatatggcatttgtgaaagaataaaataaatagtttaaaaattgcaaaattacaagtggtgggcccacatcctatggtcggccacttatgcttgattttaccatttatttatcaacttcttaataccaaataattcaaacgtaaacctagaaggattcctataaatagatagcgatggactcaaaactgacagttgttgaaactttagcattcactagtcttcagtcaaaatttgagccttctctttctctctctattttcgaacccttatagcgattgagtacatgcccacccatagcaagttggtactcaatcatattgtgtaagactgtgaagaatccaatcaa

SEQ ID NO: 160350 - DNA, 674 bp, Cannabis sativa
  modified_base (42)..(57): a, c, t, g, unknown or other
  modified_base (494)..(509): a, c, t, g, unknown or other
  modified_base (624)..(633): a, c, t, g, unknown or other
tcgttttagaagttcatctttaggttgttaaatcaacatacnnnnnnnnnnnnnnnngttcctggtaaaataacttccaaatgagcacattcagtgacatattcgccaggttagaattcgggaatggttttttatttcagggatttaggtcttaaaaaaaattgaaactgggttgggctgggcccaacccgaaataacatgtaccgggttgggcttgaagcctgataataacccgatataaacgggccaaagtctccctatcgggccgggggccccaccgtgcccccaaaaatagcccaaattgccattcctaaaagtggaaaaaatctaactagaaatttgttctattagtatacggccataagtggattttttgcccaatattttattctcttttaatccatataatttagccctaatccctagttgaaacactataaaaggaacatgatgctctcactcatcatactattgtcaacttgactattcaaccnnnnnnnnnnnnnnnnttccttccttagtgatttcaacctccttcattcttcttcacattcaaaacccatagtgaatgagtgcatgcccacacatagcaaggcaacaaaacccgaaggagagaaagagatnnnnnnnnnnatcttgataatgctctactacataaaggaatcaagggctag

SEQ ID NO: 160351 - DNA, 609 bp, Cannabis sativa
  modified_base (27)..(53): a, c, t, g, unknown or other
aacaatcattgaaatagtaaaattgannnnnnnnnnnnnnnnnnnnnnnnnnncaacaatctcaatagttcaggagcccttttaataaccttaaaagttcaggaggcatgatttagtacatgtcaaagtttatggggaaaaaattctaattagcctatattaattagtaattaataaatgttttggatacaaaggtctttccaatttgtctgctagtgctagtttaagtgtgtgtacattaatacaacttgcagcaacatgatctcacagcaaattcttcttaatttattaattttttagctagtttgattgaaatataatataatgtttggagatttgtaattaattaaaaattgtttaatattttagaaatagattgttttgttatattgtcctatatcaaaatctataggtgtgtttatatgggtggatatttaggtaagagatactctgtcgaaccctgcagatctcacacaacaaataagatctgtccaaaaaatatatgtaggtgccgtttggtaatacttttgttttttaattttttaatcacaaaatgaaaataaatttttgtttttcaatgtgttctgtaactacttttattttttaatt

SEQ ID NO: 160352 - DNA, 509 bp, Cannabis sativa
attttttttttattattttacatcttgtctattggagtacaattataaatagtaggccaaatgtaacacatatttatttttgggataagtttaggaatacttcttttttgtatctattaatcaaaaatatccttatattatatttcattaaaatgtacccacttttgtgagtggatttcctaatataccatcaccatccacttaagtctagcacataatttacattaatttaagggatataataaaaacatcatctataaaagtaggtgtatcttaaagaatatgaaaataaaagcaaaaattaaaacaagtaaagtagagtgagaatacaatgtaattttttctttattttttatgtcaaatttagcacaaattttaaatcttccattaaagatagcctagtattaaagcaatttgaaaatgatattaggaaatagcaataattgaaagaaatgaaatgaaatgaaatgaaagggtgtaccttattttcagtgaacgtatggtcttca

SEQ ID NO: 160353 - DNA, 544 bp, Cannabis sativa
aggaaaaactttagtatttgagccaagtaaagaggattaaaggaaattgtcaagaaagacttacccttgtgaattccttaaagactccacccatcatcaactctagagaagagtcattgtcaacactggccaactgctcactaacctcaggaaccaaccggttcatatagtgggcaagcatctcctttcctttcttggcctctggaagcactggcaaaggtggagtaggggtccgcaccagctcacacccacctctcagttggtcagacctgtccgaactccctcctcgagactccttaaacttggcaacttttatagtagaggggtttgcaactgttagctcctcagaaagatcgatgacctccttggcaggcatcttttccttagaagagatcccctcagtgcctttagacttcttggccgggggagatgcgttggagcctccgctaattctcttcttcagagcatcaagcatcttctgagacatgtctgcacggaaaaaaaacaacatggttagaggaaacagacatcagaaacataaagc

SEQ ID NO: 160354 - DNA, 522 bp, Cannabis sativa
atcccaaatggcacctttttacatcttaaacactcaagataaggtttccatttcttatactcactttgaccgctatcctggtcaccctagaacctttcgttctatcccataattggtggttcatttagtttccacctactgatctgctcgtaagttgggttcatatatttcaccacatctaatggtacaactgaaagtgccagtagtacaagaatagacacaagacgagcttgttgttttctcaattctcggatttgcttcctcttgttgtctaatcacatcctgcatagcagaattcacatgtttccagtattacgacaataaaggattcttttccttaccgtttgctccgagcccaaataactcgctaatcaggaatgtcatacatttaatccacatctttcaaacacttaaaactcaaatggatatcaatatcaatatgcgtataccatacacatattcttagtatagataatcagtacactatttcttcccattatacactataattgtctaagcaag

SEQ ID NO: 160355 - DNA, 742 bp, Cannabis sativa
ttgtgtttttatatttccagattgttgtaaaggattttgttgctttgagtggtgaaaaatctcaaagtcttttttctaaattcaagtttgatcctaaatatgttctgaagaggattggtggtgatgtgtcttctgatgaagttaatgatgaggtcaaggtaataaaaaccggtttctgtttgcatttcttttgtgtatgtttatcattacttatgttcatgttttttatgtatactattcacgtttctcatggaaatttggaccagatttgtgttgaaattaattctatcaaagagtgccaacaaaaaattaaggatggtatttccagcttcaggattgagtttttgagtgagtttgctaaattagcagaaattatcaatggattgaagaagaaggagaatgatggcagttctaaggattctgaatttttttcatcccctataagagaggtaactagtttctttgtttagtgttttttgattataggtttgttgtttatggttttattatagttttttttatcatcttgttgaaactagtttctgtattgaatgtgttattatataattttccacagttgtttgaaacaggtttctgttttgggtttggttgagatacggtttttctgtttattgacactggtttctagtctgggtttaggtctctgtccctgtgtttttttttttttttgtaaaaaacgggtttctttatttattttgtttttggtttttttttttttttt

SEQ ID NO: 160356 - DNA, 511 bp, Cannabis sativa
tttcctgtttttttccctattttattttattttataatttaatttaatttttattatttccttttattttgttctgggaattactcatttttatttatttattattatatatttttattttaatttattttttaaaaggaaacaaataaaatactccagtctattcttaaaccaaacacaagattactttcagcataattcaattttgttgagtctagtactttctagtccaatcctaagtttcaaatcggccttttactgtttagcaactgtgttagtcaggaagtaacactagtagttaatctataactggaataatatcaaaactatatagaacttcccatagactgaataattatttagtagccttctaggccactttaatattcagtctcactggtagtgtcagagactccagattactttttacacttctccaaaaagtactgctcaaccccagagtaatcaccatctcataagtagactttctagcattaacgcaagtctagaa

SEQ ID NO: 160357 - DNA, 597 bp, Cannabis sativa
  modified_base (545)..(552): a, c, t, g, unknown or other
attattaattttaaaaatttgatatttaagtttaaatattaaaataataatttttatagatatttattaatttgaaattaaaaaatcaaattttggtaaaaaaataaccaaaagaataattttgggtgcaaagcaccctagctgtcgaggctaaggctgcgttcaacctcaatatgcgcgtggaagggctttttgcagggtttctggctgagctttctcgccgccttgcaacatcatcatgtgagcagctcatgtctgaatgagtgaggatcgagttttagacacgaagtgtctgaggcacgcgcgcgctgggtcttcttgtgcgagggtctggtgcgcatgagcaccaccctcgacacctaatggacctcgattttcaaatcaacatatcttcttcgctgttcatctgaattgagttccgtaaaaacaaattttgcttaattttttacaaggaatccaaataaattattttcagaataaaaaaaaattattttcataaaaaaaaaatcgtaaatcacattcaatcatcaaataacacataaacnnnnnnnnacacatccaaatcaacacaataaacaaaattcatcgttttaaatc

SEQ ID NO: 160358 - DNA, 775 bp, Cannabis sativa
taagtgacaaggcaaacttggttcctatccagttcctcgaatagcctagcattactggcacggaagagatcaaaatgattgctacttctccgaacttgatgacgccattagaagcctacctcaacactggggaactcccagataatcgaaatgaagctcgaaagatgaggaggaaggctgcacagtgcatcatagtagagggaattatgtacagacgagggttctccatgccattgctcagatgtcttattgaagaagaagcttcacgacttttatctaaagtgcacgatggattttgtggaaagcactccgtcgggaaaagtttatctaagaaaagtctaaggcaaggttatttctggccgataatgattgaaaattcaaaggcctatgttaaaaaatgtgacaaatgctagagattttcgaagatacctcgagctctgcccaacgagttaactcagatgtaaagttcgtggccttttgccatttgggggattgacctgatcagacaattaccaaaaggcaagggaggattgcagtacgcagtggttgtggttgattacttcactaagtggacggaagccaaaccactgacaaccattacatctaaaacagttcaagactttttgtgaagaacgtaatatgccggctcggattgccatacaaaatagtgtcagacaatgtcaaacagtgagccagtccttcactgatttttgtgcgaaccatggtgtcatcaaagtttctctgtagtggcacatccccatgaaaatggtcaagt

SEQ ID NO: 160359 - DNA, 763 bp, Cannabis sativa
  modified_base (279)..(290): a, c, t, g, unknown or other
  modified_base (659)..(660): a, c, t, g, unknown or other
gacttagtctataaggaacttatagtttcagactaagataatatgtcacaacaagatgtccctgaaattcaatagtaagaagttaaatgtagactaatttaaccaggatcctactgttgagtgggagctatctaagatgtaatcaaacaaggaacattaggagacagtcaagaaaaatctctgaaagtgacctatatgttagatgataggggtgtatattagaatcctcatatctacaccaactcataacctactagagatggtggttactctggggtnnnnnnnnnnnnctagaaggatgtaaaaacccatctgtagtgatttaagctccatcagtgaagatacataacttagtttctttcaaaaagcactgaaagttattcaactgacgaaagttcttaactgtgttatctctattccattttggatagaattggagacatgtcttctgtttattcagatgcacttaataagcagtaaagaatttaatatccctagatgagtaatgcatatagaatatgatgttacataatattttatgaacacaaaggaagtaacggtggagaaagcagttgcttaccacagacttacagttccagtaatttgggtttagtcaaatacattacacttgatctggatatcaagacaattgattgatnnaaatgcactacttgttttatgttaatgcaagtgggagtttgttgggattttatgttctaataaaatccatttcaatctaatctgatttgttatcaataaaaga

SEQ ID NO: 160360 - DNA, 547 bp, Cannabis sativa
tcacgtaatacgcctaaattagttagggtgttacaaaaagtctcttgaatgcagaaatatgtaagagtacatcagtgcaccacttttaaagaggtacattgttttcaacatgttaattttttttaaatttcttaaaattgtacaagatatcttaaataactataatatacacgattatataaaaaaaaaataataaaattttttgggtgccgaaacagataaaagtatatcagtacatcacttttaaaaagatgcattgtaaaattttctaaaataaaatttgaaaaactatactttaaaaactctaatattttattcttaaaccaatacattttaaaataaaacatatatgacacttttataaaaaatccaagaataaccctcaacccaaccgaaccctcaaccccctcaccccactccgaccacgagacgactccctcctccgaccgagacaactctgacggagacccacagccccgatccgaccgagacgactcccaccgccccgacccacataaccttcaatctcaaacttcaacccacaaca

SEQ ID NO: 160361 - DNA, 745 bp, Cannabis sativa
cctctggccaagaagcttaagggcagagagcgatcctcagagaagagaccttctagagaggttattgacctttccagggagctggctgctgcaaatccttctactcccaaatctgccaagtctaaggagtctggaccaccaacaactgagtctgaactggtcaggaggatccctgagcgggtgcaggcaccaactccacccgtgcccgtgctgccagagtccaagaagggcaaggagatgttggcccactacatgaaccgactggttcctgaggttagtgactggtgctgataacgactcatctctggatgtgttggtgggtggtgtcttgaaggagctcaccagggttagtattttttgatacttcccttttaacttttcacacttagctccatatgctgacttttttctttgtgcatgccgctttgaagttggcttacacttactcccgggctaaatctactacttccaagagtgcggctctatccgacactttgagggcggaggcggacttggccaagaaggaagctgaggaggccagggtagaaactgaagttgtccggcatgagcagggtgaagccaacaggaagctgtttgctgccgagaagaagatctccgtgctgacaaaggacctcgagggtgctgatcgctttgaggagaccatcgagatcttatctactaaagttcacaatctttaggatgagaggagttctctgtggcaagttcttcttcggctaaaggagga

SEQ ID NO: 160362 - DNA, 567 bp, Cannabis sativa
actgctactactgcatatttgactacacatttccctttaggtagcttgcatattaagtcgatcccccatactgcgaagggccatggacttgtgatagaatgtaggttactcgaaggttggtgggtatatgtggctattcgctgacacctgtcgcatttcttcgcaaaagcgagagcatcctgtcgcaaggttggccagtaatacccttgtcgcatgatttttagtgcaagggagttaccccctgtatgattgccgcaaattcccccatgtacctcacgaagtatgtaattgcaatcttccccgctgatacatttgagtagcggttgattaaaacttctgcgatacaacctttgatcgtacattacatatcaggcggctcgttgtcgcagctttcttgcttctaccttgtcatcgggtaagacacccttttctaggtatgcgactattggggttatccaggttacctcctgaacggtatctatttccatgatcacttcttgatttatagttgggtgagccaatacatctaccggaattacatcgacaattcggcttctctagttgagg

SEQ ID NO: 160363 - DNA, 649 bp, Cannabis sativa
  modified_base (547)..(551): a, c, t, g, unknown or other
gacttcaagcctcaaccggagccgaaaacgatggattccaaggctgaggagcttctgaccaatccaaactaggggaaccctatagcctgccatgggcaatccccgcaaaggattttcatagatctgtgggcgatttaaaaggtccacctcaggctgataaagaattccagaggaaggttggcatggatgcggatgaatctgggaaggaagttggcgtggtttctattagagaatctagccaacccaaggcccaaacctgcgccagaagacttttgcgccaacctctttctggtatcgaggaatttcctaaggctgggaaaaagatctcggcttcaggaaatgggatcttctgatgatgaggggaatgaggtctgtgcagtaatcaaggctctctacgtgtagccggtctttctcaagctatttgtagtcggtctttctccgagctacgtgtatacagtctttttcaagctatgtgctgacagtctttctcgagttcatcggcgtcccctctcatcttttgtttaggagaatgacttaatggtttgcnnnnngtggcatttttgtaaagacaaatttgtaaccagtctcaggtttctcttatcttaaatgccttgtactgttttcattcaaacttaatacaattgtattt

SEQ ID NO: 160364 - DNA, 549 bp, Cannabis sativa
taggatgttaaacaacatacttggtagtaaatctagatcctggtaaaataactccaacgaaaattgcttaattagtccctgtttttattgattgtttgctcctcggacgttccaacatagtagcttatccattagaaatagagggttctcccccccccctcttgtattgctctccttttgcttgtcccctaacatcccagattcattatcttgccgcccatcatggtgatccataatctgaaacgcattaccaactttcaaagcttctgtattagcagttttctctgcagctttgcatttctttgtcacctccataaagccatcttcatctataatcttctgtttctgcctcttctcttccttaacaacccattcctgccttcccttggtatccttcctacactcctctgctacatggcctaaacccgagcaatgactacagactacaggtttccattcgtattttactcccacctgaacatgttgggattttatgccctaaataaaacccatttcaatctaatttgatttgttatcaataaaagatta

SEQ ID NO: 160365 - DNA, 573 bp, Cannabis sativa
  modified_base (545)..(547): a, c, t, g, unknown or other
ccaagcacgagggctttgtttcaatccatataaagatttgcaaagacgacaaactcgccctaactccccctgagcaacaaacccaggaggttgctccatacatacttcttcctcaagatttccatgaagaaaagtgaaaaaccaagttttcgcaaatgtcaataatatatatgaaaatataaaactatatacgtctgtagaagcagaatgtaattctgttactgcagaacccaattttgcagcgacaaaacagaacagatagaatataaaaataattgcagaaagttaaataacttgacacaagagatttgtacgtggtatcagtgttctttcgaacactcctagtccacggggccacgcacagagaatgaaactaattaataaagtatcaacaattacaaacacaattgacttatacaagtttagactctcactaaattattgccgcaatcctttgtattgcactttatgatctgacttctgaaacgccttcaagcacgaactcccttcgtctttgaagcatgagtgcttacttcctcccgaannnaggcttcaacaagtcttctcccgaag

SEQ ID NO: 160366 - DNA, 526 bp, Cannabis sativa
ccccaaagagatattgaattaattcttgttgcctggtggtgcatttggtatcgtcataacaaggttgcgcacatgataaggtcacaccattcccctccagaattagtaggtccttgggcggttaattttctccactcttatcatcaagaaaatagtcgggttactcccctttgtccaccttctcttgcttgctagctcaaagagcttcccccacgttggactcctccagcaaccacggtcttcaaagccaatattgacgtcgctctcgacgtcaacaatggctcttgtgtcctcaaattggtcaatcgagattcgaatgggacagtatttgcatcaacgacgtggaaatgtgagtctcttcctcaacccgagtgggcagagacccttgctattaaacaagagtcttcacaatgcatatctcttggaattcacaacattcattttgaatctaactggcaaagattggttcataaaattaagacgtctacagtattagatttgcctttgggtttaattcttgatgata

SEQ ID NO: 160367 - DNA, 782 bp, Cannabis sativa
aatgaggaataaaacccctaaacttttaagatcgaaaaataaaaaaattcaacataaaataataacgaaattaatatgtaatttgataaaattgacatatatcaatcaattgtaaaataaaataggttctaaatcatatacaattgacaatctgataccacatgttagaaaaataataatctcgatatataaaattgtatataatatagagcacaataataatatataataattaggtatacatacctgattgatctatagcaattactgcaatttgatagtgcaatactatcaactatgtctcctttctagatctctaaattagaagcagttttatgtatctgattatcaaaagtatacaatttagataatatgtatttatagagttagggaagggacttagctacataactttagttggactgtgtttgctcatcaaaggcttcaattaactagaaaagtctatatttttgcagcaaatagattttacacacacatatagatgttaagtccattaactattgatcactaataatataagctaacatagcaagaaattaataatcaactaaagttttaataaaatcaataaaagttaatgtaagtccaaataaaaatctaacacagatctttgaaagcaggaaaatgagaggtgggtggtggtgagcggagcgctgtggtgagtctaggtggtcttttatagaagagagaatacactactacaaaaatggttcttctcaacttttttaaacagtttaaagtattctcgtcggtttctataa

SEQ ID NO: 160368 - DNA, 586 bp, Cannabis sativa
ttgatccccttcataggagacaccagtaggaacacatgatcccctacttgaaattctacaattctgcatttcggatctgcataactcttttgcttgcttctcaattgcttcactagtgtgttgtactgattttggacctaagtatttcttctcccctatcttatcccagtgaatgggagatctacattttttgctatataacagttcatagagagccatccctatcgtactttggtagctgttattgtacaaaaattctatcaacggtaggtacatactccaggagccctcgaaatacataacacaggctcgtaacatatcttccaatatctgaatcgtcctttcagactgtccatcggttggaggatggaaagctatactaaacgttagtttggtacccatagcccgttgtaaactctaccaaaattttgaagtgaacttcgaattcctatccgaaactatggactttggcacaccatgcattcttacaatttcttctacatataaatctgcatactggtccactgaaaaggttgttttaacaggtagaaaatgagcagatttcctaaatcgatccaccactacc

SEQ ID NO: 160369 - DNA, 539 bp, Cannabis sativa
gaggacgtatacatgatctttgtgtattaggtggttgggtccactcgtatcaagtttcatggaagaggtggcttcatgggccacgcgcgcgtcagtgtgtgatggaggagaaaaatctggtaaaaattacctaaaatatggaaaaattttaagagtttatttttttatggcataaataaataaagttaagtggttatggatttttttggatttttacatttatatgggttttttctatgtcatatatttgtaaaaaaagatggaaatcccatatttgtaaacaataataagttttgccagaaaagtcatcggcaccggagaagtcaccgaaaaagtcactggcgcacggaaaaagtatcgacgtcggaaaagtcgctggaaaaatcatcgtcgacgaaaaagtcactggaaaaatcaatgaaaaagtcacagtcgcgggaaaaagtcaccagaagtagatgtatcaaatataaacaaaaatagaaccggttataattgaaatataaccggttctgtaatacaaggaataaaaacaaata

SEQ ID NO: 160370 - DNA, 545 bp, Cannabis sativa
agtggaactttgcaaatgtatccatagcactgggaagctcccctgtctgcggatcagcctaattttttacaaaattagaattagaacaatattattaaaaaatttcaattgaaccatatttttatcatatattaaaaatttcataccccgctgacaatggtcaaaattatggtcttagatccccatccaccttgaccttcatgttacctcgatttttcgcattttgctcagctcttgcttgtaatttaacgtatagttattgttagcgaattgagaaaagaaatattatgtaagtaagaaaaattattaaaactttcaaataatacctgttgttccgggtctttccagtatgcaataacctccacccacacctccggtgtcaccatatctggacgtgatctcctgttcgcttcttcctccccatatttttcaatattctcctttcacgccttcttcgtgtctgatctccagtcacgtaatccttttgacatagatttggtgacgtaatccacgaacataggattattagttggcaactcaaactt

SEQ ID NO: 160371 - DNA, 859 bp, Cannabis sativa
  modified_base (727)..(727): a, c, t, g, unknown or other
tttttctttataattacatagtgggcagtaaattacagaagttgactgtaatctttactgcaattattccctcaaatcatgagatttgatgacaaattatgctaagtaaaatgcgattttttatttagaatccacacagctgtgagtatcctgcttttattgggccgagatgaacgcatattttaaagatatacggtaagccttatctcatggggatgtgtcgctaggaatggaaccgagtttcctttgacgacgagctagtgctcgtcatatgacttcatgagattgatattgctttcaattctgaagccttattttctggtgtcgagatgatctttctcgtatacatgccatcttacaacaagatagacgtctcactgtctgtcatctcgagtcaccgaactgtttatacttagtttgtataccgtgtaatatacgctaagtgtttttatcgttatcgtctcttttctacgtgacaaggttgaagcctcgtcatggacacttacactctcatggtttgtcgtcgacacataagttagcagtttgtacgtttctatctcgtagaagactgttcagccaaccgagttataagcatactctgcaaattgtgtcgctaacgagttgttctatgccaagtgtacttacaattacgtgtttgatttctttattcttcccagctcgacacgtttcctcttccaatgtgcttaccgaattttgggtataacanttgccccttaaaaagttatttttaataaaaagagctttttaatgattacaaagggtattttcatcatatttctcttttagaaaagatgcatgtcctctgattttggcagttgtgcggtttcaaggtacatca

SEQ ID NO: 160372 - DNA, 570 bp, Cannabis sativa
agagttaggagtaatatttagtgacatgcaaaattagactctaaacattcaatattagtctttgaaaatgtgagtcactaaaaatatggagtgtcactaaagtgtcaaatccgtttttttttattaatttaaaaaatactggtctatagtgacacactaggtgcgactaggtaagtgtgtcccgacccacctggcacgtcactatatcaatttttttttaaaatacaactgcaaacaaaaataaaaaatatatatttaatataatgataataaaactcacgcatatctctctttctcaattaattttttatttttttaaataatctttctcaatcaattacatcatcactattttctatcagtaaagaaaataaatataaaaaaattaaataattaaatataaaataaatataattaaaaaaattaaaaggttaacatttagaaaaccctaaacaatcaaactttttatcttgtttctttctttgtcgtctgaagactcaagctctctactaacaattcgtgcagtagcttcccatcaacaaagatgacatgagtccaagcttggtggac

SEQ ID NO: 160373 - DNA, 522 bp, Cannabis sativa
tcttatacagagtgtcatgggatgtggtaattttcaagtctcgactgattgtagcattcagtcctcgaacatacttttgtttgctggtaaagtcggtagacaccaaatcaccagcaaatttagataacctgtcaaattccagagtatatttagccaccaacatcttcccttaagtcaacttcacaaagtcttcctggtgtgaagtccgtacaaccacattatagaacttttcctcataaagtttcttaaactcatcccatgtcatcacactgacatcccgggtttgattcactatatcccaccagacgcgggcatgatcttgaaacataaaggctgcacaatttaccctctcagttcccgtcacccccatattattgaggatccgggtaacagtgctcatccactgatcggccttaataatgtagatacctcctagaaaaaccggaggttgtagcttaataaaactctcgaacacagagtcccgatgcggcataacaaacccttggttacccaccactggca

SEQ ID NO: 160374 - DNA, 526 bp, Cannabis sativa
cacagcaggggcaggagctattggtatttctagagcagggattgtaggagcaccctactgtctcaaccgctgaatctcttcatcttgttcactcttgggcaacttgggcaacttgttgcgggttagcatcaccccgaccacgtgccctacccctgggacttttacctcggccacagatattaaggggaatctgagctccctgaccaccacttgatccaatcgaattgccctggctcctagtgtttcgattggcgtccatcctaattagaacagcgtgcgtaaccaagagctagtctggtcagatcgtgatcaagtaaaaacttactaatgccgcttatttagaaattaaaaacatgcgtctattctgctatcaggctactaacaaacttcattacaagcttttcttagatcatactattaaaataaactactaaagtaatagaagcttactgaaccgttgaacgagctaactgctgatgatgattgtacatgttgtgacgatcttcgaaagacaacctggcagctc

SEQ ID NO: 160375 - DNA, 681 bp, Cannabis sativa
ggctcatggatcagccaattactttcacggaagaagacgcaaggttggtgcggttccctcaccatgatcccttggtcatgaagactcacattgccaataagatcgtggctagattattgatcgataatgggagttctgtgaatttgctatttaaagaagccttcacaacaataggcctcacggaccgggatctatcaccaagcagttcccagctcacgggattcaacggaaccatgcttatcccgatgggaaaagtgaggttgccagtcaccttgtgctcggacacaccccaaagtactttcaagtactgcacatttgtggtggtagactgcccaactgcatacaacgcaatcctcggccgaccgaccctagtggattttggcgcaattacgtctatctggcacttatgcctaaaattccccacccaggaggctagagtggggaccgtgaggggcaatcaaggtgaggccaggcaatgttataatgtcgcggcccacttaccagtgttgatggttcgtgaaggtatcgagccagaattggcagaggaagatgagttggatccccgtgtgggatccgaaaaaattgtagagcctatggatgactcgaggaagtgccagtgtgcgacctcgaccccaccaagatcctccggctgggaacgagcctagaaccggaggaaaaaga

SEQ ID NO: 160376 - DNA, 600 bp, Cannabis sativa
aaaatatttaatttgtttaagttattttttttttcagtgggggttacaacccccatatcccataagtgtgtttgtcactccatttggcaccacccttcacttattaaaaataaatgttaaggtgtaccttaaggtgttaaacactactagatgtggtaaatcgctattaatgtaatttaatattgagtcccatatttttttaatttaataaataatagggtttttctttttatttcatgagtacgttctttttatattttatttacaaatttaattttttaaaaatatgattttaaaattgcaaaaatatatttttagcgacaaaaaaataaaaggtgtaagaaaacaacaagaaatcaacatcatgacaactataaataaattataaaaacaacaaaaaataataagaaaatcaacctcataacaactgtaaattaactataaaacaaccaaaaaagaatatcaaacatgttaacataaattttgttaaccaataaatgagccttaaaataataaataaaccttaaaataataaataaactctggaatattaataataataattataaataaccgtaaataacaataaggtttttacgt

SEQ ID NO: 160377 - DNA, 646 bp, Cannabis sativa
ttaaagtgggtaaaggaattcctggatgtgtttttttgggaattaccagggttgccacctcagcgtgaaatagattttattattgatttaattcctggagcagaacctgcttcaaaagcaccctaccatatggcccctgctgaattaaaagaactgaaaattcaactccaagggatgttggatctaggattcacccgacctagtgtgtcaccttggggagctccggttctatttgaaggatgggacgctttggatgtgtatcgattatcgagagctgaataagttaaccattaaaaacaaatatcctttgcctagaattgatgatctgtttgatcaacttcagggcaagacggtattctctaagattgacttgaggtctggatatcattagctgagaattcgagaagaggatattccgaagacaaccttccaaaccaggtatggtcattacgagttcctggttatgtcattcgggttaacaaatgctccggtagcctttatggatctcatgaatagagtattctaggattttctcgataattctgtaattgtatttatcgatgatattcttgtgtactctcggtcagaagcagaacatgaacagcatcttcgaatggttctacaacgactcaaagatcataaactc

SEQ ID NO: 160378 - DNA, 635 bp, Cannabis sativa
gacttcataatgtccatacctagtacgaaaagccgtctttggaatgtcctcctcttggattctcaactgatgatagcccggtcggagatcaatctttaaaaaggccgtcttcctctgaagttgatcgaaaagatcatcgatcctaggtaaaggatatttattcttgattgttagcttatttaactctcgatagtcgatgcacattcttagagacccatatttcttcttgacaaacaataccggagctccccagagtgacacactaggccgagtaaaccctatgtcaagcaacccctggagctaaattttcaattctttaagctcagctggagccattctatatggagccttggaaactggttccactccaagtgctaaatcaattataaaatcaatttcccgttgaggtggtaaacccagaagttcatcaggaaaaacatttagaaattcccgaaccaccttgatgtcttctggccgaacagagtctggccgagtggtatccaataccacagccagaaaccctagacatccatcacacaacaattctttagctgataaagccgaaatcaccaggatctgagatacctaaaccgaacagacaaaaacaaacggttcttcaccttctggttggaaga

SEQ ID NO: 160379 - DNA, 507 bp, Cannabis sativa
gcttacatgacatacctctctccactaatgtcaacaacccttgctcggaatcaaaaggtctttttcggatgacatgtcacgacttaggtaaaaaggatagatgaaaagtcatttaggctacattataccataagcaaaacataccaagcaaccaccctcaatcatccatattgtgcatcccaaagaaactagtaaaagattaaaaacttcctctttatgtgtctaccatcatttttccttttcttttgtttgtttttttttttctatttttttctttttttcaagaagaattatcaaatttattactttgttgttttttttcctatagatggtaaagacacttcacatattttttctcaatctcttacttccaaaataatacccactcaaaatcctttattgactcccaaacttaattaaaggcatatggcataataagttacattgagaatgaaagtaattaaagacaacacattaggctcaattaagtggttaaaattttgaaac

SEQ ID NO: 160380 - DNA, 540 bp, Cannabis sativa
ctaggacgtgggggtcgatctctattattttcagtgagtttcttgctgatggaacttgctaggcattatccatatcctcatcgattcgttcttgtgatcttctggtaagcaccattttttttgtgaaaaacttcaagattttgagttcaactctcaatgaaagcactaaaatattgactagattttcaaccaactgatggagagtcgtaataaatgagatttaaaccaaaaactagcaataaatatgattaatgacagtggaattcacaataaatattaagaaaaacacccaaatttaaagaggtttggccccagacgtcggtaatagcctactctccttgtgttttattgatcagagtttcaaaatcaagaacatgctcttgaatgcaaaaattaataatggcaaagtcattttctctaagtactccaattttcggatccctttcacaggtcatgacggatcccttatatagaagaaaaggtcagtgcttctcgcttcaggagacacgaccaatacggagctatctcaactgtctcctt

SEQ ID NO: 160381 - DNA, 1204 bp, Cannabis sativa
  modified_base (71)..(73): a, c, t, g, unknown or other
aatctccacctacattttaaccaggtggcacaacaacaatagcacatttatgagatggctaggtttggatnnntcagttcactaacttataacttgactttatatgcatcaaaatcagaggattcatataaccgtgcaaaggaagagattgaacgactaacactaatgctcaaggaagaatttgagttgagttccaatctagaaggagagacaccacaacctagaagatattgtaacaaccccaacattattaaagaccccaaagttgtgagaaccaagggtaggggaaatccaagggaaggaccaaacggggagcagatcccaagaaactcaagacattgtcgcatttgtcgctcatcagaccatgattatcgtcggtgcccaaaccgtcaacagaataatggatctcaggggcaacaatctgcgaacaatcaagcaagatctgactcattcaatgaccactccaacgtgtattttccggacccgcctgcctccacacaagagtcatactatagtggttcatattactagctattttttccaattgatattataaattttatgacactaatcattgcttcaaaaatcctagttttatttacttcatgttatgcttggggtgtttaaggtaattatctcatcttgaacaaatctcaaaattattattgatgaacaactaaattattttaggtaaaaaaaatcaatcttataaaatgaaaaaaaaaaaatatttctatgataatttttaatataaaaaataattaaataaaataaatacaccaatataaaactcaatatataacaacacataatttcatgagttataagaaatttttcttaccaatgtactacgaaacataaatgaacatactcggtacgtgatatttcgtacacaagttttactcaacatcatgcagaaacaataaatgtacacggtacatgatatattgtactcaactaccatcgcacaaacatgtagaagatacgaagtgtaatatccgctttcttgggtaattaatttttttttaattacttttagtttattttgtttgtcaatggggataatttattattttgaatatttatgagtttagtggagtatgaacgttaaaggcaaaactatacagtgagggtggcgagcttgaggcatggattacatgttaggggattgtcatgatgttttggtttaaaaatatttcattaa

SEQ ID NO: 160382 - DNA, 560 bp, Cannabis sativa
aattctctatcttcaattctaattaacactgatctaacccactttcttgaaataattaattccccattaggcatcagggttcccaatcccatctcaaaaacttcccttggtctatcaagttgattaagaactctcgatgacacataagatcgagtagcacccgaatcaaacaaaacagtaaaaataaaaccgttgataagaagctgacctgtgaccagtgaagggctggcggcagcatcagcctgggtaatagtaaatacacgagcaggtgcaggtttggcttcaagctttggttcctccttcttcaattggggacaatctttcttgaggtgccccactgatccacactgaaagcaagccctccggttgcaagtcccaggatgatgtttcttatagcgcgggcactcaggataggaataagtctgtcgtccccctttattctagtttcctcgaaaacttttaccttgccctgaatttcccaaagatgggaaagttctcttcttttgctcaaaagtggaatcaccactctcttttccagggccagaaatagggagagtagt

SEQ ID NO: 160383 - DNA, 518 bp, Cannabis sativa
  modified_base (442)..(479): a, c, t, g, unknown or other
attcataatctcacacttgtttcttcttctacataatctcacatatgtttttttgttcaattcataataaattttttctattaaaaaaatattttccctatattctgcaaagtaaaaaaaaaacttcacagatataacataattatgaatacatatatataaataattgaataattatttaatttaatagtattaatttaatttatatttattattatgtgttttttaaaaaataattaatttacaatagatatttttataaaaaattattaaaataataataaaatatttatttgtaaatttatgctagtaaaatattaatttgtaaatttatactttaataaaatattaaaaagttgagagaattaaggagaaaaaagaaaatagctttggagagattttagatcgctacatcagcgtctcatacttctcttttatatannnnnnnnnnnnnnnnnnnnnnnnnnnnnnnnnnnnnntacgtgcgaggcacgtatactatattttatgctagtttt

SEQ ID NO: 160384 - DNA, 737 bp, Cannabis sativa
  modified_base (431)..(432): a, c, t, g, unknown or other
gcaaagaactcctctcatcctgaagactgttaacttcagtagataagatctcgatggttccctcaaagcgatcagcagcctcgaggtcctttgttagcacgaagctgagggtagacttcgtgcagaagttgaagtaggtcctggtcgatctgatgctcgggctcccaagactcacctaagttcatctacaaaagacaacacacgagatgagtgttggacggagtatcaaacggaaaacaagcaaatacgccgaccaggagtacccaacagattaaaaaacgaccatgttcaaagaaaagtctaaactcaagaagtcagaaagttttcttgagttagggcaaaaagttcatgaagcttggaataagcaagatggaaaacagacgcaatgcagttcaaagataagccctacggctgaaagctaacataagganntggaaaagaagagtcgcagaagtttcaaactctagggtttcctaagcgttctttctaaaacatagttacattcaaagtgtaaacatgcaaaggaaagcataaaggaagtcagaaacttactcaaagattcgaatgtccaggttcaagaaagccagcaatcgtctgtaggcacttcggcaactctgaagccagaaaattccctcttttcgctttaaagtttacttaacaacaaagggtgataaaatgagtaatgtgccagtactccaagtatttataggcaaaagggtaactgtacataaaggaac

SEQ ID NO: 160385 - DNA, 514 bp, Cannabis sativa
  modified_base (308)..(315): a, c, t, g, unknown or other
atcaagaggatcaacaagaaacatacctcccggagaaggtatgagggacccacatactctcggagagcaaagctatagcaaagcacctccgggaggtattaaaccctacctgaacagtcacctcacatttaatgtcgcacgggagaaggcgtattggaactgccataagtattaagtctgacggcataaccccccttctgcagctattacgctatgattaataagcctagtgacggctaatttatgaggaatcacatcagtcaagaagggataatggagtacatccacctaacccctaaaatacctannnnnnnnaccatgcatttcctatgttacactagttgggaatgtgtgcccctactgaaaaatacagaaagacatgtagctcggttctagggatcacaccacaaaaaacactataaataccccccaaactcatgaagtcacgggtcgagatttctgggtttcataagaaccaaagagagaaaaagctaccaagaacattctctgtaat

SEQ ID NO: 160386 - DNA, 578 bp, Cannabis sativa
  modified_base (347)..(353): a, c, t, g, unknown or other
attatgtaattattagctaatataataattattcataagtgattaaaaatatattattatattattatataagaaaatctactaatttttgtaactaatggtgatgtttatgattaattaattataatatgtgcataatgtattatataattatttatatattgatttgttggatgattattgactaatatataattataaataggaattaattgaaaaaaaatcaaattataatgtgatttatattgaactagggttaaaaaagtaatgtaatatgtaaagcctaaaaattattgacacttttatatagttagggctcgtttggtacgccgtataagggtcgtatnnnnnnnaataataaataacactatatttggattaagcaatgtattataatatttacaaaggatttggggtcaacactaatctccgacctggacctggacctggacccggacccggactcggaccccgactcgaacccaacccagacccggaccctggacccgaacccgtagttggtgttggaattgagtgtattaaaaatatattataactttacacaatcaattaataca

SEQ ID NO: 160387 - DNA, 541 bp, Cannabis sativa
ggcccaccttagctccctttgcctcggagatgaccagcgagtttgtttcccatctgactcagttcccgcccaaacgatatgccgcttgtgcctcccttaactccgtctaccaggtgcaagacatcagcaatgccatggctacggtaggtacttgtgttttactttttcccttgatattttgtccaaggcattcgatcttactcttgtctccttttccagattactgcggagaccagccgcctttccaagaccatagttaatcatggctacgtcatgtctgaatttgggggcatagacgaggccgtgaggatcctgcgggacctgtttgctgaaaggcgggcgatccaggaggaggctgagcgaagggaggcccttgctaaggcgaagctcgaggaggaagctaaacagaaggaagaccaggcagaggcgaagttccgagaggaggcctaacggagggaggctgggttggtggcgaagcatcgggaggcgctgaaggcggaggctgaggccgtcgccaaggctaggcgtgagctttgggagg

SEQ ID NO: 160388 - DNA, 542 bp, Cannabis sativa
aagctttcgcactcatggctgatcacagactgatttaccctttcctgcacagtaaagcaccctttagccaagcctagtaagacagtataaataatcatatactcaataaatacataacacataattaatggtgccaccgcactaattgtcaatataatatagaactgtgtgttacgctcacacgcctttatatgtctatgtggcatagacccacgtgttatattcacatgtctatttatgtctatgtagtatagatccacgtgttatgctcacacgtctcgttatgtctatatagcatagacccacgtgttacgctcacacgtctatttacaataaggccttagaacagttcatctcagttctagttactgagcctaattcagttgtgccttgctcgcataaccctatttacatatatacttaatccatatattacgttcttttagtagtttatcttggtgatatataccagatctaacccaattatgtcttatttacataactcttaacataattgcatgcccacaatttatactataaca

SEQ ID NO: 160389 - DNA, 652 bp, Cannabis sativa
  modified_base (386)..(401): a, c, t, g, unknown or other
  modified_base (590)..(620): a, c, t, g, unknown or other
tattggctatacatcagattggactgaaagtgacggtgaaaaagatatcataaacttaccgttatgtcttttttaagtcaatgtcaattagttaatctttggtcaattgatctcaatcttgagatgattaagttctatcttaattgtactttaagggttctttgacttatttgttaaagctgacccaaaggattggccaaatacttacatcttgggaacttggtattttaattaagtgggagcgttaatcatagatatggaatctatagatttattagaagtgaaataatagtttccttagagctttgctaaaatcatttaaataattgaggcctcattttggtaattatattagtttcttgagatatcatttacaagtagctaannnnnnnnnnnnnnnnatacattgaagggtaaaacagtaatttagtccatattcaatgtacaccatctatagaggatcattaactattttgatagtaataatggataattcatagtgtatgtatatttagtatatattgcattctatgtaatcaggagtgcaattcttaatctataacggagtaaggaggaattaataagttagnnnnnnnnnnnnnnnnnnnnnnnnnnnnnnntaggagcttggttacataggctcacggtcccc

SEQ ID NO: 160390 - DNA, 565 bp, Cannabis sativa
  modified_base (286)..(297): a, c, t, g, unknown or other
  modified_base (352)..(355): a, c, t, g, unknown or other
aaaaaaagcccaaagaaaaaagcttaaagaaaatcctactatatatacatattattttaaaccttacatttcaaaccctctctctttttcttctctctaatccgatctctctctctccttctcttcttcatgcgacaacacccttctctggccatccatctccttcattggcttcgctctctatctctcttgataacaggtatgtctctctattgtcctggcaaaagtgacctatatatattagtgcaagtgggagtttgttaggttttgtgccttaaataaaacnnnnnnnnnnnnaatcagatttactaattaataaaatatcaaatcattttatgtttcatggttcacnnnntttatttcatgattatatgtttaatgtataaattctaataaatcgagaacatataggtactcatgattatagtgttgtcaacaaagtggaatataatcgtgattatatgttcaaaagttaaagtcccatgatttgtcagtacagtagatttaaattgacatgataatcagcgataaagtatacttacacatattggataagtgttatgtc

SEQ ID NO: 160391 - DNA, 523 bp, Cannabis sativa
gtatctcctctactttcctactttcttttcaaatttagtcacattcttagaaaagcagtatttgttgaaataaacactttcttatcttaatggccataggatggtccacccctaatgactttagaatagctattaaacttgcaaacttaagttaacagttctagcctttcttgagctcaggattaggtcatccatgaatctagtaatggtatccactaagtacataatcattctatcattctgaagttttcttatcactagggtatttccctagtaggatttaggcagttgctagtaactaatcatagaccttacaatttttgtcaatatacaatctaaatttatggggagataagtttggatacattttgatgtttaatttaatgatctttgaactgcataaccaaatatttctccacccctatcagttcgcaagatctccttaatgtttttcaccattactagaaattcatgaaatttctcaaacatttcaaatttctttgcataaggtaaaatctagagt

SEQ ID NO: 160392 - DNA, 745 bp, Cannabis sativa
aatatttcaattgattaaacaaaatattctatataaaatgtggctatgtaacaaaattcttggtttaacggtgtttttaaattttctatgttaaaaatatcccaattacttaataaaatattctttattaattttataatattatataaatttaaaaaataaaaattatgtaaattttttatataaaaaagtttaattttattatatatatttaatcataaaaattatatctatatataaccacatctatatataaaatatatatttaaatcttaatttcatgataaattttttattttaaaaatgattaataatattgttcaaaaaaattgataatgatatatatatgcttctagtaatttgtacactttatcataaccatactctgttacttacaaattataaaaatgtatctatcattatcattatttttttaaatatatgtttagacataatatataaaatgtattttaaaaataattaattttctaatcaaactcaaattgtatcaaaatattttctaatataatctttttatatggagatcaatataaaatacgtataacaataaaatttatttttttatatacatataaattacgtatatataattacatctaaaagcacccaatatagcctgaatagttaaaaaaaattctcaaaaattaaaatttcaatttttattttaaaaattaaaaaataaaaatacattatctaattaaaaaaaatttaatatacatatatt

SEQ ID NO: 160393 - DNA, 587 bp, Cannabis sativa
  modified_base (47)..(56): a, c, t, g, unknown or other
tcattcaccttatttgattctcttgcttatttatttatttattattnnnnnnnnnnttattattattattattttcgtttttttataaaaaaaacataaacgtatatgaattaattttcattatcaaaccctgtcgcttacacatatttattaacttgacgacgatagtgtggtaccacaacagtattagtacaatcaagttttatatgttataaatcttaatttaagaatattaccgatgaaaaaatcattataaatatttagaattataaaaatatataattacgatgaacatacatataatattttttttgtcgtgtttatttttttatttttttttgagttaatttgaagtacttaaaacaaaaagcttaataaaaacgagctagagtctcgtattcttcttatcaacagcagttacaaaaaaaagggtacttacagtgttttaaaacactattaaaaaagaaaggaggaaaaaagaacaactctcttgacaaaaaaaaaatcccaaacaggtgtctacccctcgtgatttattctatggttatagtggaaaacttttggattaagaagaaagagaggatgag

SEQ ID NO: 160394 - DNA, 630 bp, Cannabis sativa
  modified_base (389)..(396): a, c, t, g, unknown or other
  modified_base (594)..(602): a, c, t, g, unknown or other
aaagggtccatttttttcctaatttgctaaaatcgtcttgggcccattttttttttttttagggctggccctggtttgagaggagattggtttaatttttttgtaagcccagggccttgattatgttagagaagtctagtattatccagactattttcaaaaatataggaaaatttattaaggttatgataaatatggcataaaaagtaaatgccactaaatatgacattatttaaccaatcaaactaaaaatataattttttttttttaaaaaaaaaccatataaaacttttaaaaaaatctgaatttaagatttataaaaaataaaaacttaattgaattaccataaaaaatattaaaattatcttcatatttatttttttaaaaannnnnnnnacaaataaaactatagtgatcgccggagttgtcaatcgtgtcagaaaagtcaccggagtttgatgctggcactggaaaaatcgtaggagtagctgtcgatgcctaaaaagtcgccgaagttgctcccgacgccaaaaaagtcgtcagaattagcattttcgcgagaaaaatcactaaaaaactggtttcttgatgaannnnnnnnnttcttggtaatttttccggtaattttac

SEQ ID NO: 160395 - DNA, 714 bp, Cannabis sativa
actggtcaaatcgccgcactcagcagatttgtttcaaaatcaactgacaagtgtgtcccattcttaaatatcctgggaggagacaagcagttcgagtggacggaggaatgtgaaaaagctttccaatagctaaaagcacaactcgcaaaacctcccgtactctcaaaacctctagacagagaagagcttggaatatacttagttgtcacggagcacgctgtgagcgtcgtgctaatcagaaaagagaacaacatacaatacccagtctattacatcagtaaaaggctcactgaggccgaaggccgatacccattgatagaaaaactcgcttactgccttattctagcaagaagaaagttaaggccctattttcaatgtccgggtgcacatagaccaaccattacgccaaatattacaaaagtcgaacgcctctggacggctactcaagtgggcggtggagttgggttagtacgaaattactttccaatcccaaacagcaatcaaaggccaggccttagtagactttatagtagaacgtacaggcaaagaagaaagcgtaccagaaagcaaccctgagccggtacaaacacctccggcaaataacagtgaagataagctgacttggaaactacacttagacgggtcagctacagattagctacctggtgtaggaattgcccttgtcatgcttagggggcaacacttgcatgttgc

SEQ ID NO: 160396 - DNA, 548 bp, Cannabis sativa
aaatcatcgggattgagcggggttgtgggatttgaccattttacccctagctttagaaataccttaagttttaactaaagggtaatttagtcttttggcaaagaatggaataggtggctgcgctattagttgacacctatcactctcattaatttctgcaagggattagtttagtaattcccttttcatttgaaaaacaagtttagaaaattaaaagaaaaatcaaacagaagttcctctctctcttttctctttcggctggggcaattctaggggaagagctgctgatttttagtgttttcagcaaagaactttgggagattcaagctaaggtaagctcttatgggaacccttctttagtttttaaacttttgcttggttgagcatgtgatttttttttagaataggggctgttaagatttaaaacttgtgcaatctgatttctaggttagttttgagttgttgtaagctctggttaatagttttgaaaggtggaaatggaattgggtaagcttgagctttgaaactcaaagtttaggtcattaatg

SEQ ID NO: 160397 - DNA, 1302 bp, Cannabis sativa
  modified_base (1115)..(1121): a, c, t, g, unknown or other
tggttgagcggacattgcatgcatatggaaatcgacaagggtgctatatgagatagttgactcgagagtcacatcctacgggatgcactttgagatagcatggtgtgcatgaagagttggggcagtcaggcattcgcgtgtgggcatgttgtcgaggacgccaaaagatgaagtgggggagagaccttcacggttcactcaacggactagttattcattacaagcatcgagatgagtatcatggagattaattgttgttcaggatgtaaagtcaagaagactcgggacacaggcagagccagttatctagggtgaaagtctgtaggactcaggtactaagataacatcatggcaatgttggcctaaggtgaaagtcggcaggactaaggtactaaggcaacattgaaatgtcgaggggcgaagagttagaatgaccgaggcattagttcaacatctttatcaaagtgacatttggagtggaggaaccgtatgcgagtatgtggttaacttgcgagctatatcttgaggggtattcctctaagagagaagtttttcccaagttgaagtgggggagcccactaatttatatgtttgatggatcagggtacttgttcagttttggtgtgtgaatccagagggaaacactacaacagatggtttgttcagtgcgaagacttgcatgattgctgcaagctgcaaatagacaatatgaaagggcgtagactgagatcaagactgagctagtttgcggcatgtatgggcatgttttatgtttatggggacactggtgttgtatgggacactgtaagccgaatggttcagagagcatatgccgatgggagatagcgaattgggatgacttcaagtcttaagagtaagactgggtgtcagcaagtttgtcaaaagttagcgagccatcagaggatgcagggttgattttgggagataaacttgtgacacagttttgggactcgacacaagcaggagctcagaggagcaagtatgcagtgggtcagtggggccttttgcatgaagtagtggatgtgcggtagggccggagggccaatgttatgaacttcgcaaagaaattatgtgcaagagtgcacttggtgctnnnnnnngtgcagttggcttgcgagcctcgtccaagtgggacgcaccaaactttatcctgcaatgaaagtgtcttgctcgattgccatcaagaggatggtgcgccatgaagtttgcgtgtgaagtttccggagggacttgtccagagggacttggcttcagtggaagcgtgttctgtaggtgtcgttg

SEQ ID NO: 160398 - DNA, 771 bp, Cannabis sativa
  modified_base (424)..(432): a, c, t, g, unknown or other
aaattaagcaatttgtttttttacagaacttgattctgataaaaaatgagaaagttatgaaggtttgaaaatcggggttcaatggtgtcgaaattgggtgcaccacacgcacagactctcggacaagatgaggttgcgcgcgcggatctctgacacattttgtcttaatgctcagcatgtccctccttcagacacaggtctgcgcgcgtgtcaccctgtaggttaccgagttttctcggtcaggcacactgcaactctcccttccgcgggcgcgattgggctgtttgtagcctattttggttgcacgtgcaaccttcatgggcagcaccaaaaaaaaatccgatttttgtgggattttttcccaatttttaaaccctaattttaaaataaaatattattgttttaatatatttaaacttaaatnnnnnnnnnaaattaataatatttaattttttaatagattattattaatattttgatattttgaggtttaaattttaaaaattgattattttatttttcaattatgattagattttaaaaatttgttaatttctttaatatgtatatattatttaattattagatcacacattttaatattagccatattttaaattaaaagataattttatccttttaatttgaaatattatattaaaattatcttataagataaattaaataactaataaacttgaaaattaacctagatattctaaccataatattttcaaattcaaaattgattattttgtgaaatatttaatt

SEQ ID NO: 160399 - DNA, 509 bp, Cannabis sativa
  modified_base (464)..(477): a, c, t, g, unknown or other
tataaagtaaatgaaatgggttaacaaaaaaagagtatagggtgcaatttccaaaagaaattaggataattttcataaatatagaaattgagggtttagtttacttttttatggcataaataaataacattatagggttaagggttttttattttttttacatttatatgggtttttcttatgccatatttttgtaagaaaagtggaaatcctatatttgtaaaacaacaataagttttgccagaaaagtcaccgacactggaaaagtcgctggaaaaatcaatgtcgccaaaaaagtcacccggaaaagtcatcggaaaagtcaccattgccggaaaagtcactggaaaagtcatcgtcgccggcaaagtcactggtaaagtcaccagaaaaaaaatgtctcagatataactaaaaatataactggttataattaaacataaataacataaaataactcaaannnnnnnnnnnnnnaatagaaccggttctataatagtgttataatg

SEQ ID NO: 160400 - DNA, 842 bp, Cannabis sativa
  modified_base (647)..(647): a, c, t, g, unknown or other
  modified_base (790)..(795): a, c, t, g, unknown or other
cttctccttcttccctaaattgaaacaccccaaatttcaaccccccccgccacccacgaaacagcccaaccacctcgcgcaaccaatgaagttccctaaccatcgagtgccacccatgaagtttccccaaccatcaacatccacccacgaactgagaatgtggaaggttagttttattttttaaaacattatccatttaaaacctacattatccattcaaatgtggtttctttgtattttttatttattgtttggtaaaaaaaaaatttgatttttttgtatatggtacgatggggtacgatagttgtaacgccctaacaattaggcacgctacccaaagtgattaagaaccttaatctcctaaacgagattactaagctaaaaagcgcggggactttaaactctaaacaaaaataggatgaaaataaaacttgtaataattttaactttacaatcaaagattatataattcgggatcccaaaaatattttacaaaatattacaagtctttcaactagcggacctaagtggcaaaacaaaattgcaaaagttcatcactggtagaccccaaccaacttggtctagtgtggtccgaacatgtacatacattgcccaactctcacactcatggctgattagagacaaantttccctttcctgcacagtagagcacccgtgaaccaagcccaacaagataatataaaatattaataatcataaataacacttcatataaacattaattatgccatttcacctttatctgtatgacacagacctgcatgttacnnnnnnatgcctatttatgtctatgtggcatagacttacgtgttacgctcaca

SEQ ID NO: 160401 - DNA, 561 bp, Cannabis sativa
  modified_base (222)..(228): a, c, t, g, unknown or other
tgaacatgagtagctaaacagttcttagggtctagatggagattatttgatattgattttcgattttaatatgatttaactttccttcaatttctatgtattctatttcattcgtacttaattacttttaattgcgtgatcaccaattaaatgtctataattttgatgcgagatctgagaaatgagtatcaattatgctgtagtgaaatagaactgaatttnnnnnnnggacgagagtacctatatggttttgatagcttatagggtttctgtgttaatgcctgttacatgtttaatttagcacgagagtagaaaatttgcatgtaattgaggtttatatatttgagaagactaaatattacattagtaaacctgctattgcatagaaattggtaataagaagataatcatattaaaccataattaatagatgcaattaaaatcgaaagccttaacttttattcattgttaattcctttattaatttacctacttcttacttttgttgttttcttgtttttctaatttaaattttctcttaaaattttatttagccaaata

SEQ ID NO: 160402 - DNA, 596 bp, Cannabis sativa
ccataaacaggagtaggaagagtgggggttccaccaacactcggagtcacccggggctcctgaaggaattttaccgcaccctcagctcgaagggccttctcaaccgtttccgaataagatgttgcttcattggtagtgatcactagacaatgtctattcttcacattcaaaccggccaggtactattcttttttactaaaatttgttggcaccatacccacggcaagtttggccaaatgattgaacgttgtagtatactccgtaaccgacatcccctcagtttgtactaatttggtgaactctttccgcttagcactgcgaactgcttcagtatagtacttagcattaaataactctcggaactcctcccaagttataatagtgatgtcccgagtgagggacaccaatttcaaccacacgagagtgtcctcctggaactaaaaagtagcgcaagtcacctaatcattaccagccgccccaataaaattcagaattagctcaatcaccgtgagccacagctcagccttcatcacattaggacctcctggaaacactggtggtgcttgtttacggaacctttcgtataacggctccat

SEQ ID NO: 160403 - DNA, 538 bp, Cannabis sativa
  modified_base (32)..(50): a, c, t, g, unknown or other
tgatctatatgaataagtaaatctgattatannnnnnnnnnnnnnnnnnngggcataaaacccaacaactttgtcatacattctctaattaaataaataattataataattgcattgtactcttcaaacaaagtccaatgatatataacacgatattttttttttatgaaatattaacttcattaaattaacattctgagtacaaaacatccagaatagcaactggagcattagacacagaaatattacaactagataagtaccgtgacatcctagcaacaatatgtgctagacggtttgctgatcgtttaacaaaacgtacttttattaaaggcatagaaagcataagagaacgacagtcttgagctagattttcgaaaatggaacaaagaggcaagcagctacgaatagcttggatagagactagactatcagattccaaaacaacatgttgccaaccgtttcgtttgatccaacttagagcctctttgatacccatgatctcaacaacctctggagtgaaggcaccattagaaca

SEQ ID NO: 160404 - DNA, 521 bp, Cannabis sativa
tatataattaagaaatattatataaagttaaaatatttttttataaataaattataaattatttaatttagcaaaatagcttctccttccaagaaaaattataaaccccaccttcttttaaaacgactttataaataaataaaaatactttttttttacctaaatgctttcaaaaaaaattaattgtacaagttaaaaaagaacttcaacaagcttactctaatgcacgaagggcacgaaattagcagagattgatttcacacttcttattcctgtaaaagattttaatctccatccctattccatctttatatcttctcatcgaaatcgacataaaattccctaagggatagagtaaaaaataccttaatataaaaataaattttatagtaaaaatttaattgtataaaaattaaaatattacatattatttattatgcaaacataaattataaattattaaatattatttttaaaaaataactataatattaaacaggttatcatcctcacctcgttta

SEQ ID NO: 160405 - DNA, 817 bp, Cannabis sativa
  modified_base (83)..(103): a, c, t, g, unknown or other
  modified_base (740)..(742): a, c, t, g, unknown or other
  modified_base (773)..(773): a, c, t, g, unknown or other
gaaaagcctgtaaatgtatttttgattactaaataagagttgaacattttgatatatatatgtatgaatgttaaattattaannnnnnnnnnnnnnnnnnnnntatataaatatcaaaaaattctttgttcatatatgaggttgtgacttgtagttgtacagaaaactaagatcacttagccatgaataaaacagtcagcaacatattaaagtttaagaatctttaatcaataaatgctagtacatttcaatggtatatatgacaatcatagatatgaataaaactgtctttatcaaacttaccgtttactataaagacctaattcatatcataaagatgaacaatggaaaatcatcctaaatcttgtgtaatcctgaactcttgttcatgttattaattttttggattcactcgttaaagtttttttagagaagatgattcttacaacttccatttcgggaatctattaatgtgtatggctgggaacatgatctacaatcatgggatcctgattttcctaacagatcgaatgttgatttcttttatgtcttaattttagaactggaatgtagcgcgcaaattttaatggaatctaaattattctttcactagtgaattaatagtattaaaggataaggtaaaacagtaatttaaccacaactaattatgaattgacacaaagagggcctatcactagaattaattatatggctcattaggatttttgccccctgaactnnnaaggtcgttaaaaatgccccatgaactattnagattgttggatttaaggactttagtctaatttcattcaatttt

SEQ ID NO: 160406 - DNA, 600 bp, Cannabis sativa
  modified_base (175)..(180): a, c, t, g, unknown or other
atgttcgagatgtgaatatgaagtttttattgtattgaataatgaaatattaagaagagtgttaattttaatcttgtagttaatttttacgtttgaaattacattttgggatttttttttttaattttttttatagcggtatttgttatgattatagtatcattcttgtaaattnnnnnnaaatttcgaatagtttacagtaccgaaaattgagtttcatgatattccacttcatcacgcgtgttcaaaaaattttaaatgtattttcggcactgtacactattcgaaaattgtcaaaattacatgaatgatgttgctataagcatatataacaaacactgccatgaaaaaaatattatagcattttcggacacaaaaattgactaagagattataataaaagattaacggtacttgttactttctaatattaatacaattacttgagtaattattattactattttttaaattaagatccgctcgatcatttataatttcgagagtaattattatatctctcaattatataaatatggatattattattattggtgtctaatattatagtacaagtaattttaataatattttattata

SEQ ID NO: 160407 - DNA, 506 bp, Cannabis sativa
aaaaaaaaaaaaaaaccctgaaaatcactgaagaatttaagatgcttaaatgcatataattcaaacaatcgaaaaaatgtgcttaattaaattataaaaattattatatggattaaaacaatcaagacgcatgtagtacaatcgacttaatgaatatttattaaaggaaggacataaaataatcttatttatcatgtgtttttataaaaagtttaaattctgagtttgttatcattgttgtttatgttgatgatttaaatattattggaactcttgtaaaactttcgatagctatgaaatatctaaagaaagaaatgaaagatttaggaaaaataaaattttgtcttggtctacaaattgagcatttaaaatgtttttcattcatcaatcaacttataataaatcacactcattaagtagcccaatggtagttagatcacttgatgtggaaaaagatcattttcaacctagagaagaacatgaagagctccttggtccagaagtac

SEQ ID NO: 160408 - DNA, 620 bp, Cannabis sativa
  modified_base (249)..(265): a, c, t, g, unknown or other
gatccccaagttatagggatttctccccaagttatagggatttcattgaatagggatttcattgatgactcacgagatttcattgatgactcacgatgcgaaagctgaattcgctaagtgttggccgttctgcacggattgctgattattttgccttgagcatgcatatgaggtatcctgtttggactatatcttgcgaacagatactcggagtcgattccacgtgtcaccatcatgtgatgccacgtnnnnnnnnnnnnnnnnngataacatttgccccccaagtctggacaagacttccgaagttgcgtgtagacttcatccgcgctatctttgtgtttgaataggtgacacgtgtcaggtgcgcctgtgcgcgactcgatgtgaggctgactagtttttggctaataaatgctctgacaattaatatttcaaaatctgattttctatcacaacggttgacagctacacttgatatttatttcccatattcgcttttaggggggaaccgaggcgtctggggttattttgaaatgatttccccttttcgttgtctgcctataaatatcagtgagcatttgtccataaactcattttcaccaaccttccttgctaagtaa

SEQ ID NO: 160409 - DNA, 531 bp, Cannabis sativa
aacataaaatgttatttctgatatttattaataagtaaatctgattatatttaaataggttttatttagggcacaaaacccaacaaatgggagctaagggcacaagagagtgcactaaggagtcccaagggactcaggttgttggtggggcccttactcttcctacctctagttatggtaggggtggtagtggctcgaccactgatcaaaaaagaaaggcacaaactacatccggtggctcaagtcagaacaagaggttccaagggaaccaaggttaaggcaaacgtcaaggtagttctaaaacccgatacacttacctggaatgctctagttgtaaaaagcatcatctgggagagtgtagaaggaagggtgcttccagtgtggtttgtcagggaattatataagagattgtccacaacttaagacataagaacaaaagactgcaggaaaacccgctctagctagggtgtttgctctaacacaggcagatgcagaggctagcccctcaattgtaacaggtcagctctcggt

SEQ ID NO: 160410 - DNA, 633 bp, Cannabis sativa
ttcgaggagtccaactaatcacaacctgcgagtgtgtcacgcatctttagctagcgatatacctcaaaaaatagctaggagaatcttagttactcaaggggcatgcgttctcaagcataaccctgaagttactgagatactcccaccgtttcgagaatatctaccagccaaagaatacgcttatcagaacattagcgcatgccgcaaaaggctgggtgtatcttagtatttcaaggaacatataatcgcatatatgaacattagaatactgtgacacgcccaccatttgaaagacttaaccaatgttcccacaacaaaatatacagagtacaaaatcctaaagttctaagtaacagttagaagtgatcaagtctctgtgaaacctaagatgaacagacatgcgagcattcgaagtgttcatccgaatacccgcgtgtattcaaaacataaagtggcgactattcaagtatttttcctaaagttcacgattatgccaattttaggtcattttctctgagattacccagttccatacctaaaaacatagtcccatatgtatttcttacaaacaatgtattcctaaacaccctcaaaaatgccaaaacccagaaaatagcgttttttctccaaaca

SEQ ID NO: 160411 - DNA, 535 bp, Cannabis sativa
catctaatggatagaaccgatccaatccaacatccaatatatgattagatcggatctggataggcctaaaaacattggatgtgatccaatgaacacccctagcaacatacattatggtattgtatgtttgcttaattttgcttagaaattttattattttgtgtttattacaaaaatttaaacccatataaatttgaaattataaaaagtttaaagtatatatagtgaaaatatattattttctaataataactaaaaatatatactaatatttattacctaaactctttatcaaaaatgtaacaaattctttccatttcaaataaacaaaagtgtacactacataaataatgtataattaacaataaatttaattagtcatatgttaatttttttttttttaaagaaagtatgttattaaatcaaagcaaaacagctgttacaaaagaactaataaatctaggaagcatctgtccacaaatgaacccctaaaggactagtaacagacttagctagtgcatgggccacaccattc

SEQ ID NO: 160412 - DNA, 596 bp, Cannabis sativa
tctcttgcattgttttacttctaagttgaagtgatttgaattactacacttgaacaccatcctctaactccaactccaacttatactatataatggaaactatacaagtaaccacaacaacaataactgcagcaacaatagcacgtcaaataaatattaatcgttttacatcatcaaaaccaaattttcatactccttccagtactattgatggtgaagcggtaatatatatatatatataaatctaactaaggcgtatggaatgaaaatttgttgtgtatttcttaataatagtgtcaattagttgttatgtgtatcacaaatttttgtgaatcttcaaaatagtagatttaactacaaaatattttaactattttatataaattaatggatacatatatgtatcacaattatatagatatgtacttgttagttaattttaaaagtaattctgtttaaaatcaatttatataattatatcactttgttagatgaagatgtgtaaacgtttttcttttttaatttaggctaacttttcattccactttcctctgatattttttgtctactccaaattattaattagggctttagag

SEQ ID NO: 160413 - DNA, 614 bp, Cannabis sativa
tggaaaaatcagcctctgtaatcaaccttatggtcgcggctagagtgtagctcgccgcggccactgggcagtacttcgaaattttttcttttttttttctttttgtacagtacaaaacattaaagaaaaccaaaattcagtttaccagttcactaaacataaaccaaaaagaaacaaaaatattaatcacaactaaaagaagcgaaatacgaaagctcaactaaaacaccaagaaaattcgcctcccaatagcgctgtctttttcgtcgtacagctggtcgttaactgagttcttcagagaggcgccagaatcacagcgaacttggcttggtcaaattaacctcccaagtagagctttaaccgctgcccgttaactttaaaagtctcggggctttcacctttttgttctaccgctccataaggaaacgccttgaccagtataaatggtccggaccaccttgactttagcttaccaggaaacaatttcaaccttgaattaaaagtaaaatctgctgcccaaattgaaactccttcctgactaagctctggtcatgccacttcttggttctctccttgtagattttagcattctcgtaagcctcatttcgaaactc

SEQ ID NO: 160414 - DNA, 507 bp, Cannabis sativa
  modified_base (201)..(203): a, c, t, g, unknown or other
taaatttataccaaatatttcttgagttattattctctcttggaccaccactactaatctaactctaagtctaagttgcctaaactaagcaaatataagtaggagattctaagatcaaggatttatatcatttcgggatagaatgtcgagaatatagtcatttgtgccattcaatttcataagagaaaatagaatgacatnnnaagcaaatgatttataaaccattatccaatgatatactatgtaagctaagaggaataattaaaggataatttcaatttaaaataaaaatccaacgatgtctcggtaggcgagagtcaaagttattcttatttttacacgaaatttacaactataattaataacagaaaataacatggttcaatgtaaattcacttacaattcagaaattattaatcatttagcaagtaaaaaagatatgtgaaaatacaaaactatcatatcttaaataatttctaaagtttccaacaaactaatacaatgtcc

SEQ ID NO: 160415 - DNA, 546 bp, Cannabis sativa
gaaaaattgtacgttcattgctttgataaaaatggagtctatatatacgtagcttgctacggttacgatacaagaaacaatttaattggaaatgatacaaaaaataatcatatatatatattttaatttattattatggtctaaatgaatccttttaatatagagtgattaatttattataaaacacatattactatccgatctataaatgaacactactattaaattggttttttggtttataactgtcttttatattgtttcctattggttcctaaaatcattggctatgtgagtgccataaaaacacagaactttaaatgatgatttataactattgagaaaagtcactttaaataaccgtttacaactattgaaaaaagtcacttaaagtgactttataacattgggaaagacttccatcgaataataacaaacggaaaaagttactttaaatgacggtttatgagtcactctatttatattgcattaataatatatcattcatattcatgacagaaccttcttacttcttagcatttgaac

SEQ ID NO: 160416 - DNA, 663 bp, Cannabis sativa
ccctttccattaacgatgctgatgagattgccatgcctgctggtattgttcccacaactccaccacccatgccacaaggctgccatatgcaaacaagatccaaatcaagtatacacaaaccaaaagtctatcttgtcactgcctctcaaaattcagattatgccatacctacatctgttaaataggctcttagcttgcctaggtggaagtcagctatggacactgagtactatgccctgaaaaataagaaaatttggactctagtacccctacatctgagatgaatattctcaccaataaatgggtgtatgagataaaattcaatgcatatggtagtgtgaaaaagtttaaagcttgacaagcaagaggattttagcagcatcctggcttagattttaaagacacatttaatccagtcatcaaagcttgcattatcagggtaattttctcacttgctgtcacttttggctgggaaatttagcaaattgatgttacaatgcatgttaaatggagtctggcaagaacaagtctacatgatgcaaccaactggatgtaaatgaaactaagcctcattatgtctgcaaactgttagacttttatttgggcttacattaaattttattggttttattaaaacttgggttgattggatagttctttgct

SEQ ID NO: 160417 - DNA, 700 bp, Cannabis sativa
aatagtaggtaatataatcagtcaaatgtatagatatagatatgctcatatatttgcattgcctaatcaggcaatcccgtgtcataatgcaatatcatatataatatcattgggccacctaataaggtgagcccgtgccacaacttgacactaatatatcgcattgtctaataagacgatctcgtacctacactcagtactcatcatatgccactgacgtcgtacctttgcctggtacgtcgcaagatatattgcatcacctaatcaggtgagaccatatattgtatctatagtatcattacattatcattgcctaatcagacaattgataatttcagaacctgtcatgccatgtgctacattatacttttcttacctcaagttccggatcaggtatgttggccgacctgcttagagaatgatcgataatctcaggccctatgtcataacaataataaatcaataagtgtttatcccaaaacaccacttaacacttgcgtaagacaatctaggattttctaccaaattctttggtatacatatactaaaataaaacttatattttggctccaaaacatacactatattgtaaaactcttcacaagcttcgaaacggtatatagaacgtccaaaacggacactcgagtgaaaagttacgataaaaatactatttctaatctcctatgaatttttaaaaact

SEQ ID NO: 160418 - DNA, 565 bp, Cannabis sativa
ttgcctcttaaaaagttcttttttagtaaaaagagctttttaataattatagagggcatttttgtcaatatctttttcttaaaaaaatgcatcctttaattctagcggttgtacgatttcgaggatcattatgaatcgtctcttcatattttgcacaacttccaactgttagatttctcaatctttggctttcttgtcactagacttcgtgtataaaagggcagctcaagcttgtcatttttcacaaaccttctcgctctttagtgagatccattttcaaaatggatcatctctttcctgccaaaatatcccttctgagttcggaagttcatccttgcaaactgttaatactcatatgcaccaaccattttccacttgttcttacagacttcaagcctcaaccgaagctggaaatgatgtattccagggttgaggagcttttgaccgatccaaacctggggaatcccgtagcctgccttggctgatcctcacaagtgatccctgagggtacagatcttgtgagcgatcttaaaggtcctcctcaggctgatgaagaattctagag

SEQ ID NO: 160419 - DNA, 578 bp, Cannabis sativa
  modified_base (262)..(262): a, c, t, g, unknown or other
cctcagcatctgcttgggtcaaaaaacaccctagcaggaaccacaggactttctttcttagcctcgggcttttgtagttgtgggcaattgttcttgaaatgtcctgctactccacattagtagcaaactctagaccggcattcacccaagtggtatgtcttgcattttgggcattcagggtaagggtgccaacctcatttctgccccaacgaaagctctggttaccttgaaactttctgtttggacccacaactagtggtcnatctggtttccttttttggtcattagggctaaagcttttactcactccagtactagacgaggtcttccacacgtccttcctctgagtactctttttacgaatcaagcttttggccccctcagcagtgagagataagtccacaatcttaggataattcttcacgacccctgattgtttggctgccataacaacatctttagaaatatattcttaaaggcctctgataaacttagcctttcttgcagcatcactagccacttcatcagaagcaaacttggccagcctatcaaacttggtagcatattcagtcacagtc

SEQ ID NO: 160420 - DNA, 531 bp, Cannabis sativa
gacaggtgatcgctagggtccgagttcccggtataagctgccatttcgagcatcttgaaatttttggggagctctgcttccaagatgtgccttgcagaaggctcccagtcttcacattcagagtcagagtcataacctttttgtcttcgggagactcgagcaatgtcctttcggagtatggcaagctcagccatgattcctttgtttagtgttcctgtggagactgtgggcacatgattcttttggtctaggtgatcccggaggtcaccgtgtttcccattaatctaatgtctcagatcgacgggagggcatttttggtcccttcttcctctccctccgggttcccggtgcatagaaacgctctttcggtcctctcgatccagagggccaagactccctttttggagttttcccctctgcggacctttcgcttgtgggaaatctgagcggaccttgcacggatcctacacctttttctttttcccaggagtggaggtggggtttttctgctggttcccttcagagggatac

SEQ ID NO: 160421 - DNA, 507 bp, Cannabis sativa
ccttaagggcaattgagtaattttaccattttggagtaagtttcataaaagtgatttttagcaaaataaagatttatttttctgtatcttttcccagccttatggccgaaccccccttctactctctaaactctctctaattcttgattttgggttgtgttggcttggattcaagcttggggtttgtgacttttgtgattgagattgaaaggagttatttttgctttttaaaaaggaaaaattatgggcttttttctctgccctagccgaaccccctcttcctcttttcttcatatttttattttgctaaatgttggaaaattggtgtttttggatgcattttcgtggctggaaactgggtttcctgggtttttaaaactagtagccgcgaccattttatggcagcatattgtattttttcaggtttttattttggtcataacttttgactcgggactctgtttgagacgttctttatattgttggaaagctctttccgagctctat

SEQ ID NO: 160422 - DNA, 604 bp, Cannabis sativa
  modified_base (558)..(561): a, c, t, g, unknown or other
taccatcaggttttccctcacactaaagagttgttcatcaggaaattgctcatttatctgtacctctttcgtattttgactctcttccagctctagtcttgataggtgatctgctaccagattttgagtgccctttttgtcttttatctctaagtcaaactcttgaagtagaagtacccaccgaatcaatcttggctttgcatccttctgtgtcataaggtattcgattgctgagtgatctgtatagacaataaccttattcccaattaggtagggtcagaacttatcacaagcaaactcaattgccaacatctctttctctgtagtggcataatttaattgagcatcattcagggttctgctaccatagtagattgtgtgaaacaccctgtcaaccctttgacccaagaccgctccgattgcataatcacttgcatcgcacatcaactcgaaaggcaactcccaatttggtgaagtgactattggtgctgaaatcaatttttcttttagaacccgaaatgccttcaaacaatcttctccaaactcaaatggaacgcnnnnaacaagtaaactggacaatggtttggagatctttgagaagtcc

SEQ ID NO: 160423 - DNA, 564 bp, Cannabis sativa
ttttttttattattattttgtcttgaaaaatattttttattttgtacttttattattaacattccacattaacttagagtttcttatatatttaagtttttaaattttttatttatttattacatattataaaaatataatttatttttatcaaatgcatataaatttatacttttagaaaaaataattaaaaatatatataaaaaataaaaatataattttttatatatttgtgattagattataacattacaaatcattatcattataataaaatcttaacaactcacaacactttaaaatttataatttatcaaatactctgctcgattttttttctcagttctactgcaactatttttttttttcttttacaacataactacaactaatttttccgacatcacaattgtgctaaactgtgttaaccatttgttcaatgtaacactcattatatatgaaatatattagtaatccacataaatgtaaagaaaaaaaaaggcattccccaaaattttagaataaaatctatggagtgaaggttttttttttttttatttattt

SEQ ID NO: 160424 - DNA, 645 bp, Cannabis sativa
ttttgtgaaataatcccttttaaagttaatttttatgcttgaaaatatatggtggaatttttttcttcttaaaaatattcgttatgcttacaacatcattctgttaaaattttaaaattttttgaataagctttctaaatacgcttgataaattggaatattaaaaactctatttttgatattgtaaattatttaaaaattttcaaaaatttataaaaatgaaactataattataacgaatactactataaaaattaaaaaagatattttagcatgtaatttcgagcatagaaattaactaaaaattttataataaaaagttataattagcacccccatcaaattttaatatttattttagggaggagaataatcttcggtattaggcttcatttcacaatacctagtgcacgacttcattttggatcgtcagataacatatgagcatagttggatgggtagatgtgggtttcaatttacgaaaataccccttttgaactttgatgtaatgagtaattagtgaaacacttgtagaaattaatgattataccattatttatgcattttatgctttataaaacttattttcatgaaaatgtgttatgattattatttatcaatttcagagattttagaagggtttta

SEQ ID NO: 160425 - DNA, 736 bp, Cannabis sativa
  modified_base (664)..(687): a, c, t, g, unknown or other
actacataattaacaataaaaaatcattatcataataatattaagtcaatatcaatattctaccaaaaattattgccaaatatcaataattttgtctaaaaatatatattaagcataaataaaataattatactgattagtttagtttgaatcgctactgagatttttaaaactgtgaccaaaccagagaattttaaatagttcggattgaccaaatcattcacagcgaatttatttggtccgatctcaaataatttaattttgaattaattaaagtttgaaatcacatattgcaaattatatgaacagtctacttttttcataaaaaaattatatgtaacatttgttaaatttaatattataaaataatatgatgttaatataaaaatttctcataattattatataaaaagggaaaaaaatactatatataaattttttaactaaaatatagaggcataattatctttataataattacttaagaagaaaagaagatggagaagaagaaaaaaaatagtacaaaaaacactaaattatatacttatgcatatataagtgatgtgatacaataattatgtatgtatatatatatatatatgataaaagagatgaagtaagtggctattactcatgttatactttcattaataataataataannnnnnnnnnnnnnnnnnnnnnnntaataataataataatattgatttcaaaaataaaaataaggctaattag

SEQ ID NO: 160426 - DNA, 521 bp, Cannabis sativa
tgggttcgagtttgggtctgagtttgggtccaggtttgggtcttcagtctaggtctgcattgggatccgggtccgggtccaggtcacaattcgcgtctaggtctgggttggagtccgggtcctggttcggttatggttcaaggtctaggtccaggtcccataatgattctaggtccaggtccatgtcttggttctggtcccgttcccgggtcccggtctacttctggttttgattctaatttagggtcacagggtatgagttcgggtccaggtttgggtctgggaatgggttcgggtccaggtctgtgttggggtacggggttgggtcctagatccagacactgacagcgggtttggtccaagcactgggtcttgatccgaatcccgatctcaggtcccggtctgattccatttcgggtgttgggtcacgagcagggtcctaggttcaagtcctagtcttgggtcttggatcgtgtcttgggtgtcggtcctagttttgttgcccaagtccctatcctgat

SEQ ID NO: 160427 - DNA, 585 bp, Cannabis sativa
catataccatggttggatgcctcataacatgcaacaaattctgctgccatggtggatgaagctatgagtgtttgttttgcactccttcatgatatggctctaccacctaacagacatatgtagcccgaagtggatctcctactatcttggcatctcgcaaagttagagtcagagtatccaatgatctcaaagtgatttgacctcctatatgtgagcatgtaatctcttgttctcttcaaatatctcatagcctttttggttgctttctagtgatcaattcctggattgcttaagtatctgcctaacattccaacaatgtatgctatatccggacgcgtacaaacttgagcatacattagactcccaacagccgaagcgtagggaatcttttgcatttcttgaattttaaggcttcctttagggcattgtttaagacaaaatttatctcctttaacgacaggggtactacttggtttacaattttgcatgccaaaccgtttgagtactttatcgatatagctcttttgtgataatccaagaataccccgagaacggtctcgatgtatttgaattcctaaaacaaaa

SEQ ID NO: 160428 - DNA, 524 bp, Cannabis sativa
  modified_base (27)..(28): a, c, t, g, unknown or other
aacataaataactgctaatttccaaannaactaagcgggctttacaatacatatggattttagagttagatttttgccactttattttaactaatgaaacaaaagtgtcttttctaattttagcatttttctcatctaattatttaaatacaaattttattttaataattataaaataaaatataatttaaatatatttattaattagactcacaaaatgaactaattaacaaataaattcttatttctcttttcttcttaaagatacccaaacttggtgaaaatactcaaataagacttagtctatttttgaattcttattaaatcaattagttgagtctacaaaatgatattatcccagacaatgcggggaccatgggcctatgtaaccaagctcctaataagtaggtctaaaatttaccaagtaaatttcctgacttcttaattcctcctaactccactattgattcagaattacactcctgattacatagaacactctatatactaaatatagatacgct

SEQ ID NO: 160429 - DNA, 682 bp, Cannabis sativa
  modified_base (139)..(143): a, c, t, g, unknown or other
taactgaatggataagttagtgtgactgttgttgatcaatgaaagagtatgaaatgtagtcatttttgctttaatataatctcattttccataagtaattgtcagatgttcatgttatgtgcatacttctgcaccaaannnnncagtgtaatacaaaatacctaactcgttcaacaattgaatcatgttgaactctaacttgttcttcacatagttagtggtgaaagctttgaagcaaggagatagtgacttaaggatcatgctcacttgattccttttgttgataatagtcacgtgtgtctctacctcacgtattagctctattatttgaaatacacaaaatctaatagggacacccttcttcatattacaattcatgtagctacgagtagcatcatgtcttgcttgattagattgttgcccaaacatgacatgtagagaatttattatttgagatgcattctccatttattcatgcgtcttacacataacattgtccattctaacgagcatgaagcatttggccttgttgttggattgaatccaagagtcatatctgtctcaaatatttttttggggcattgacagcaggttcctcaggacgctcctcagttaggacaaatttgtagtttttacaaaccaacatcgaatacagattatatttctacttcatgaaattttt

SEQ ID NO: 160430 - DNA, 717 bp, Cannabis sativa
aattaattaattttaaaaaaggaaagtctacatattagtaacctgctattacagttcaaaaaaaaaatgtaaccattaaatagtcacccatatatataaataaattttgcattttgtaattatgcatctcacataaaatatatattataattttatataatttatagtattctaattaaaatactataaatatactatttaaatttagtatggtttcaatgtttagaattctttcaaaagtttagaatttatttacatataatttgtaatagtaaatattagtaaaaaaaaatgataaaaaagagcaaattaaaatattggtatatattctctcaaaaaaaaaatattggtatatatatttttttcctaaaagataataatttgtaatttaacacaagtatacaagtattgtctaacctttaaaaagtcaaatgtccattaatcatatcatctagatgaatcgaaagcctgggccaaataactcacgacaataaaataattcaaaaccaacaacaatttaattgtcttgtagttattgtattacacacaagagaaataattagttttaaaaatattttaatgattttggactttatgtaccttatttaattcatttcatgtggtaagataagcttaagaatgacatagcatgataatgagtcaataaaacataaaagaaatagatgagatgacccttcttttttattttattttttt

SEQ ID NO: 160431 - DNA, 658 bp, Cannabis sativa
aaaaaaaaaaaaaaaaacttcagagggaatgatctttgattaattattattagttgagaattcgagaaagaggtatttccagtttagttatgggaacctggtatgagaaatgttacctctaccgtataggttacatcaattcactttataatggtagttaattgtaagtgattgggaatccctcaagtttaagtcaacaaaactgatgaggaattgcaagaggttgatgaaggcagtgatggaaattgaatttaattaacaaaagaatgaaagcaagaaatacaattaagaacgacaaagaagcatctactttctgataaaccaccatgagcttgccatggagttaagcatacttaacttaaggtaatctcgggatgggaaatcttttagggagtcatctcgaaaagcgtacgagtgaggataaagtacgctagaaagattcgtattaggatatagaattagtagtcgttctagagattatcaagaggaagggatgtgttaataagtagagattgacaaggtattgagaggaatatatagtagtggattgaaataagaagtgctctaattgaatatctatcagaaatgaatacttaacttgttgttaagttaagttagtagaccaatttaggaggtcccatataggaatggaaagaca

SEQ ID NO: 160432 - DNA, 567 bp, Cannabis sativa
atcaaagtttcaatatatatatatttattgattgtggttgatgtgactgttagattttacttggcttcagaccatcaatatgtaatgtaatgcatattaggattcagataatgatttacggtattatgtatatataatatataatttatgtttatggcttcagtaatcattttttcggtccgatccctttttgttttgttcgaaagatatatatatatactgataacctattatgcctcttgcggttgaatgcaaccatagattcttatatatatatttacaaaattttgttttatatgctgtgagaataattttggcttggatacatatttgtaatccctcatctcctctcacatgtgttttgcatatatattttgataatatatattcattgattactgtatatatggtttcagatatatatatatatatatttatatattcatgaatttatagatcttgtataaaggccctgctcagtcgagccgaatcaataatttttttttctttcttttctttattaattagttgttgtatataatgtatatatattacagtataatttag

SEQ ID NO: 160433 - DNA, 681 bp, Cannabis sativa
  modified_base (137)..(139): a, c, t, g, unknown or other
gggcacaaaacccaacaaatatacccttgcctttccaactaaaagctttaactccttcagaattccttgtagccaaattgcttctttaaatgtctctgtggtcgccgtgaattctgcctctgtagttgaaagtgctnnnacagattggagctgtgatttccaactaatacaatctctattattttgaaacacataagaggtagtagaccttctagtatccttgcttgatgcataatcagcatccacatatcctttcaatgtcactttctctgaaactctcttataagtcaatccaatatccgatgtccctctcaaatatctcaacaaccatttgagtgccctccaatggtttattctaggatttgacatgaacatactcaatatgcttaaagcatgagcaatgttaggtcttgtgctaaccatgacatacatgagacatcccaaagccattgcatatggaatttcttccatttcttctttctcttctactgtcatagggctttcttccttggttaatacaaactgtcctccaagaggtactgaagtgctcttagaatcttgcatctttaactttgttaggatctgctcaatgtaattcttttgcttcaaatgcatgactccatcactcttggatctatgaacttctagaccaagtatcttctttacttgtcccaattcttt

SEQ ID NO: 160434 - DNA, 527 bp, Cannabis sativa
cataggtaccttttctcttcagttttttatataataaccgaagagaaaaaatacctttctcttcatttattatataaaaagcgaagacgtaagatcttcttgtttgaattttgctctaattacgtcttcggttattatttaaatctaaatatatattaattttttatttagtggttaattatatattaatttttctttgaaacaattataaactaattataagaataaacatttctttgaaataaaaattattttaattatataacaaaattaagtacaaaagacattctaattattataacaaaattaaaatatacattacaaaatatgctaagttcttactaataaaaaccgtacacaaaataagtattgcctaaaattaaaagtctaaagctaacttgtacaagtatcgtgtcaacttcttatttttttgggaggatgattcactacattttgcccttttctttcgaccaaatatcttagtggcttttccagtgaacctacaaataatagttggaacactcatt

SEQ ID NO: 160435 - DNA, 631 bp, Cannabis sativa
ttacatgtgcttctccaactagtaaattgaaacgtgctcaatttttgctcgagaaatttaaggataaatattattttggatcagtattttacaaaagttattaattggactctctattttattaaatgattaaatagatcttatattttttagtatggtaaaataagaccttgagctcaatgttcaataatttattttttaatataactaactttaagataatttctaacacgaataaatacagaaaatgtaactagttttttcataacatttctagattggattattattaagttttattttgacaaaaaatcagttgagggtcctatttgtacaattttagaaaatacagggttcattttgtcattaacaaaacaacggtccaattgataatttttacaaaacacaaggtccaaaataatatttacctaaaatttaattactattttaataatttttatttatataaaaatatatatttttaattatatttatttttttaattttttttcttttagtttatatttttaaaaatacacttattaaataaaaataaattatattttaaattttaggacacaaaaattaagtggacatcaatgtttgacacatagcaagaaagataacatct

SEQ ID NO: 160436 - DNA, 616 bp, Cannabis sativa
  modified_base (560)..(565): a, c, t, g, unknown or other
ttagttctttacctgacagttgggaaacgttggtgataacggtttctaattccacgccagaagggactttgactatggatttggcaaaagatagtttgcttaatgaagaggccagaaggaaagcacaaggtgaatcttcttctttttctggggttcttattattgaaaagcatgacagacggggacgaagtcagactaaaaatcagcatggttctagaagaagatccaagtcttgaaaagatattaagtgttatcattgtaacaagctaggtcacttaataagggattgcaggatattgaaaagagaacggaatcaaggaaagaaaaatgagaaagagactaatacagtttccggtgaaggtgatgttgtcattgtatgtgatgatgggtgtgttagtcttgctacccaagattgtagttgggtgattaattctggtgctttattccatgttactgctcgtagtgatttcttcacttcttacactattggtgattttggcaatgttacaatgagaaacagtggtgcatcaaaaattgtgggtattggagatatttgcttnnnnnncagtgttggtagcaaattgattctcaaagatgttaggcatgttccagacat

SEQ ID NO: 160437 - DNA, 514 bp, Cannabis sativa
ttgatgacccaatttgccacagttataacaaaagatccccaatttctcatatttgaattgtacccacctttggatacccgattccagatcaaaataacaacctgaaaataggggcaggttaacattgaggctaatcaaaactctgagagacttattccatatggccggattgccttcgtctaaatcaaccgtaagcactgtgccagctttagcccccaagatttttccattaacaatggagaaatagtctcttgggagatgataaatgtgtatccagattctaacatgttcaaacatgtcaaaatgttccttctttggcgcccatgctttcaagataaaagtgtaaccacgtacacaccaaggaccatgttcaagagcccaagtgcggttttcagtgcttaaaaatcgcaactcaaaacagttatggttgttagcaccatcattcaaagctaccacagtcacattaaacttccaaactttttccacaaagtcaataatagtggcctcattaact

SEQ ID NO: 160438 - DNA, 544 bp, Cannabis sativa
tcataaaacattatgcaacatcatattctataagcattactcatctagggatactgaattctttactgcttattaagtgcatctgaattaacacaagacaatatctctaattctatccaaaatggaatagagataacacagttaagaactttcttcagttgaataacttttccagtgcttttcgaaagcaacaaagttatgtatcttcactgacagagcttaaattattatagatgggtttttacatccttctaggataattcctccacccccagagtaaccaccatctcgaataggttatgagttggtatagatataaggattctaatatacacccttatcatctcacatataggtcactttcataaatctttcttgactatctcctaatgttccttgtttgattacatctcagatggctcccactcaacagtaggaatctgttgggattttacgccctaagtaaaacccattacaatctaatctgttttgttatcaataaaagattagaagtcatttatgtttatatgttgttttcatgttt

SEQ ID NO: 160439 - DNA, 508 bp, Cannabis sativa
ccatttgcaccctatggttcgttttcctgaaggtaaattaaccaagacccaagtaccatttgcaactaaagtattcatctcttctatcattgcagcaagccaatcaggatgagacattgcttcacgaaccgtttgaggaatattgatagaatcatgtgaagcaataaaagagcaagaagaagagagacgattataagaaacaaaagaagaattaggaaaagtacattaacgtttacctttatgtagtgcaatgggaagatcatctttgattgtcgaatttgatgacaaagatgcaggtacatgacatgaaacaggagacttgtcagaacatgtatcaggcgcaaaggatgtgacagaatataccaaaaaatcattatcctccctctgacgagtatgaatagtggaatatgaaaaataaggtgtattttctacaaaggtaacatcaatagaaacaagatatttgttgagatcaggacaataacacctataccctttctgaagacgagaa

SEQ ID NO: 160440 - DNA, 637 bp, Cannabis sativa
aaattactaattagccattttttaatttcagagcaacttaaattagaataattttcagaatatattttattttattttgaaaatcatttcccaaattaattttgaaatgcatttattttaaatgtagatattttgaattttttcaattttaaaaattagattaagttgaaaattaattttagatcaacttaaatcaagtaagttttcattaatgatttattaaaataaataggcgaaaaatattttatattttaattagaaaatcagtaattagtttataaattatctagatcgatactttctaggtagatttttttggtatttttctagatatatttaatcaaattgaaaattaatatttaagttgatttgtttaagacacttaaatatttgatatttttcttaatatatttaattaaatagaaaattaatttatttaattttagaccaacctaaattagaataatttttccaattttattttaatgtgaatttcaaaaatttattatttttacgggtaaatagcggcataaataccgaaagttttgagtttgtaagtggcataaacccaatgattttttttagtggcataagtacccaatgtttgtaaaactgtaaattttctctatttttgtca

SEQ ID NO: 160441 - DNA, 537 bp, Cannabis sativa
agtacatatacaaaaatggaacatgcgatattaatatctaacagattatcaaaataatgaaaaaaaaataataaaaagaagtctccttaccaatatttatatgaaaaaacaaaaatacaattgtcaaataaattcagtcactatataaatatatgaagtgcatttttaatgggtattaccatgaatgagtattattagaaaaaaaatgagtttttatgataaattttttatttaattagaaaaatttcttagttttacgttatatgaattagggttgttccatcagttgaaaaaaaataataaaaaatagtttttggcaaaaaaatgattaaaaaaaatttagtttgacttaaatatttttcatataaacatatttttaatatagtgtaaaaagaagtattttttgatattttctttaattaagttgttaaatcaagtatagaaattgaaatttcttttttattattcgctattagactaaaatttaatggtttagtatttttattaatatttataattaaatttatttagtaccca

SEQ ID NO: 160442 - DNA, 760 bp, Cannabis sativa
tagagtgagatacttcgtagaattgttctttggtagctatgagactaatttctatgtttagttgttgaatttgatgtgattttgagttagaaatcgagtttgaaaaattttgaaagcttagtctgaatgttaatgtcgtttttcatttaagggctcgattttaatttctattaaggatggtaatatttatggtatatatgcaacctgtgaagttttgagtgatttggataagttttggtagtatttcagtgagtacaaaaattgggattttcgagtttcaccgtttttagaaattcctaagagatgagaaactgtatttttattataacttttactcgagtgtccatttttgacgttctatataccatttcaaagcttgcaacgagctctaaaaatagtgtatgttttagagccaaaatataagttatagtttagtgtagttttaccgaggggtttggtagaaaatcctagattatcttatgtgaattttaagcaatgttttaggataaacacttattggtttaccgtttttgtgacataggactgagatcatcgaggattgttctccacttgggttggccaatatatatgaacctagattaaaggtaagaaaattatattgtactgcatagtactttgaatgtaatataattaagatttttatgaattaataatgttgagatatagttaatattgctatataatgaaaagaatgattggtaaagtattgataatgtgatgatattatgcaagtgatata

SEQ ID NO: 160443 - DNA, 615 bp, Cannabis sativa
taggtttgatatgtcccttcctaccacaaaaatgacaagtaggcacaaatctccttacctatgatctcacactttttgtagtacctggagactttacttctgcgaatacaacatctgcagcgacaggcattgaatctgatccagcaaccttcaaattagcagcatcaggatagtttgttggaatactagattttacaaattttgtgattccagaacatccagtaccatctgaaccaatgtcagcaaagcctctttgacctacattctgagcttcttcaaaaatataagatccaggattaagcatttggacatttttcttaaaattttcaagttcgttctttaaaagagtaatctttttatctttaatacaaaaatctgtctcataatcttttatttttaacttaaaagtttcaatttgatgagaccgttttttattcattttgatcaacactctatttttagaagtaacttgtatccacttttcatacatgactttgtatgattcagtaagagactcttcataaattttggaatcatcataattacacatacaagtctggctttcacgtgtggatcacacaacacattagtcataacagaagttagagcaacatt

SEQ ID NO: 160444 - DNA, 504 bp, Cannabis sativa
acatccatcttggcattgttatggccagtatggctggaaagaaatagtagaatattcgaggataagataagctcagctgagatactttgggaaaaaaattaaattgtggacagcaacttgggtctatagaactaaacattttgaggatctctctttcctagatctgtgtcgagagtggaatacaatgatgtaatagaattagtagagaattttttttcttttcttttttgtatgttgcttttagtttgtcttactacggcttttcctccgccacaagtgagggtttcaataacatttcgggggaggtcgttctaagaccagcgacctctttctcttttcaaaaaaaaaaaaaaattatccaaaaaaaaattgcaactttacaaatatagataaataaataatttgagtcaaactccaacatccaacatgtttagtcatttcttaggtgttgctaactcgattttcccataaaatcctcaacatcctgcaaaatgtaacagagaa

SEQ ID NO: 160445 - DNA, 537 bp, Cannabis sativa
tacgatttttttaattttatttacgtaaaatacggtcttttaatgtatttttatgttgtactcttgttatttttttgttgattttttgttatttgtatattatttttgatattgttttgtggttgttttgatgttttattttattttcttgtgtttttatagaattccataaaaatgttaaacataaaactaaaaaatttacaaaaaaaagagtaatttatgtaattttaccactatatatttatcttttggagttttaccacctaatttgaaatgaaagatatttattacttcccccacaactatgtattataaattagtgtgaatcactgatatattataaaattagtgttatgaataatttcttttgaaattaaacaagatttataccaatatttttcttttgaaatcaaaaaatagtcaattgactgattcccctgtatttaatcattgttaaatgaggtaggaatatatctatgagtaatgaaatgtgtacttaaaattaaactaaaaatatattatttattttttcaaaaa

SEQ ID NO: 160446 - DNA, 537 bp, Cannabis sativa
  modified_base (442)..(445): a, c, t, g, unknown or other
attattatcaatatatatatatatttcttttgagtttttttttaattttaactaaaaggaaagaatattacaaaaatatttctagttagtcaaataaataaatatacagtctgaataaaaaaaaaatacacaaatatcttttatacacaccttcaacccaggatccatgcttcctgggcaaccacgcagtaatccaacgaaaccgaaatgaaaattcaaccagaaagagaactaccattaattctggcaacttcatctgaaaagactacaagaatcaatcaaaacataggctattttgaattcataaaaaaaagtgcagaaaaactactacaaaactaaaattcaaccagaattctagtttaattcacagaaaactaatgttctgactttaattttcaaacccatgaaatacatatatcaaaaagttgaactggagtccctnnnnaatccaactcaagtataatccaaacaaaaagtacatcaatactatagtaaaatatttatcctggtgtattttcgttgttttctaaatttcta

SEQ ID NO: 160447 - DNA, 691 bp, Cannabis sativa
aaatatagtatacaaaaatttaatttttttgtaaaatgtgtagctataatagtatgtgtatttaattttatgagtattaccattctttcagtaatgcctcgcagagttgaggattgattttgtaggcctcagagtgtaccgagtccaccccaagcgaataaatcttaaccccagcttcaagagtgcaacttgcctgtaaaaataaaatgtataccattacatgcgcacacataagagtatcagattttcacagccaactgatttcaagacattatttttttaaaaaaaaattattgtggccctcctaatatatttgagtctggcgtacgtatgaacaaacttaatgagccaaattttaagggtttaacatgactagaaccttataaaacaaaattgtctttcaaaaactatgaaattggaacagtggggcaaatcttcccacaaatttttgtattccctgcttgtcttattaccctgccttcgtgttattgaacaaataagaatctgtatgatcatcacaaaaaacacttacccagtgaacccaaactgcacggataactttgaagaggtgatggtcgagttggatgactttaaagaggacgaagggctgtttgtttcgccacctaaaaagctataactacaagcaccaagaaattgaaactcgaccaaataactttcgaacgcgaatcac

SEQ ID NO: 160448 - DNA, 579 bp, Cannabis sativa
ttataaactagtttaataataatagaataattaattattaaaaaccgtgataatattaaaaacttgagtaaagtaaaacactaaaaacagacattataagggcataaaaaagcgtgttccgggaatctctattataaaaagtttcataaaaaaaaacaatatacaacgatgcctcaaaaacataaaaccaaaatacactatagatacaccctaaaaaaattattggtaatctggcacacaggtcggcgaggtcaatatgtacattgctgaagaagactgtcacctcatgattgatctaatttttccttgcctttaccagcaccacatagcactcgtgagtcacaaggactcagcaagaaaaaaaaataatcatatagtttattattcgaatgttatcatttatacataatcagaatcaaaccattacgcattgttcataagatgaaatccaaatcactactggtatttgccatgaataagcattagtacacagatatctggtaatacaaattcagtataccaataatagaattcatattcatttaatcatataaataatatatatatatgttacctcat

SEQ ID NO: 160449 - DNA, 580 bp, Cannabis sativa
ttagggatttagggtttagggttttgggcatagggtttagggggaagtgtaaagagtttaggatttagggtttaaggtttaaggtttagggtttagggtttaaggtccgcttacagttcaaatttcaatttcgggacacagggtacaatttatggtttgggtctgggtctgggtctgagtcctggtctgggtctaggtccgtgtttgggttcaggtccgagtcttagtcccaaatccaaacaccaaccacatgtcgagtctagttcaagttctggtacaggttctggttctggttcaggtttgggtccgggtctaggtctaattccctaatttagacaccgactatgagtcgggtccaagcctcaggtcttgggtcctgggtcccgggtccaaatccagatcttggaccaattctagctcatgtcttgggtcctagtacgggtcttaggtctaggtttgggtcttgggtcctaagtcatgggtccgggtccttgattcaagttagggtcctacgtcccagtctaagtgcaggtcccagtccgtgtttggtactagtccttgtctcgagtcttggcccagt

SEQ ID NO: 160450 - DNA, 797 bp, Cannabis sativa
aaaattaaaaaaagtcgtcgggtccgatggggtccgattggtccgaacatcggacccacatggggaccatcggacccaggttcaaaaaattaaaaaataaaaaataaaaaatagccatagggtccgatgggggtccgaccatcggacccacatgggggaccatcggacccaggttcaaaaaattaaaatagcaatcgggtccgatggggtccgaccatcgaacccactagatggaccatcggaccatcagaccttcacccctgccaccaaattttgcaccctatatcgggcccccatcgggccagcatcggaccccatcgggcccgacaaaaaaatacagaaaaccagcaaaaatccagttttcacatgcagcaaacatttaaacagaaaaaacagcaaaataacagcaacaatccacagatcaagcatcaaaataacattataaactaaatataacaacaacaaacaagattacacaaacaaaaaaaattacccattgcttgtagaatggtgctccttgtatgatgctccctccaaattttaaagaaaataggtagataagcttgtagtgtagtataatatagtgtaatgaagttaagaaaatgagtgaagagaaaaaaaaatttatggtgggtagtgaaggggagttcggctagagtgaaatgggatgagaagaagagagaagggagtggggtaatgtaatgtgggggtaaaattgggttttagaaaaacttatcccattttacaaatgttacatagtattagtttagaatactaatttttgagtttattaagca

SEQ ID NO: 160451 - DNA, 856 bp, Cannabis sativa
agtgacccaccaagtgtgactcggtaaacgtttccctacttgctcagcgtgtcactatagcataactttaaatttatatttaaaataataaaaaaagtacacagtactcaagaaaaatatttaaattatttttttaatctcataaaataagtaatactttttttttattttatttgaaataaaataattaaatatttttcttttgctgaaaaataaattgaatgtgaagtttttttttcattaaaataatataaatagtcaaagattcctttataataaccctatcatcccctttcatcaaccaaaccctcagccgtttctcattctctctctacgacatctgatttcaaaaaaaaaatatcttgccatcccttcgtttctcactggaacgacgaagacaaaccatcgaaggaaggccctcgtcttcgccctgggacaacgaacgaaggaccctcgtcttcgccccaaacgccttcggtctccgtccccttcgatgctccaccgtcggcttctttgccctgaacgcctcggtctccgtccccttcgtctcacatggctccctcgtcttcctcgtctccctctctacctatctctgatttgtgcgggtggatgggctccgacgtcttctgccacgatatccgcttcctatctccgtttattgtagatcgaagcttaatgtcgacgctcttctctatttctcctctttgttggctctttattttttatgcagattgatgacaatggtggttgttcgatgttggcgattgtggatgtttagagtgcatggctgtatatgattatttgttggctcatcaccgtggatggccatgaatttttgagttttgataattttttt

SEQ ID NO: 160452 - DNA, 507 bp, Cannabis sativa
cggcagtctccaaagcatcaaccttctccctcaagcggttcgcctcgaccgtctgagcgtccttatcatccttcagccgaaggaggaccttccgcagagtagtcctctcatcttgaagacgatcaacatcagcagataaggactcgatggtttcctcaaagcgatcagcagcctcgaggtcctttgtcagcagggtgaccttcttctcagcggcaaaaagcttcttgttggcctcacccaactcatggcgaacagctgcagtctccaccctggcttcctcagcttccttcttggccaagtccgcctccgccctcaaggtgtcagatagagttgtactcttggaagcagcagatttagcccgggagtaagcataacccagcttcaaaacggcctgtacaaaggaaaaggtcagcatatgaagctaagtatgaaaagctaaaagggaagtgtcaaaaagaaaagactaaacctggtaagctcctgcaagacttcgcccaccaacacatc

SEQ ID NO: 160453 - DNA, 500 bp, Cannabis sativa
cttaagaaatcataaaatgagaggcctaagagctttatcttggattggatcactaaaaccttgtctaaatcactaatttgcagcaaggaaaatccccaaaagctcttggtccttgagggttcgaaatagagagaaaaaaaaatatggtttttctcaactctagatactgagccctcatgtcggactctaactcctaggtggcttcctccaccatactatttctttagagcaccttgaccaaatgtatggtcttattctgaagaactttttcttttttatctaagacctgaactggttgctcttcgtatgataagtctggttgcagctcaagattttcataacttagtacatgaaaaggatctgaaacgaactttcgtaacatagaaacatgtaatacattgtgaactgctgaaaaagacggaggcaaagctagacgatgtgccactagtccaactttctcaagaatctcgaaatgtcctgtaaacctagggcataacttg

SEQ ID NO: 160454 - DNA, 761 bp, Cannabis sativa
caacttagtttctgcactccataactttagtccttctcttattttttccatttttttttgttattatttcattgcatacaatttatttttttttattctattaaaactttagtacaaagttcctttatgatgtctcgtacacacatcatcattttttatgagctatattcctttatgagaattttttttttcatatttggataatccttaaataattaaagtaattttagaataatattatgcgtttggtatgaggtgtttaaaataatttgattatagggaatattatgaaggagaatatgattatagagaaatgtgtaaactgtgtttggctgtgtagggtaatatgtaatcatatttctgttaattgagttatactttttggttgagtacatgaatcttatatattattttaaaaaattaaaattaaaatatttttttattgtatctatataatgttaattatacattaaaataaaataattattcattaaagaaatatatttatcaattagaaaatattaaatttattgtattttttattaattaaaatgaatatttctatatatcactatgttatttatttttgttcgctatgtcatttatgtacactattctcataaaatttatgtataattcatatatatgttattgctaatcacataaaaataactcagttataaaaaaatcaatcttacagactaaatatatatatcatcatattttgtttataataaatcataatattaatggtatttaaa

SEQ ID NO: 160455 - DNA, 765 bp, Cannabis sativa
  modified_base (714)..(714): a, c, t, g, unknown or other
tgacggttccaactagaataatggttttattccacctgtcaaccaagagaatcaatcgctaaggcaaccaggttcttctgtgttcgataggttgggaacaacccataacctatggaacgatctaaacagaagaaggggaacggaggagcagaatactacaatgatcgtgcagcccggaacccatacttaaatccctgctcagaaagacgctgacgtaatccaagttgaccaaaatgccgagcaagtcagcccagccgtataggcccagcttgacgagctgaaaaatatgtttcatggcatggccagacaacataacaatgatcttgaattagaccgtgctcgtggaactcctttctcaccagagattaatctcctgccactgcctcacaagatcctttttcccatctcaagtactttgagatgcaaatggatttgcaaggagtacgaggggacgtatgctgcaaaatcttccccgccactctgtcaaaagtcgcacagcaatggtattttaagttggctcctagaaagtttagttcattgaaaaccttttcttcagaattccatgcgcaattctcttcctcgcgtcagctcccattgaatttgggagatttggtcgaagtaaagcaacgaccaggcgagccacttcgggcatacatcagtagattcataacagaagcgaccaaagtctcacgagtaaccgaggatggaaagttntccgtgatactggggggcattgaagtccttggtgaactatggaaggatata

SEQ ID NO: 160456 - DNA, 533 bp, Cannabis sativa
gatcttcttagaggtgatcaagcagctacatgtcttttttctcttgagatggcggtacatagagacatttcttttgttattgtggagagtgattctgaaattactatcaaagtccttaaaggccaaattggtagatgggaaattgataatgattgtattcattgtaaaagaatttctcagtgatttttgagttgtaatttctttagtgttcgtaaattttttaattttgtagctcataatatagctaagtggacattcactttcaatttaaatggggtgctagatttatctagcattctggtaaatagaatctgtaatgatcaagatgtttaatttttttttatttaataaatgttatttaaaaaaaatattttttttataatatttgaataattaaattaaaaatacactatagcaaatgttctaaaatttcttttcttattaattttaaagatttttaaaatttattatttatgtttatatttataaaatattattaattactttaaatatattgttgaccgagattttcg

SEQ ID NO: 160457 - DNA, 730 bp, Cannabis sativa
agggcttaccttggcttgattctctctgaatttcttgctgtaaacactaagaattagcaacaatctcccttggtttatggctggttcgaagagagagagaaggggaagagaggttcttgatttttaatcttattttcctttaattttctcaaaatgaaaaagtgctttctaacataatccttgctgaaaaataaaaggcgaagtgtcacactctagggcagccaccaaaccatttcccttggcaaaagaataaaacgccctttatgtttaattctagcctatttcaaacctaagggtaaaatagtcaaaaaccataaccccgcacaaccttggtattctattttctccaatgtatttcccactaggaaataatgttctagacttacccatgtgatcaaactagccatccatcgcataattcgttgttgccgagcaaaaattacaaaaattacataattcacatataagtcaaataatacccctagagtctaataaaatatctagaattgataaattataactctagtgcccataataatggggcccatagttgattaaaatcataaatagttatagaaatatcaaaaattagtgttaatttcctttgctaaacccaataactaatgcggtcattacaattatcgcccctttaaaaggattttgtcctcgaaatctaacctgaatagctctagatattgagttctcatatcagactctaactcccaggtgg

SEQ ID NO: 160458 - DNA, 552 bp, Cannabis sativa
  modified_base (50)..(52): a, c, t, g, unknown or other
agacaaaatttggcagaaaaatgttgaatacgtggctagcaaatagatgnnnagaatactagtatttatattttaacaattctaattatgatttgatgtatgaaagacatatgattatgtgcttgctttagtaatttttttgttatttcttaatattaatttatgagtattttaagtcttcaaatttatgctttgatgtgcttatgcatagataaaatgatgattttatttttataatgagaaattttaaatgaatgtgcatgatgagttctaatgttgatcaaagaggaagaggtaaaaataaatattattggaccctagaataagataatgcattgatcgactgccttctagagttgagtcaaaatcctacatggcgagctgattgtggatttaaaaatggttatttgcaacaaatagagagtatgttataggcaaaattatcaggttctaacttgaaggcatcacctcatattgaatcacgtattaagactttgaaggaaaagtattcttgtttggcagaattactattattaagtggtttcaattggg

SEQ ID NO: 160459 - DNA, 621 bp, Cannabis sativa
cttttctaagaaaatgactaaatttgaaagtagcaaagtagaggagatatattttcttgattctaaaagtgttctatcatcttattttttttatataagatggtcacactgcctttgttgtattgatacaactgacaaggtcaatagatagtgttcttagacagaaagtcacagtatcttgttgtaatgggaaagttttaaggaactcaccctgttatgacttggaagacactcgtaattaaatttattgttagtttaaacaagtaatggatagtcagaataacgaactaagaagtaaagccaagagaactatgattaaaaccattcatatggagtaacccaaaagttttttattacaaggacaagaaatgaaattttgaaaataagtctattcaatggacttagcaaaacttcttgattctagtattataggtttgagattatctaaacatatggcttatggtatacatggtaatttacctattctggtgtaagtagcttacttttgtaagatggtggacgcatttttttttctaatggctatctataggaagtcttttgactcttagacatagattttatttatatctaaggaaaagttttaactattccagaaaagat

SEQ ID NO: 160460 - DNA, 728 bp, Cannabis sativa
tgtagaccatctctcgatctagcactaaatatgagtatagaagtgatgttattgctacagctgaattgacttagttgtagtacctattctttgaactttgaattcaactctctcaacctcttactatatggtgtgataatctaagtaccatcatgctcactcagaatcttgttcttcaccaaagaacaaaacatattgagctcaacttgtatttcatcaaagaaaaggtgcttaataaaactgcttaaatcaaacacctctctacctatgatcagttcgcagatgggctaactaaagccatatcgagccaaagatattttgagttcaaacacaaagccaaaattaaaaatcatttaattatgagtttgaggagaggtattgaagacggttaatacagttgaaggttgttagagttagttagcacgtgccaattagctagctcagtttgttatgaattctgttattgaatcaattgtaaagagctactatataagttgtaacactcattgttaatcaataatactctttcttcaatccttgctttctctttactcttcctcttttcctctctgttttctctattttgctatcttcaatggctgaaaacttcaacaagttgggacgactgttgtaacgccctaatgctaaggcacgctacagtactttttcaattacagtgcaatcttcgctaatcgaagagttttcttgaaaaacgtgtcaatttaaaa

SEQ ID NO: 160461 - DNA, 613 bp, Cannabis sativa
attagacatatacaacaatatttgatatatcgtattgctgaaaattaaataccgtagtaataaaattatataccacaaagaaattataacgctactaaattaatactcaaaatatatatatttatcatgctaacaaaattatatataccactattaaaatatgaaaacatactaaaaaaattatataacaaaatagaaactaaatattatcttaaataaatgatatactatagataacaaaaatcatataccatacaagaaaacgtatatacctacaataaaaaataaaacaaaataatataatattatattattaaaaaaattgtatatagtatattaacaaaattatatatcaattttatgtataataaaataaaaactaaacatgtattatctaaaatataaaatgatactatacaataaaacttatatactatataacagaaaatatatcacttacaatatagaaatatatataataataataataaataaaaataaaattatgcaccatgttaacaaaagtataatagaaaatagagcttaaattttattaaaaaaaatatataccgtataataaaaaatacatataccattcaccaaaacatatata

SEQ ID NO: 160462 - DNA, 553 bp, Cannabis sativa
tcaagatataggtcaagcattccgattccagtctgggtattggtccgaaatctggttcgtatccggatccctatataggtccaagtgtgtgtttgggatcgggtcccagatttaggtccaggtccaggtctcagtttctgtctaggtacacgaccctgtctgggcccgagttccaatctcagtttgggtctgtggctaggtctgtgtttggttctaggtctgggtccgggtcctggtcacggtcctagtctctttttagggtcctggttcggcgattcttgttaaggttctaatttttggtcccaagtatagttctgggttcgggttttgttcatcgtctggattttggtcctagtctgagtcccagatctaaacactgactactggtctatttcaggctccgttaccggaatcccgagtctagatctggatcactgtcacaggtctccgtgttgttctggtttagctcctagggcccatttttgagtttgggttcaggaacgagactagggttcggttctacgtccccaccctggttctttgtacctagtct

SEQ ID NO: 160463 - DNA, 609 bp, Cannabis sativa
  modified_base (322)..(325): a, c, t, g, unknown or other
agctcgtgacccgacaccagaaactgaacgagacaaggagccgtgattgggatccggatctggacctagggcttggacaaaacccgtagtcagtgtcagcatttgggacccagccctggacccaaaattggaaccaaaacttgaagttgaccgggactggaactaggacttggacttcgaatcataactgaaataggacttaaatctaaaacttaactggaccaagaccaggactccaaataagacctagacgagaattaggagctggacccggatcccaacccaaacctggacttgggacccaaacctgaactcagacccnnnnatggaaccaaactagggacacagaaccatggttgggacctagaaccgcacccaagtctccatcccgaacccaaactcagaaatgggacctgggacctgaaccagaaccagaccgagacccgtgacagttatatagatcttgactcgcgattcaagtaacggggccttgaacataccaatagtcggtgtctagatctgggacttagactaggacaagaactgaaacgaagaaccaaacccgaacccaaacctagacctgtgacccaaaattagaacctgaacaag

SEQ ID NO: 160464 - DNA, 557 bp, Cannabis sativa
  modified_base (298)..(306): a, c, t, g, unknown or other
  modified_base (386)..(397): a, c, t, g, unknown or other
  modified_base (487)..(496): a, c, t, g, unknown or other
gtcttccaagtcataacaggatgacttccttgaaaccctgccactacgaaatggtactgtgactttctctctaagaacataagtagaattatcctgttcggttgtgtcaagacaacagaggcagtgagaccatcttatacagaataagatgatagaacacttttgcaatcaagaaaaaaatatctcctctattttgctactttcttttgagacttagtcattttcttagaaaaatagtatttgttaaaacaaacacttttttatctaatgactttgggatggtccacccctaatcacnnnnnnnnnctatcaaacatgcaaaccttggttaacacttctagcttttcttaagattatgattaagtcatccatgaatctagtaatgnnnnnnnnnnnntacacaaccattccatcattctaaaatttttctattactagggtatttccataggatttaggcaacggctagtaactaatcatagacctnnnnnnnnnntcaatatgcaaatcaaatttctggggaggtaagttttaatacaattcaagattcaacttaa

SEQ ID NO: 160465 - DNA, 854 bp, Cannabis sativa
ttttgattgctcctatgaatagttaaaccgtctattcatattttagcttaagtattattcttcaaggcattcttgtgcctcgtttataatacatcccacaataatgtgagccgttaagtattcaactcgcatataactttatgttgttttatgagttgatctcacttacaacagctattttgatttttcctttgtaaagaaaatatttttcaattccttgactttatattgtctgtagataattttaatcaattatcctttcctttgtaagaaattttttaattttgggggtttgcaatatagtatatatttctaggtggtttccagtcattatacacttatatatgcgcctaagtaattttaaagaaaataaactttgtaattacttgaacaaactttaacttcattcataataagaatttaactattacagagataaatacaacatttacatattatatttactggtaataaggtttcaaatgttcactattccaatagttctttattagcgagccgctaagccaagctaatttgtaaatcctggttcccacgactacttcaataacataaggaccttcccagtttgggttaaacactccagcagccagatcttgcatgttcgtaaatacatgtcttaacaccaaatctccaaccttaaagagccttttttggactcttttgttaaaatatcttgtgattcgatgttgataggctgtattggttatttgcgactcatgatgtctttcttcaagtaagtccaagggcagattcaaaagttcttggttttcttattgattatagaattcacgtctgtgggtcgcaatgttaacttctactagtaacattgcttc

SEQ ID NO: 160466 - DNA, 502 bp, Cannabis sativa
ttatttatgcaccttgaatgtgtacgacctattagtacgtatatgatattgtaatggaatttgctagcacattctatgattttatctagtaacattttcttactgagtcattctgactcactggtgcttcgtgatgcaggtaaggaagttagaagctgtgttcggccatgagtcagaggtcatctagcgatatacatatcagtcgtagtgtcttggcttccgaggagcaggatcgacttcttttctatgtttggaaatgtaaccttagttttgtaacattgatttgtaaccaattgtaaaagaaatttataaataggggatccccatattatggtgtatttagtatgaaatttttatttcaacttttttttttaaaaaaaaaaagtcttaattaaaccaaaattttctaaactaatagattagtaagaaataagtttgtaaaagcacacaagtggcgtccctgagggtcagggcattacatcggatatctacgaggatccaa

SEQ ID NO: 160467 - DNA, 624 bp, Cannabis sativa
agggtttaaatttttggtttaataataaaattttttaattttttaagtatataaaatcaaatttcccttattaattagagtgttatagaccgatacagttcggtgcagaacgtatcgtacgtatacagagactgttttattctgggaacgccatggttgctagactgtcgtgcacactttgggtagagccgcgaaacgtcttaaagaaagcgacattgtccgcgacttagttagattattctatcggtaattcgttccagtttcattgtttttttaatttcgaaataataggtatatattaatgtaatgtaatttagaggaccaaaaagtgagactgagaaagaatagttatagatttggagaaagctaagaagaaaaatttagtgtttattttagattattttatattaatttgactttgaaaagttgtattggatacgaagtaaattaaagatttttattccactattaaaaacaaatcaaaattttattcacataatttaataatacttaaaatctcatttggaagcttttttaataattttattatgagagaattttattatatagtaatttatggtataaataactaaggttaatttttaattgtaaataaatacttaa

SEQ ID NO: 160468 - DNA, 578 bp, Cannabis sativa
gaaagaagggatagttctgggacataagatttcaaaagcagggattgaggtggacaaggctaacgtgtcaataatagagaatttgccgcctccagtttctataaaaggagtaaggagtttcttgggtcatgctagtttctatcgatgatttattaaggacttttcaaaatctctaaaccattgtccagtttacttgttaatggcgtaccttttgagtttggagatgaatgtttaaaggcattccaagttcttaaagagaaattgatttcagcaccaatagtcacttcaccaaattgggagttgccctttgagttaatgtgcgatgctagtgactatgaaattggagcagtcttgggtcaaagggttgacagggtgtttgacacaatctactatgctagcagaaccctgaatgatgctcaactaaattatgccacgatggagaaagagatgttgacaattgtgtttacttgtgataagttacgaccctatctaattgggaataaggttgtagtctacacagatcattcagctattaaataccttatgaccaagaaagatgcaaagccaagattgattcg

SEQ ID NO: 160469 - DNA, 530 bp, Cannabis sativa
ttttaattgtactataaatcactttaaccatatatctatttaaaatctttttaaaatatattaaaaaaatgtggtataagatattttagttaaattattttaaaatttacggctggctaactttaatttttttagctatttatttgttcattttttttaaagagttttagctatttatttcaatacaaacaaactctcacttttctaaatctaaccctaatattaactttacattcttaatattttttttttctcattcctcataacaatcattctctctcttcaaaatctactattaattctcactaagatttttgttaattgctttgtttacgatgatattcaactcgacggtcttagctccatcgatattacggtgataatttctacaataaactcggctgtggtagcttcataaatatttgtgtcagtttctagaatggtatgtcaaagttaactttataatttttaaaaaatattttaatttttaatacatatatagtttaaagtgtttaaagttaaaatataca

SEQ ID NO: 160470 - DNA, 655 bp, Cannabis sativa
tgtaaagggttttatttagggcacaaaacccaacagtccatgggtaggacaccatccgtgagtagaacgaggtctgctagtaactataaccaaccggatctgcgagagcacttaaactagaaaaaggctaatcttcgccaacaactcggtccaaagtaagaggatcccatctaattgcaaatagatgagttggtggataagtttagaaggtatcaagtgtgggagctaggaaaataatcttgatatgagtcagataaggagctcgagccatatcatccagatatcatgaacactccttttcaccagggatttaaaaacccccatgtctcatcatatgatgggaccaccgatccggtcttgcatttgaataactttaacactataatgcaagctagcaatgttataaacaatttacgtgtattttgtttcctacctcactagttggagcagtgagcagctggttcaataaattcactcatcattccatcacttctttggaacagctgtctaaggacttcaataagtagttccaggccgtgagggatagacgacccagagtgtcctcactcaccaatataaagcaatagcctggcgagacgcttaaggcctacttaagttgtttaagcacggctgctgcaagagtaagaaatttgga

SEQ ID NO: 160471 - DNA, 666 bp, Cannabis sativa
  modified_base (489)..(494): a, c, t, g, unknown or other
  modified_base (553)..(560): a, c, t, g, unknown or other
tagggtcagtcttcattccatgaatcagccagagtgatgtactcgtgtataagagtcattcattccgtgggtgtaagtgcccaatggaggcttgaagcggggacgttagtcgctaggtgaaagacttttgtatttgtatagtgaaaattttgtaaatggttttgtaaacaggatcccagaattttatatgtatgctattttatgtttttaattaaataagcaaaatttcaattaatcatgattttcgataacctcattgattagcaatgagctgcatagtaagttaaaaatcacgttaacatgcctaaaatagttagggtggtacatgggttctattcataggatactaaactcatatttcatacataaacatacagttgaatccattgatagaaaatagatattaacaacttgtgaaggttatactgttttgtccaatgtgttctggaaactgaaatttaaaaaaaatctatttggaatctaaaattnnnnnncaaagacttaaatttataccaattttttcttgagtagttattctttcttggaccaccannnnnnnnctaactctaagtttaagttgcctcaagtttgcatatacaagtaggagaattctaagattgaggatttatatcattttcagatagaatgtcaggaatatagtcatct

SEQ ID NO: 160472 - DNA, 649 bp, Cannabis sativa
  modified_base (405)..(405): a, c, t, g, unknown or other
ttcacgatgcaaagagattccctaataaccctacctactacctctctgtatgttccattaattagtatttaatttaaacacaaacttctatattcttccatttaaaagtactacttgtattgttgttctatgtatctgtgctacgtagtaaattcgatcttaatttaatccaaaaccctagctgtggatctgttaagataaggaacaaattattaagtactaggccaattataattaataagcttaattttggtacatggcaaattattacaatagtaaatttacaaaaaatagtgagataatgccactacaagaaaaaacattaacgataacactgaaaaatgtaattaaatactgtattttgtaacattttaaaaacggttaagacaacccatgtaattaaantattgatatttaattacattttttatatgttattaaatagcatattataacattattttagtgttatatattataatagttaacattaatttagtgttatagttcattatgttacatttattaataatattttcaaaatgtaatcaaataggttttaattacattattattatgttatatataaagaaatattacattttaatattgttataatttcttaataataactattttttaatgttat

SEQ ID NO: 160473 - DNA, 577 bp, Cannabis sativa
aagatccgaatcggaacgagaccgggacctaagattgggatacggatctttacccacgaccaagggcttggacccaacccctagtgggcaactagatcttggaatcgtaccaagacccgaacttggaaccacttccaaactaggacccaaacccaaacttggatccgagaatcgaaataagaataagaactggaataaggatcgtggaatcggaattagaccttcacctaaaccagatctagacgcaaaaccgaacaatgagccggacccaagctgggatcaatacccagacccagactggaaccaaaacccagacttgcgccaggacctgcgaaccagatcccgtaacccaagacgcgtgacccaggattgggtccagaaccgagacctgtaccagaacccagacgcagaccaaaacctagacccagactaagacccggacccagacacggactgaaacttggacccagacccagattcggactcgtacaaggactcggactcgaacccgggacggggacctagaccgatatcaggtatgggacctagacccgaactaggaccaagacctgaacca

SEQ ID NO: 160474 - DNA, 569 bp, Cannabis sativa
  modified_base (40)..(46): a, c, t, g, unknown or other
gttttacactcaaacaatataaaacacatacacctgcaannnnnnngatagttggatatagggtttatttaattttatttaaaaaaaatcgaaaataaataaatcaaaaaaatatttttttatctcggaataataataattaaataaataaattaaaaaaaaataaaaataaacctataattttgaaaaattagctttcaactaacctaagtatctttttcaaaaaaaaaatgctaactacctttcaaatttcatgtcattttaaaaaattaaatattcaataaaataaaatgataatttaatatcattttttctgattttataatttaatttaaataaaaaataaaaaaatttaaaagttagtataatatcctatttctatttaaaaatatcattattaaactaatcttattttaaatttaaataaggtcaatttattataaaaaaaaatagaataatttaaaaaatattaaatattagacctcaaatttaaaaataagataagataatcaaatttaaaaaataagataatcaattcagccaaaaaagatagatttttacctatttca

SEQ ID NO: 160475 - DNA, 520 bp, Cannabis sativa
agagagagagagagagaattttcctttttagattttattagacaaagtgaagttactaactattgctacattggtgtgtcatttgaatgtaattatatatatacgtattttttaaatttttaaaatttttttaattaagtaacgtatctaataatgcatatattgtaatttactatattcttaaccaaaactcacataaccaaatttgagtgtgtctatatatataggctgaattcgtaaatttgatataaatattttttattcccaaactttacgaaaaatatggtgtgtgaatcggtttaccataactaaaagggaaatcaatcaattccttattacaactatttcaatctaaaatataaaataattaataataaaattaaaaacatttatagtattttaaatttaaatttctttatataaaatatctgcatattttttctttttattttaattcaaagttaaactaataaatttaaaaatataattaaaaatatctataatattttaagtattttaa

SEQ ID NO: 160476 - DNA, 545 bp, Cannabis sativa
gttggtgggatttaaacttttgacaactgacatatagcttaaaaattaaactgaaaagaattttgttattaattgcttactttaatttaaaaatatatcttattattaattagggaaatttgcggcaaaaatccacaaaaagttcagtttaatacaaataagtccccaacttccaaaaatagcggtagtagtccccaatgtcacattttttgtaagtccgttggtctccaagttaacagatccgttaaacccaattcaaatgccacatgtcaattttttattggtccagataataattttaattaaaaaaatttaaaataaaataaaaaactaaaaaatatatattttaaaatcattaatttaatttatttattttatattttatattcttttttatattcttgttcatcttcttcatgaacccaactagccacaaagtgtgatcggagcaccaccacgaccccaaccacaatcacatcccgactgctaactccggccagccctaaccccactcaattgggcaccaaaaatcaacccaaaataat

SEQ ID NO: 160477 - DNA, 598 bp, Cannabis sativa
tttctatagttccaaatagcccaaacaaaacaaaatagtatagcaatctgatgagaatcaaaagtttcaaaagcagcaacaaaaaaagtatctatagaactagacatattattagtataaaaaccagtgaagattgaatttttccaggctttcctagcatatttacactccaagatggcatgtttcactgactccgtggcttgatgacagatcaggcagacatgagatgaaatgatgtgtcgaaaaaataaagatgaagcaacaggaattgagtgggataagactctccagactaagtgtttaactttaggtggaacatttgaagaccaaactttagtccaaaaccgcttgctattctgaaaagaggaacccgaagctatgctacgattggtcaaggcaaggtgataagcactcttaacactcaaaattcctgaagattcctgtccccagatgagtttgtcaaatccacttgcaccagagattggaacatgaaggatattggttaccgtggaggagtcaaaatgttgattaagtctatctaagtcccagccacccgaaggagaaagaaaataagaaagagttgagtcaggaggaggag

SEQ ID NO: 160478 - DNA, 504 bp, Cannabis sativa
cttgaattttaggattcatggtatcataatcagtggggaggcagccacactttttagtgggcaattttttatttttttttggttaaaagggtattaacctaaaatatcttttttgtagataaaaaaataaagatataaatttagtaagaaaaaactatgtgtaataaaaataaaaaaaatatataaattttatgagaataaagtaaaaatatgtaagggtataaataaaaaaattattaatattatgagggcaaaaaataaaatatttaaaaaaaaattgaacataaaatttaatttatcaaaagtttagggtaaaaacaaaagggccattaccaattgttaatctaatattaaaatatagggaaatgatactatatatcaacgaagtataatttctatataatatatgacacgattctcataagcattatattcagtactaagagcagctccaaagaggctgcaaattgatagtttagtgtatataattgatccaaagaggca

SEQ ID NO: 160479 - DNA, 569 bp, Cannabis sativa
tccaggttcgggtctgggtctaggttttgggtttcggggttagggttcggagtctgaagtccaggatctaggattcgggttctatggtccgagtctaaggtctgagtctaggtctggatgcgagttggggtctgggtccacgtccgggtcggggtccagatttgggtttgggtcaaggtctgagtccgtgttagggtacggggtctgggtctgggtcatggttcgagtctgagatccgggttcgggtcgagtttgggtctaggtccaggtcgggtttaggctaggtccatgtcaggtcgggttcgggtccaagtccgggtccgggttttgggttttagggtcggggtttaggtctgaggtctgggtccaggttgggtctgggtctaggtgcagatcaggttcgggtctgggtccgggttcgagtttcgagttcttgggttggggtccgacgttcgggatttggggttcgggttccatggtccgagtccagggttcgggtatgtgagtaaaaatgtaaaatataatatgttagacaaaaaaaaatatttttgaaaattaaaaactacatt

SEQ ID NO: 160480 - DNA, 692 bp, Cannabis sativa
tcacaaataactttttgttgtgactaaaagtcacatttagtcacaaaagaattatgttgtgactaaaaagttgtcactaaaagtagaagttttttgtatgcagtttttagtgacaacttgtgtctaaatgctatattttagtcacaaataactttttgttgtgactaaaagtgacatttagtcacaaaaaaaatatgttgtgactaaaaagttgtcacttgttacacataaagaattagttaattagctttacttttcttgattagttatttctattgtaacagttagttgtcaactaactcttttctttctgtaacatattccttgtactaatgatccctgtaaataaagctctcagctcaatattatttttttgagcttttctctgccatttgttttgttttgcttctggttttctctctggttcataccatcaggttttaccttcttcaagcttggttaagcttctacatggtatcagacgcctcccatggagtcttccaacccgtctggtcctgcggtttcttctggcagagccattgctcacaacaactcctctgattcaacacctctgatatggaatcctttctccagttctttatcttcttccctcacgatcaagctcgatcgtaccaattttttgtcatggaaatcccaagttgttcccacggttattgggcatgatcttgatg

SEQ ID NO: 160481 - DNA, 851 bp, Cannabis sativa
tgggatttgattacatatcacaaaatgtaaatgcggtgtatgattttaaaaatcgtatagctgtgattttcctgcttttagttagtcagaaatatcgtgtattaaacaggtctttaattgttgaatttggagatgtctcgacagaaacttgattgtagtgatcccaatagcgagctgggaccattcttcttttcgaggtcgacaatgtatgtcttacgtcgatcacgggtatacagaaatcttctgacttgccagggttatgaacctcgctcctgttagttggatgaaactataggaagtttcctcatagcgagatggtcgtctcgcatacttgttcttcgagccgattcaaattttacacttggtttgcttattgcaagctaaggtatgtgtcacttttctttggtgcctcgctattcatctttagcaacatatggtttcttgttaatacacttagtgctagtttgtacattgattccttgcctaagaccttacagtcaacgggttacaaatatactctgatccttacgtaattaatgagttattccataaaaagatattgcaccgattcacattccctttaccttgacacgtgtcctctagctcaatttcgagtataacaattgccccttaaaaagttcttttttagtaaaaagagctttttaataattacagagggaaattttgccaaaatcctttcttggaaaggacacctcctttgattgtggcgattgtacggttttgagagtcattatgaatcgcctattcatattctgcacaactcccagccgttagatttctcaatctttggctttcttgtcaatgagcttcgtgtataaaaaggcagctca

SEQ ID NO: 160482 - DNA, 612 bp, Cannabis sativa
cggtttagaataatttgtaaaccacccattatattcattgggcggtttgaattttcattgtattattttgggttgtattttttgtcggtttattgaacatccctagttgatattaaatgtcaaaatattacatattttatagtgtaaatttataaagttaattaaattttaataatatttttataaaattaatgttatatatttgtttgttgaaaatattttctttaaatttaattttatttttatttataaataataattagtatttatagtataattgagaaaaatgaaataaaaaattaagaaaatgcattatttttattaaaaaaaatgtacaaattaattatattttaaataaatatttttattaaaattaatatgatacatttttgtgttgaaaatattttattttttatttaaatttatgtgtttgattaaaaaaatagcatttatgaaaattaaaaaaaataaaaaaattgtggcccgagcacatagaaaattaaggaaattacactttacaccatttttatattgggattatttcacaaatacacaaaaacaacaaaaaaaattacaaaaatacgatttaacggaattttaaatatttttacg

SEQ ID NO: 160483 - DNA, 547 bp, Cannabis sativa
tatgttcgaggattaaatgctacaatcagtcgggacttgaaaattagcacatcacatgacactctgtataagagagtggtggacttggccttaatagcagaggaggtcgagcagcaagtaatgaaagaacaggctgcaaaggatgccatcacggcatcaaatcgtcctgccagtggtagccctgagcacaaacggaaggctgaggcttccggagcatcagggggaaatagaaagtttcagggaaacagaggtggccgtcagggtcgtgggtcctcattctgattgtatcccgagtgtcctaaatgcaagaaacaccatcctggtgaatgtcgagccaaggcatgtttccagtgttgcgtggtgggccactttatcagggattgtcctcaggccaagaaagaggagcctaaaaagaatactacacagaagccggggcgacttttcattatgactcaagctgacgctgatgctagtccgtcagttgtgacaggtcagttgtctattaatgactgttcatatactgtgttgtttgattcgagagctactc

SEQ ID NO: 160484 - DNA, 733 bp, Cannabis sativa
taaaataatttccaacacttcctacagacaaaactgaggcacgtaaactcttgtactcaatacctcgatatacaatggttgagggaaaattatataggaggggttattctatgcctcttttacgatgtgtgttaccaaaaaaagccaatgaaataattaaagaaatccatgaaggcttttgtggggaccatgcgggttggcagagtctatccaagaagatcatatgacaaggatattactggccaacaatcaataaagacacgcatgaatttgttaacagatgcgacaaatgccgaaggttttcacatatacctcgcgtaccataaacagagttgagaatgatgacctcctcatgcccatcgcaatatggggtattgatccaattggggcattacccacagggcgaggtagagcaaaatatgcagttatagcagtcgacttcttcacaaaatggacagaggctgaagcactgatttccataacttgcaaaaaaaagttcttgactttgttatcaagaacatcatttgcaggtttggaattccaattaaaatagtatctgataacggaacttagtttgatggtgaattattcactaagttctatgaaaggaataagattattataagcttctcatcagtatcgagaccttaagcaaacagacaagtagaagttgttaataaaaccttagaagatactattaaaaagaagttagacgctgctaaaggaagatggg

SEQ ID NO: 160485 - DNA, 539 bp, Cannabis sativa
  modified_base (43)..(58): a, c, t, g, unknown or other
  modified_base (200)..(200): a, c, t, g, unknown or other
  modified_base (353)..(364): a, c, t, g, unknown or other
ttcactatttcgattaaaatgatccttagtgcaagaaaactannnnnnnnnnnnnnnngtccaagagaaaagtgatggacaatggtcttgtctttgtcaccgtcaaattttacaatttttggagatgtgtagggtgagatttaaatagaaaactaacgtgtgtaagagtaaggaaaacacttgttaaaatttcccctganaagaagaatattttcaattagatgccatttcaacaaattttaacccaaaacaaatcttcatattaacgtcttagaagtacgaattcgttgtgactagtggcaaaaaatattctgagattggtccgggctacatttcacaaagggttaccactnnnnnnnnnnnnagattttcactatttcgaataaaaggatcgttagtgcaagaaaactaatttttccatcaacgtttccaaaaaaaaagtgatgcacagcggtcttggccttgtcccctagaaatttcacgatttttggagatgggtagagtgagattttaacagaaaactaatgtgtgtaagagta

SEQ ID NO: 160486 - DNA, 509 bp, Cannabis sativa
  modified_base (362)..(366): a, c, t, g, unknown or other
acgaaccaggagacaaaaaaaggcgtgggaagaacaacctgggaaaaatgagacaccctctcaaaatcaggacgaacagccagatgggagacaattgaaaattgatgaacgagaaatccctcatgaaaatgaggaggatcttaggactcaaccgggggaacggagatcacctgttaaaaatcaccaacgttcttcccaaacccgtagagcgaggactcgtacataccctgatgggggaaaaacgagaaaccgttctcgggaggaaggaacagagcgtgaagaagcaagtgtaactttgaggcgatccagaacccacagtcgatcaactcgaagaggagaaagtactcaacgagctaatggtnnnnnaagtatgggaaccagtaaatctgcgagccactcaaagacaaggtctatgagtaggacgggatttatgagtaagacaagatctgccagctattactcccaaccggatttgcgagagcacttgaatcggaagaaacctaaccttc

SEQ ID NO: 160487 - DNA, 854 bp, Cannabis sativa
  modified_base (36)..(48): a, c, t, g, unknown or other
tatatatataaaacacttctcaatgagtatcactcnnnnnnnnnnnnnaaggatgatgtggtaatatgttgacttcttatagcagataaccaataagtattttttttaaaaaaaatattttttttatttaataataattctaattaatactattaaagaattaaaagttacatttagaaacttacttattttatttaaattactactttatttttacaccaacaatagaaatttattatattatgagggtcattggtgatatttcactctatcactctttgatgcgcttcgcgcgttgttgtccaatttttgcaatctttatatatatatttgtactccttgagtgatataatctgaagtaatatttgaatgtgtgtattataaactaactaataatgttataattgaaaacatattttttatttttaaaatataaaaaaaattattattttagaacaaatattaaaaatcgtgaaaaaacaaatgttaaaaattaataaattactaaataataatatagatatactattaaaaataatattagtccactttttaaaattatatatatagctatatcagataataaaataaatttgatatgattcaatatatatgaataaataaaattataactaattggtaaaatcaagttaataattattcattgtagaatttttgcaaaagaaaaatatttttactaagagtcaaatgaaataaatttagtaaaattctaataaaagagataaaatagataaaaaaaaaatattttaggatgccactttatattcttttgtgattttatttatataaatattatatatattaatggatacagaaatttaaaatattttata

SEQ ID NO: 160488 - DNA, 516 bp, Cannabis sativa
cgaattgacgaattatttgatcaattgaagggtaagacggtcttttcaaaaatcgatcttcgctcaggttaccatcaactgagaattcgagaagaatatatcccaaagactgcctttcgtactccgtatggtcattatgagtttctggtgatgtcattcagagtcactaatgccccagtgacattcatggatcttatgaatcgggtattcaaggattacctggataaatgtgtgatagtgtttatagatgatattctagtttgttctgagtcagaagagaaacataaactatatctcatatcagtattacaacggttatgagatcacaagttgtatcttaagttcaagaagtgtgagttttggttaccacgtgtctctttcctagggcacatagtggataaaaatgggatcatggttgatctgaccatgatcaaagctattcgagattggccaacaccaaaatcaactactgaagttagaagctttttgtgtttagctggttattatcgtcgattc

SEQ ID NO: 160489 - DNA, 526 bp, Cannabis sativa
ccctagaagaggtgatggtgggtcccgtcgcccaggaggggtataaacctcgtgctacgggatgggaagcggtcgagctccactatactttaacttgccctcaccaactggagaacatagtggtggtggccggcatcaatcttgcgacttccgggacgtaccaccggccgccccgtgacgcggagacgcccaatcacaattacggaggcttcggagcttggagccagacgcatttgatgaccggggctatgctttcccttcaagattattttattaattttcttgtatttgtcggcctcgcgccataccaacttattccacaagcttactgtaatgaccgctctagtaatttggaatagtaaaggcaattagcactaatttttattattttattattatatatgaattaatttaaatgttgaacccaaatattcagaaataaatattagagttataatttctcaattttggagattttattaaactctagaggtattatttagcttatatgtgaaatatgttattt

SEQ ID NO: 160490 - DNA, 755 bp, Cannabis sativa
tggttttgatgtttggattaggttttgtgcaagtttgagcatagaaaccttatctttggtctttaatggcatgtttgtttatattgagtttttctgggaaatacttgttggattatgttccatttgcattgtataggtgttttgggaaggtatggatgcatttggtggggttttgagcaagaaatggatttttttgggtgaactggtgcaaaccaggtaaccgattttacagatactgtaaaaccggttagccaatttttgcagggttccccgaatgctccattttctcaattctcgtgcattccagtgtcgtagttgggtgtttccttgtttcctgaagtgtgacccataaatgttataatagaacctagagttgtaggtttgggtttcctaggattagggttttgatcatgtgatttactcggtttcattatgtgattaggacatccatctagcacgagacttttcgttcaggtcggccagcacacttgaatctagaaagaaggtaagaattgtatataatgtgtgatatggatatgtaaatgtatgtatatgtttagtgtatatgcatgcttataagttgtgattcatacactaccaacacttgtacggttgcggtacagagtgcattggtaaagtgtatgatgtctgaaagtacatcatggtgttactagcacttgtacggaaaggtacaaggtgtctctgctacaacacttaacagtactcaaggtgcggtccataccctacctacacta

SEQ ID NO: 160491 - DNA, 992 bp, Cannabis sativa
gcataataggcaacggttcaaaaccatcactaatgttgacttcctgacggtttaaaactgtcacctataacatggtatagttgacggttttgaaccgtgccctatactatatgcgatggtttaaaaccctaaaccctaaactctaaaattgttgcatatagcatagggcacggttttaaaccgtcgcctataccttgttataggttacggttttaaaccgtgccttaaagtactggttaccgtttttaatttttttcagtgacggtttttttccgtcgttacactagaaaaatagagaaaaaatagattttctgtaatttttccactgcattaatttttaaattttttacaaaatctgtatagtcacgataattaaactaacactaatatcatctaaaaatatttaaaattctgtatagtcacaataattaaattaactttaatatcatctaactatatttaaaaatctataattaagtaaacactaattataatcatctaaatatatttacaaatctatataataacaataaatcaagatatatacacactaattaacacggcaattattgtcgctccgctttcgctttcacgtaatgaatccactgatcacgcataatatttatctcatcatttatatatggagtggagagcctatcatgttgggtcaacagttgtattggatcttctacagtcataaaactttcaatgaatttcatgacgtagtatccacactatttgtcgtccaattattttagacagataggagtcatccactggataggtcgatcaggtcgtcctatcaatttggttatatatggtgaacgatctacacaaaaagtaaagttaattagcatttataaatttataaatatagaacacgcttacatattgggtgtttgatatagaaattatgtgaatatgatgaagttcagatcatctggtatgtcattgttgcttgaatccaagtatgccaccgtctgcgtacttgg

SEQ ID NO: 160492 - DNA, 607 bp, Cannabis sativa
ctccttggccttgtgaagttcctcgagctctttatccttggaagtcgcatcttgtttcaacttcttaatgtcctccagaagctgaatgttctgtctcttcacgagttcaacctccttggatccggtaacaaaggccttcgagaacatggcaatgaactgcaaagctaactccgcagagcgaggaaacagctcctcagcaggagtcttgtcgatcttcgattggaattcatcgcttacgaacttctcatggagagtcagtatgttgcggactcggacagctgggtcaatcacgaccctcttccctttctcttgtatgcccttagctggcctcttggaagaatccgcgacaggggtaaccaccacatcgctcttcctcttctgaggaacgataagggaagttgccactgttccagattttggcttgcggttgcggactggggcggacttcaagaatgtcacttctgcgaggacaaataaaagttaggtataaataaatttcaaggcactagttaatacacgtaatatgttacctgatgatggtctagaagtttgtttagagaggcgtttatctattcgctcttgttgcttctcagaaggttccttgtac

SEQ ID NO: 160493 - DNA, 667 bp, Cannabis sativa
  modified_base (213)..(219): a, c, t, g, unknown or other
attttgccataatagccctgtattttacaagaatttataagaatgacgtccattttatacgtaaaatgaaaattaatttaaaaattactttaataaattttaacattataataataccttgtcacatcgtaaaaaaataaataaattctaaattaacatattgcacatatagtattgtaacgaacacgcttaactttagaattctcaagtaannnnnnntaataaaataaaatacacattgttaatataagttactagaaaacaaaggggcgtgtaaaatgatcacgaatagcaaagatacgagaatggcagggagttctatcctacggtgaaaggtgctagagcgacggatcataacaaagtggttgatctctttacagattatgaggactgggatattcagaaattgaattatctttttgataaaaaatctgtttcgtccattccctaaaagggggtagaccctctggctagggtacggatatgtggatttggacaaaagtgagtaatgggcagttctcgtgtaaatctacttatctcatctaaactttagaaaggtctccttattatgatgtagctccatccctctggaacaaactgtggaatagtaacatattagaacgccgtaagatgatggtggtgcatactttctaaggccctccctgtt

SEQ ID NO: 160494 - DNA, 605 bp, Cannabis sativa
  modified_base (66)..(68): a, c, t, g, unknown or other
ttcaatatatcattttattgttttaggcttcttatgtttttgtttctatattaattgttagttttnnntaattagctatctaatgtaactggtttctgctgtttaattacatgttattttttttttctaagaactagtttttatgtttcaatttatctaatataacttgtttttgcaatttaattgttagttttttttttttttttttaagaaaactagtttttatgctttaatttatcttttgattgttttagcaggttgtattggtaactggtttccctatttagttattatttttattattttacgtaactggctctaatattttagtttttgattcggttggtttaaataattggtttctcaattatagtgttaattagctgattattgtaactggtttcagtgtatcaaattccaacctctaacaccaacgacaactccaatttctaacaatggtgactttccagttatgaagacaacttcgacgaatttttcgatgataatctgacaatgataacaacttcagcaaatattccactactacaatgttagcctttagaggcagttttttcaaccccatttataaaaagggaagctaaagg

SEQ ID NO: 160495 - DNA, 814 bp, Cannabis sativa
tattctcccaaatttcattaagcttggtataaatagtataaaccggcacgtacttatcgtgcttcttatgtttctttttgtcttttgatgactccttagaattgttttttctctttgagtcagaggcccctgagttataaactctggttgagatagtacttgttgaaacattgttgagtttgcctctcgagcctgtttttaacaagttcatctctttttgagcgtcctcttttcggacgaatacctcagccttttcgttaaactcagtgatgttcttcacttgacgaccttgtaagtcatcccacaattcgcccccagcggttgatagatcagtagtgatccccgcctgaagggcagtaagttgtgtactatcacccagatttctaaccctcgcagtagtcgtgctaaaacgacttaagtaggccttaagcgccttgccaagctgttgctttatattagttagcgaggacgcctcgggtcgtctatcccttgcagcctggaactattttttgaagtccttggacagctgttcctaggaagttatggaatggtgagtaaacttgttgaactagctacttgctgctccaactagcaaggtgggaaacaaaatacaacgtaaattatttgtcacattactagcgcgcattattatgttgaagttattcaaatgtgagaccgaatcggtggttccatcatttgaagagacatgagggcttttaaatcccgagggaaaaggagtattcatgatatctggatggtatggctccagttcttcatctgtgtcatatccaaattgtttttttcgctccccccc

SEQ ID NO: 160496 - DNA, 770 bp, Cannabis sativa
tacataattatgtcccttctgttaagttccgtttcttctaccattaaaaattaacatttttaccccctgaactttgaccaatacaaaattttgcccccttttattaaaaaaaattaattaaaaaaattataatattctatcttttttaaaagcaattataatattttatattaattcagaaaaacataataaaaattattaaaaaaattggataaaaatgtaaaattaataaaacaatattaattttacttaaaaaaatttcaaactttattttatttatcaacacgtatcttaaaaaatcaaactaaaattattgagaatctaataaataatttaaatgaagtaagattttttgaagaaaaaataaaacttatttatttttataaactcatatcttaacaaataaaaaaacaattaaaaattcaataaaaatataattttttttttggaaaaaaaaagttataaattaaactaaaaaaaatgttatgtttacttaaacaaatttacattttttgataaaaaaaaatatattcaagtttgttcttttaaaatttaatttttacaaattaaatttttaatatattttttgaatatctaaatgaattttctaataaaaaataatttttcatatcgagtaattagttttgaaatttaatttattttttaattttcttaatcattcaaaatgattttcttaagttctaaattaaatttttaagatttgctaaaaaaaatattaaatctttctcatttttattttgagaaggtac

SEQ ID NO: 160497 - DNA, 533 bp, Cannabis sativa
caagccctgataggaagaatggctgcacttaacagattcatttcgaagtcaactgataaatgtgtgccattcttcaccatattatgaggcaacaaaaaagtttgagtggacaaaagattgcgaagaagcctttaagaacataaaaaggcatctagcaacgcctccagtttttgcgaaaccaataacaacctatttagccatctcagaagatgcgattagtgccgctatagtgcgagaagagggcaaacactagcaacctatttactatgtaagtaaaaggttactaagggcagaatccaaataaacccttctagaaaaactcatgttgtccctagtccatgtgtctcgtaaactacggccatacttctaggctcacccgataaaggtgttaaccaatcagcccttaagacaagttttatcaaaaccagatccttctgaaagattgataaaatagtcgattgaactggggcagttcgacataacataccatcctcacacatccatcaagggtcaagctttggctgacttcttga

SEQ ID NO: 160498 - DNA, 530 bp, Cannabis sativa
  modified_base (169)..(186): a, c, t, g, unknown or other
tccgttatttcggttgagaagaaatgagagggggttttaaaatctgttatgacggtggggatgatggaagggacctcaacggtggtggcggagaatgacggtcactacaaaaaatcttacttttagtcgtcacaattaaatttgtaactaaaagtgaaaaaattgtgannnnnnnnnnnnnnnnnntcttatgttgtgattaaaaggtttgtgcaaaaagtattagtttacaatatattgtgactaaatgtatttttagtcacaatacttgttgagactaaaactaaattagtgacaacttgtatctaaagactatgttttagtcaaaaaattatattgtggctaaaaaattatcactaaaggtagcagttttttgtagtgggtggggatgatcgatggaggaatttactatttttagttttatttcttttattattttattgttattagtttaatttaaattagtgttttatgtggttagaattattagttttatgtgttgaaattaattaggttttcccattagtctt

SEQ ID NO: 160499 - DNA, 553 bp, Cannabis sativa
  modified_base (307)..(312): a, c, t, g, unknown or other
tcttgataagatcagatcaaacacactatttttgacaggtatcaagacccaatacacgatcggacatgtttttggcaagtttcattttttggtatgatttgctccgacaaaatctgtttttgatgttgcaaatcagggttttacttaggaaagttttgtacagctgtagattcgactttgtggttgtccctagggtttctatgttctataaatagaacctagagagcaaccattcgaatcaactttttattttttttttgcatttttctcatttgtgaagagagagttctttttgtgagaacctagnnnnnnatctaggttctagtgttttcatatctgttcttactgccttagggttggttagaacacttgattaaacaagagagaggtcttcgggaaaagacctattcaagccttactttggaaggaagtaagcagacacactttaaagatgaaggaagttcgctgtttgaagatgtttctgagattagattcataaagtgcattgcaaaggattgcggcaataatttagagggagtctaaacttgtttaa

SEQ ID NO: 160500 - DNA, 571 bp, Cannabis sativa
attgtatttatatagaatgttttaagagttttttttttcatagtacaacaaaaataacataattattaaaaaatgtacaaaaaaaattattttaaagaattatatattttgaaaatatattatatattataatcattaataatatattgcattaattactaaactaattattataaataaattaatgtaattaatatttataatgctattttataatatattatgttcattatattaataatttaaaaatttatatatatataaataaataacagtatcaaatagtttaatgacaatctatataagcttttcttcttaatttttttttttttgatttagttcatttttaatctatcaattatcattaattattaattattaattaatgctaataaagtactaggagcgtgtttataagtttctctatgcaaatattaaaatttactgccaattattaaaaaattttggggctcgtttggtacgccgtataaaggtcgtattgtattaaataataaataacacaatgtttgaataaaacaatgtattgtattaattattacgaccaaatttt

SEQ ID NO: 160501 - DNA, 580 bp, Cannabis sativa
  modified_base (27)..(33): a, c, t, g, unknown or other
  modified_base (410)..(419): a, c, t, g, unknown or other
ggtggagaaatatttggatatgcagtnnnnnnntcattaagttgaactttgaattgtcttcgaacttacctccctagaaattcagtttgcatattgatgatagtataaggtttatgattagttactagcaattgcctaagtccttctagggatatatcctagtgataagaaaatttcagaatgatagaatggttgtgtacttagtgtaaaccattactggattcatggatgtcctgatcgtgatcttaagaaaagccagaactgttaactaaggtttgcatgtttgatagctattctaagtgattaggggaggaccatcctatggtcattaagatagaaaagtgtttgtttcaacaaatactattttttctaagaaaatgactaagtctgaaaataaagtagcaaagtannnnnnnnnntttttcctgattccaaattgttctatcatcttattctacataagattgtcgcattgtctctgttgtcttgatacaaccgatgaggacaataccacttatgttcttagacagaaagtcacagtaccttatcgtagtgagagggtttcatggaactcaccctg

SEQ ID NO: 160502 - DNA, 625 bp, Cannabis sativa
ccaatacagtccaaccggaattccggtcggaacagccctgaaccaaccggaattccggttgtctgggcagcaacaacacgaaaaatcataactttccaaaacctactaaactcttccccaatcaccaacaaactttccagagcatgaacatatgacatattaagcatattacaactcaaacacaataatttcaccaagaatcaaaaagtgtcattaaagcaccaaactcaagcttgctttacacaaccaaaatcaaacctacaatcagattttaaactcaatgaaaccctaaaaacgcctctgaatttaccaaaaacaaatcccactattcaacagaaaatcatgcttaaactcataaaatccaagctcttgaacttgagcttaatttcaacatacccaaatatttttttctagcagcaatattccaaacaaatcatgaaggaatttacactttaatctctaaaaaacaatacaattcctacatatatgcataaacaagaatatttcatttaattcatactttttccacaatcatattcaacaaggatttcaattaaaattcggtaggaaagctacctcaattccttgcacaagctaactccaagccttcaacacaattttccca

SEQ ID NO: 160503 - DNA, 614 bp, Cannabis sativa
ttattctaagcttcatgaaatttttctcctaactggtgaaaattccaaacttctgagttttaacttttcattgaatattcttattctttaatccgttgagtactcttggtcggcatatttgcctgttttaatgttcgatatcctgaccaaacactcaccttgtgtgttctcttttgtagatgaacctaggtcagttttggggaagcgaacactaaatcgaccaggatctgcttcaactcttgcacgaggatcatcctcgtcatcgttctagtccaacctcttcgagtgacggaaattttagcttaagtctttcgtccagccataggatgatggctcgttcaaaaaagacaaagcgtagaatcgacgcatccgaccctcaagtggcccagcatgccaccttaccaagtgacgaacaagatcccttcctccaggaggaggaagatcatgatggggacaccaaagtccaggagattgaggaaaaggacgatgttcttcctagcagtccttccaaggtggaggaagaaaaggaggttggacctccaaactctgaggcatataatgaggctggggagccaattgatgctgatggcgacgtcctggttgagggcgtggac

SEQ ID NO: 160504 - DNA, 644 bp, Cannabis sativa
  modified_base (517)..(517): a, c, t, g, unknown or other
gtcgtgccacaaaccgtgaaaaggggatgtgcgcctggtcgggttcccatggtcaccaatgggcattgatgcctttgcatcaatacttcaagaatgtggcagatttcttcggcctctgcccggcccagttcactcccaaggacatcaaatatctgtctgccctcttcgtcctctacgcttcccagaaatggggtatgccttctcctcacgaagtttcctggttttttgatttgaagtccacccccaagcaaggctggtcggggtacttctatttctctcaaccaggcttcaagtggttgacgagcacgaacgactcgggcatcagcaagattgggcgttttgctgatgagtacttcatggtggatggcacgggcatcacctcgcactcggttctagcagattccgacatatcatcgcgctcccctcactcttgctcttagggatagagctcaaaagcttgctcgactaccgggggaagaccggaatattatccagttgacctccgaggataattttntgaagtacgggctctatcccaaggacttcattcctaagttcgtgatggggaagaagaggaaatctggtgtcggacggaccgaatgagctcatcaagagaatgaactcattcaacttaagcgtgaagc

SEQ ID NO: 160505 - DNA, 599 bp, Cannabis sativa
cattatccaactaatgcttcaaaatctagttttcattctgttagacaactagtgttttagagacttcttcttcttcttcttttctctctactatttcgaaatcctatagtatttttcaccattaaaattcgagccttagtgattgagtgcatgcccacctatagcaagttagtcctcaatcatagtgtgtaagattgtgaagaatccaaacaactgaatgagtgtcgggctcagatcttgattatactctgcaacaaaggaacaagggttagagatctgagcggaaggagtcatataattctgttgcaaccaatgtaaggtttttcatactttatatgtgtttaatttttatcattttagaagttcatatttaagatgttaaaaatatacttgttagtaaatcgaggtcatggtaaaatataatccaacaactggcctcagagccatggtaatgattttatttcacaaaatatggattaaaacgatgtatgtgtgatttggatgtgattcatattgatctatgtgtttattgatgattgtttgctgtttgcaaaatttttatgtaaaataattgaaatttcgttgtggaattatttttc

SEQ ID NO: 160506 - DNA, 760 bp, Cannabis sativa
catcccgtgtactatgttagcaaatgcatgataggggcggagacgcgatacccagttatcgagaaactagttttttgcctcctaatggcctcgagaaagctaagactttatttcctagctcacccaatcaaagtattaaccaaccacccgctccgacaagtcctgcaaaaaccggaggcgtccgggagacttctcaaatgggctatggaattaagccaatttgatctacattacataccacacacctccattaaaggacaagcgctagtggacttcatcacggagtgccacgaggcagaggctaacgtaagcatgcccacaacgcaagtcctagcgtggaaagtatttgtggatggcgcctccaacgaaaatggattcggagcgggggtagcaatgatatccccaaacggacttcgactccaagcaaccctacggtttgaattcacaacttctaacaatgagaccgaatacgaagccttgatagcagggctgagattagcaaaagtcgtgggggccagaagagtagaagtctacagtgattcacaactggtagtgaaccaagtatcaggggaatatcaaacgcgcggagaaaagatggctgcgtacgtagcaatagtctgggaactgctacacgagttcacggactataaagtagaaagaatccccagagaaaagaacgcttacgcagactgtttggctaagttagcctcagacaacgaaattgagaaactgggggtggtgcccgtggaacgcctttcgg

SEQ ID NO: 160507 - DNA, 609 bp, Cannabis sativa
gtggttgtaccctagtatggaacgttcttactcatctgataagccttgtaaataggtgtatgggcgcctaaatacaagtcggtattatatgaagcgttatatgcttttcttgctgagtttgtcgactcacagttttacttccatgtgtaggtaaaggaaaggcaaaagctgaataggattgagcttgagctgggatgaggttgtacatttcatggtggcgcaacctggagtgttcggtctcgggacatctggggtttccattttgtagtcgttgtgcgacctgtcatatgtattttggaatattttgtaaaaaagtttagaaacgggatcccaacttttgtaaataattatgtaaagtttataaagtttcatatttaatataaaagttttaatttgacacgattttcaagaaagttctttgattagcaaagatagcactataattgaaaaatcactgtaacgtgccttagcattagagcgttacaattttggtatcagagccattaagtttgtctaccgaagttcaccaagacatgtacaaccttcatcagagaaagctcggatcacggttcagtaagcccgtacttgtttagtattttatgtgattat

SEQ ID NO: 160508 - DNA, 847 bp, Cannabis sativa
  modified_base (798)..(802): a, c, t, g, unknown or other
ggctctcctgctcgtggagctttgggcttcatttcttccacgacaaggataacttcttcttgctcgtgctgtgcggtttgggcatatctctcccaagctttgcccgaatctccagcaatgtgcagacctccaacaataacttgcagatgcccatctaccagtggaggtagcaaatcgtggttattgtcgttcctctgaccctgattggtcttgacatacttctgcaagtgtgggttgtttttccttatcaggaattcaatttcccgcttcaagtttttgcattcattagtgtcaaagtcgtagtctccatggaaccaataaaactttgtcatgtcccgtttgttgacatctttcttcatgggcacgggcttcttatatggggccagcgactgagttgccatatacacactttctatatctttagtcaaaatagtgaatgcagtgtacttgacttgattctcccggggagcttgttcagatttgctagtgaactttcctttcttcccattctcttgcttgtggttgttgttggaacgtttaccacttgagcttcaattatttgggtaatggggaagttgggcgaatgttccagtagaaggagcctttgacttgccaggattttgctcaccttctgctcgttgaacgacttcttcgagcttgatgaagccttcggctcggtcaagaaaatcactcattgagtctaccgacccgttcttccttatatccttccaaagtttgccgaggacttcaacgcccccctgtatcgcggataactttccatcttcagttacccgtgannnnntggtcgcctccgtcatgaatctgctgatatatgcccggagaggct

SEQ ID NO: 160509 - DNA, 531 bp, Cannabis sativa
ggagatacattgttgagtgtgtaatatggagataaagattcttgtattacgaccagatacaagatccttgtattacaacaagctacaagatcattgtattacaaccaactactagatccttgtattacgactagctactagatccttgtattacgagatgttggatgtttattgaaataacatcccaacaatgttgaaatacctcattttatgaaccttgtgatccttatttaaatgtagtcgcctcacaggttgagtcctgagtttattcaacctgtccacaatgtatttgttgcgagaattattatttatgccatgcgacatacaatttaacttgtttattaaatagttcaatgagtataacacatatataatatttttttaaaacttaatagataaaatatatatccaattcttatttataaagaaaatataatctaaaacaaaattaaacatttttttatacatacaacttttttcttcatcctttcaatttgtaattttttgttttattttattattggttatgtg

SEQ ID NO: 160510 - DNA, 504 bp, Cannabis sativa
tgaagatgaagaaaccaaagttacttgggtagagtcaaagcagcctttcactaagtttaggaggccatttgaatctttggagttatcaaagaataatttcaaacctcctaagtcgtctattcaagaaccaccagagttggagttggagtcgttgcctagtcacttgaagtatgcttattttggagatggagagatcttgccggtaattatttatgctatgttgggttcccaaaaagcactcttatggattgatgttttgaaaaaatacaaaagaggcattggttggaccatggtggacatcaagggtataagtccttaaatttgcatgcataagattctgttggaagattgttgcaacaattctgtagagcagcaacgatgactaaaccccatcatgaagaaagttgttagaaaggaggtaatcaagtggttagactttggcatcgtttaccccatttcagacagttcttgggtaagcccagttcaatgtgttccaaaaaaggg

SEQ ID NO: 160511 - DNA, 543 bp, Cannabis sativa
aacaaaaaaacaatattaaaaccaaaataaaattgaaaaaataaaacagaatacaaatacagaaataataaaaatggtcacctagaatgtttaagcaagccttgaccaatccacgcgtcaaactttgcctcaatttcaggagagacgggatcaggaaatgaatcattaagagcataaaggcccttcacataagtaaccattttaaaatccctaccttcccttgctgattgagaacctgaggacattacctccattagagtgctccccacatcagccgacccaaaatcaacaaaaggagatttcaatgccggagcacgcttcctcttatccaacagaggggtatcagaaacagtgtcctcagtttcttcatcagtatgaatagcagctgacttttgaccaacaacatctggattgggttgggggacctaaaaaacacaaaatatgaaattaaacagttgcaaaacaaacagaaaactattaagcaaccaaaataaaacataattttcttgcaaacaaattaagatacacttacatggattttac

SEQ ID NO: 160512 - DNA, 696 bp, Cannabis sativa
gcccaacccgatatgacctagccaccaatccagattgccaatccataaaggggcactacggacaaaaagaaggaagacgacaaacaacagggaacgagtaaaaggaatgccaacggaagtagaagaagaaacaggaaggaatgagacgccgacgaatcaaggactaactacaagtaagatagcataccaggaccagaagaggcaccaggatacctttccgacggaggaaatacctgaaaacgccgacggagaaagtaactagagcacactaaaagaggaccgaggtaatacaacttatgaaataaaggcccccgacggatgagaacttggatccccgcagacaaggatcccgtcggctgtaggaggagaactaaagcgtaacatatgaaattaataaattcaggaatgtgatgccgacggacacaacaccgcagttaggaagagtaaaagctctaaaaaaccactaaaggcactaacacgtgtagcgagagaattaagctactaaaacacaaacacgtggcagagggcaaaaagaatgaaagaataagaacacgtgtcagcataacaatggcaaaatggaaagtaacccattcaagcaaaaagacgtagaggatatataaagaaggatcacgtaaaagaaaaggggattaggaactgaaaaaagaaggaccctcaaaaagaaatcttgactgtttt

SEQ ID NO: 160513 - DNA, 513 bp, Cannabis sativa
  modified_base (449)..(449): a, c, t, g, unknown or other
atgaacaaaagaagggcacccaccaccaacaactactctttcctatcaattttccttaaccgccttgtcaattgtctccacgtgatctcgaaaattttttccattgatccatggtaagtgaggaataatcaaaaagacaaaatgatctaaaccattgcaatattgtaaattaagaggttgtggaggcaaaaggggggcatcgtgggtaagaatgttttggtgatattaaacccattttagagattaaacccaaaatcaagtaatagaaattataatacctttttcaaagaactttagaaaggaaacccaaagctctaattggtaagatttataggagatgacactgtagataagaaaatagaccccatttcaaagattaaactcaaaatctaatatcagagactcaatacccatttcaaagattatatgtgaaaactaaacagaaattncctcaaactttgcaaacctaaaataaaaagaaaatacaagagaatcatacctgtaacaacaaaa

SEQ ID NO: 160514 - DNA, 506 bp, Cannabis sativa
tttctactactttagctcttccccctgatgaaactattgtttttacttatgatgttggttcttctagttcttcccctgccaccattagccttcttcttaagctccacaccattcgaccttataatcatccttccctcatgaaaactctctctggcatctggtcatcacaatgttgttttcctgtttctgtgtctaagcatgctgatggaatgttcttggttacttttggctgtgagggggatattaaaaggtcagccttggcattttgtccaaagcatcactatctttgctgctcctgatagttcttttcctcttactcctaacaatctacactcaattccattctggattcaagtatatggaattctgtttatgtgcaattcctatgatcttgctagatttatagccatggaagtaggtgatcttattaaggtagataaggataccattaaggagggtactagaccctacatgtgccttcgtattctcctggatgttaatctgcc

SEQ ID NO: 160515 - DNA, 516 bp, Cannabis sativa
ttcttggccggaggaaaggcgctagagcttccgcccattctcttcttcagagcgtcaagcatctgccgagatatgtctgtagagaatgaaaaacaacatggttagagaaaacagacatcaaaaacatgaggcataatagtcaagaagcttaaaacaagacaaagtggcatggaaagtgatggcccaagtaaggatcaaaagtccatcatcacctgacatcgttcttatttcagacataacagctttcccttttcctgacacgggaggggacgaccgagcaggtgagatcggctcccttatgtgaatcgcatgttcaacaggcctgggcggggccggaagtttcttcctcctcttgagcggagtcgcctgctcttcctcagcctcaggatttaagggctcctgaacatattgcttggcccttgcacctcccttcaacttagcctcgcgcttcagttgaatcaactcatcctcctgatgagctcgttcaacccctccagcatcagatttcctctttct

SEQ ID NO: 160516 - DNA, 659 bp, Cannabis sativa
  modified_base (535)..(540): a, c, t, g, unknown or other
ccaactacccaaataattcaagctcaagtggcaagccttccagcaacaatcacaagaaagggaacgagaagaaaggaaaggtcactggaaagtccgaacagactgcccgggagaatcatgccaagtacactgcattcactattctaactgaagatatagaaagtgtatacatggcaactcagtcgctggccccgtacatgaaacccaggcccatgaagaaagatagcaacaaaagggacatgacaaagttttgtcggttccacgaagactacggccacaacactaatgaatgctacaacctgaagtgggaaattgaattcctaataaggaaaaataacccgcacatgcaaaagtatgttaagaccgacgaaggtcagaggaacgacaacaaccaagatttgttacctccacaagtagatggacatctgcaagtcattgttggaggccctaacattgctggaaattcaggcaaagctcggaagaggtatgctcaaatagtgcaacacgagaaagaagaagtcatcctggccgtggnnnnnnggaagcccaaagttccacgagcaagaaaaccaaccataacttcaacgataaagacgctgtcaaaattagatttccgcacaacgaaccgctggtcatggaagtccagatagccaataaaa

SEQ ID NO: 160517 - DNA, 520 bp, Cannabis sativa
tattaattaatatatttttaaaatttaacttatttatatatacaggattatgaatattgatacaaataatgagaaacaacactccaacaatcaaaggaataaagaaaatcaagaagctacaaatgattacgctgtaaaaataatgcaaattcattccaacattcctgatgatgagataccaaaggttagtatggaatttgaaactgaagaacaagcttataatttttataatgtttatgcttataaagttggttttagcatacggagaagcaaaagtcataaggataatgaaaatggaaaaaataaaaaatagaactttttgttgctcatgtgaaggctttcgtgagaaagataaactgaatgataatatgaaatgtcatcgtgctacaacaagatttggttgtttggtgagaataaagataaaacttcatcaatttggaaaatatcaagttattgaatttaatgcagagcatacacatgtgacttcaagccctagtatgagtcacttacataggtcaca

SEQ ID NO: 160518 - DNA, 611 bp, Cannabis sativa
ggaggaataaggatgtaagttttccaactaaaccatgaaaatagcgatctttcttagcatagcggagcgaaaagatcaaccctccaagtaatgatgagaatatgtttatcccgcaactaacctaaaagatgacgctcatccctataaaagttgaagaagactgtttctctaaggatggaccacgtttcaggaggtagccgttttcctaagataataaatagaccctcactaggacagagtgagggggacgtggagtagtatcgaatgatatactaatattcactctctttttgtagttttacaactggacctataatttctctacgatctgacgtactcttcctcattctggtgagcaaggtttgaccgtcgatcatctcgcataaccattgacacagaaatatttacttacatttcttattttctttttacttcacactataagtttactgacttgaccgtcgtagtgccttcggccgacaccactccggtgtctcgagatttcacggttatcctttgtctttgttccgcaggttgttggtgcccacaaacgttcattccgatcattgtagattttagcacctacaatacctgattgatccataacaatt

SEQ ID NO: 160519 - DNA, 516 bp, Cannabis sativa
ctcggtctaggtctagtttgggtttgactccaagttcgtatccggatccctatctaggtccgagtctgggtctgggatcgggtcccaaatctaggtccttctcctggttcgggtctaggtctcggtcacggtctgggtatacgaacgtgtttgggcctgagttttggtttcggtttgggtctggggctaggtccgagtttggttataggtttgggtccgggtcctggtctggcagttcttgttcagtttcaagttttgggtcccgaaattgggtcagggtctcggtttgggtcctggtctgggttcggatcctggtttgagtcccagatttggatccctttcacgtgtctcagtctagtgttaacgtctcatgtcccaggtccgagttgggttcgagaccgagacaagggtgcagttttcggtcccggccccagttctgtgtctcgagtctggttccatttttgggtctgagttcgggtctaggtttgggtctcgagtctaggtctgggttgggat

SEQ ID NO: 160520 - DNA, 554 bp, Cannabis sativa
  modified_base (406)..(410): a, c, t, g, unknown or other
  modified_base (514)..(515): a, c, t, g, unknown or other
gcccctcgtctccataacctgcaacaaagtcccttactttgttgtcaagaacattatctataggtttggaattcccatgaagatagatcaaataatggaacacaattcgatggcgacttgttcactgaattctgcgagaggaatacaattattaaaagcttctcgtcagtatccaggcctcaggcaaatggacaagtaaaaatcgtcaataaaaccctaaaggatactatcaagatgaagttagacgctgccaaaggctgatgggttgacaagctacctcaggtactctaggcccacagaactaccgagaagacagccacgagacacactcctttctcgctaggatttggctcggaagcaatgctgcttgttgaagtgaacataccgactcacagaagagagtttnnnnntcaagaagaaaaccaggaacttttcaaattgttgttggatatacttgaggaaaaacgaattgagtcgcaaatcaccaacgccgcataccaacaccgagtcacannatacttcaacaaaaaagtcaagaaaagcctattcaatgt

SEQ ID NO: 160521 - DNA, 516 bp, Cannabis sativa
atattgagaaattggcttagctttactgttgttggccctcagcatcagtttcttagtaactgaggtgagatatgctttgaaatttgtttatcaaagctatttgctagtagtgagatagaccactgccaaggtgtagtgggatattacttatgcgcttgatgttcaagaattagtttatctcattagcataagcgagatgaatcactattgaagaatagtgcaaagaactcgccagacctttttaataaggatgaaatcgtaggttgttgaagaaccttgcttaatgatttcaactcatagaaccttgttaaaggcttaaaagaaaaaactccaagggaggaaaaaaaaaagaaagattgtactaaacatgtgctaagtaaagtgtcccgacttaggagaggtttagcaactgaaagaataccacaactggggtggcgtcccactcccagagggtttcctctaatcagttagagaatctctgctaaatgaagcatcctgctttcagagagttttttt

SEQ ID NO: 160522 - DNA, 654 bp, Cannabis sativa
  modified_base (388)..(393): a, c, t, g, unknown or other
  modified_base (604)..(607): a, c, t, g, unknown or other
aaattgtaatttttcttcagttttgtcagtacagactccgttttaaatttattaaaggaacatttagaagtaactaatactacatgtttctgtctagacagaatgatcaagaatctagaccttatatgtggcctgtttaagaaaataacagagtttgtaaggacgaaattagagaaaaattacagttttacaaacattgggtacctatgccgctaaaaataaacattggaattatgccacttacaaacttaaaactttgggtacttatgctgctacttgccataaataaaatagttggacgaaaggacattgcatgtttgaagctagatatgagtaaggtatttgaccgagtcaaatgtgttggggattgttttaccaggatctagannnnnnaccatgtatgttgtttaacatcctcaatatgaatttctaaaacaatagaatttaaacacatataaagtttaacaaatcttacattggttgcagcagaattaaatgaccccttacattcagatctctaacccttgttccattctgtcgcagagtattttcaagatctgagctccattctcctttaggtgttagattcttcacagtcttacannnnatgattgagtactagacttgctatgtgtgggcatgtactcaatcact

SEQ ID NO: 160523 - DNA, 534 bp, Cannabis sativa
tagtaactcacatagaaaccaccaaaaaaattaatagagtaaatttgaataaaaaaagttaaaaaatagtatatggggtaatttattaagaaaaaaataaaacgttaaacaaattatttttgaatgaaaaataaataaatagatatataaaattgaaaaaaaatttataacataaatttgatatttttgtaattataataaataatattgtagcattattatggttataattataatattaacaatttacttttcccacgtgatcaatgcatgcatgatggattaaccatatcatttctataattaaatccatatgttacgttgatcatcaattttgaaatttatttattaaaagatttctccaatcagttcatatcaattatatttggtatatatatatacacacgatctccataattaaatctataattaaatccatatcagttcacatgatagattaaccatatcatgatctccataattaaatctataattaaatccatatatcatctatatttagtatatatatatata

SEQ ID NO: 160524 - DNA, 839 bp, Cannabis sativa
aacctcaccctgctttcatctactgtgacaatcactttgcaatacacattgccaataatcctaccttccatgaaagaaccaaacatatagagttggactgccacttcatccgtgacaagatcaacaacaatacagtcagactgatttccatttccagtgctctacaacttgttgacgcattcaccaagcctctaacttcaccaattctgggaactcatatttccaagatgtcactttacaacatacactctccatcttgaggagggagtattaagttttactggtttaggttctgttagtttaggtccagttggctgtatcttctttgtatctctgttattggacattgtaagttagtcttttagtctgttaagtccgttttctgttataatagttttttcgttaaaaccgttggtccctaacttcttggtccttctctgcactgaggttcaagctatatataggcttgcctctcttttgttatgtaattaatgaaaattccctttttcctttttctcaatattattttgtgttaattttatttattttaattttattttcataattttgtttaaatcatgtattttttacttttttctaataaaatgtcacataaattttttatttatttttttttataatatttgaaatattatttatttttgtttgataagtatatttttcaagaatatgaattgaaagaaaaaaaaattaaaaaaaaactaacgtaattaaaatatatattttatgtaaaataaaatttattaaaatggagtgtatttataaattttttggatgcaaataatgttggaaattatttactaggatctagatttact

SEQ ID NO: 160525 - DNA, 737 bp, Cannabis sativa
ctaagctttagctttttgctttgcttattttttcgagcgtttgctttttctttgtgctcaatttttctaagctttagctttagctttttgcttatttttttcgagcgtttgctttttctttgggctcaattttcctaagctttagctttttgccttgcttactttttttcgagcgtctgttttttttagctctattttttttgagcattcgcttttttgttgggctttccttttttctttgcccaattttttcttgagcattagtatttttttgctatgctcaaattttttttaggttgcaacaagtgacaaattttctcctcatttaaatggaagacccgtctttagttaaagacacgatgtcgcaatgtgctttttgaaattgagactctattttgatctcttcgtgttggaccatcttttcaatgatatttttgagggcacaacattttgttgttgaatgagtatcgcttcgatggtactgacaataattggttttgtcaatattagtgccttcttttgtttttttaagctttgggagatttatagcttttgcagccaataatccatctaatatttgttcgacatcatcttcatcaatgaacgaatactccatagtctcttttataatggactcttttggtactattttggctttttcttcgcctttgtcataatttacaaaggtagccattgattcatatgacatgtcgttttgacgagctatttgcacctca

SEQ ID NO: 160526 - DNA, 520 bp, Cannabis sativa
aggaaggctgggggcacatagatgacatggacgaattcttcaaagtccttaggaagtagaacatgaaactaaatcccttaaaatgctcctttggagttagcttggcaaagtttctgggcttcattgtcaatggccgaggaatcgaagccaatccagagaagattcaagccctcatggatatgaagtcgccaacaagaaccaaggaagtgtaaagtttgactggtcggatcgccgcactcagcagatttaattcaaaatcaacagacaagtgtgtcccattcttcaacatcctgcagggaaataagcaattcgagtggacgaaggaatgtgaaaaagcctttcaagagctaaaatgcaactcgtaaagcctcccgtactctcaaaacctttggcagagaagaacttcggatatacttagatgtcacggagcacgttgtgagtgccgtgctgattagagaagaaaacaacatacaacacccggtctattacattagtaaaagactcattgaggccaaaggcc

SEQ ID NO: 160527 - DNA, 502 bp, Cannabis sativa
tcgagtttggggcctaggtcccccttctaggttcagatcctaggtcccagtctaggtccaagtttaggttcgggtttggattcgagtttgggtacaagtctaggtcactgtatgggttcaggttttagtctggttccaggtcctggtctaagtcttagtcccttctcgagttcgagtctggattgtgctctgggttctaatcaaattctaggtcctagaggaggttctggtgtgggttccggtctgagtttaggtcctgagcctaggtctaggttcgggtctgtatccgggtctgggtttggggcctgggatccaatctcgttatgggtatttttttgtacccgtgtcaaggttagggatttagggttttgggtttagtgtttagggctttaggggtatgagtaaaaattttaggatttagggtttaaggtttagggtttagggtttaagggaccgcttcaagtctcggcttcaatttcgggtcacatggtatgatttaagg

SEQ ID NO: 160528 - DNA, 512 bp, Cannabis sativa
ttgacagaaaatggatattaataacttgtgaaagtcatactgtattgtccaatgtattcaaggaaactgaaatttgaatttctttttggaatctaatatttaaagtcaaagacttaaatttataccaaatatacatgagtaattattctttcttggatcaccactactaatctaactctaagtttaatttgccaaaagtaaacatagacaagtaggagatttttaagatcaaggatttatatcatttcgagatagaatatcaggaatataatcatatgcgccattcaatttcataaaagaaaatagaatggcatcataagcaaataatttataaaccattcatccaatgatatattatttaagaaaattcgaagtgaataagagaagaggaaaataaagaacaatttcgattaaaataagaatccaacgatatcccgtttaggcgagagttaaagttattcttattttataaatctcttcattgtttcatgttgtaaacactaatctaagtt

SEQ ID NO: 160529 - DNA, 529 bp, Cannabis sativa
acacctccttgcccttcttggccttaggcaacacgggtacgggtggagtttgtgcctacacccgctcagggatcctcctaaccagttcggaccctgttgttggtggcccagactccttagactttgaaaatttgggagtggaaggattcgcagcagtcaactcctcgaaaagttcaataacctcttcagaaggtctcttctctaaagacccctctccgcccttagacttcttggccggaggggaggcgctagaacttctgcccatcctcttcctcagagtgtcaatcatctgccgagacatgtctgcacagaacaaaaacggcgtggttagcacaaactagcagaaaatacaaagcatgaaagtcaagaagctgaaaaagaagtaaagcgcagactgattgcccgcctagaaagtcagaagtctatcataacctgatatctcagacataacagccttcctttttccagcatagggatgagagggccgaacaggtgaaatgggctcccttatgcgaatggcatgttcaac

SEQ ID NO: 160530 - DNA, 694 bp, Cannabis sativa
attattattattattatttgatgtagtgattagaatcacttatgaatttacgatgcagatatctaaaaatcgcacagtaacctcctcgaaccaggataatattaggttgtttttagtattattttcaagttaatttttagtgcgtttttaatttagttatactcttatttggagtaattttacgcttttttatcttttatttttgtagatttaaaatagaagaatattaaaaaatatcaaaggaataagatggaaaaaaagataaaaaaatctcagaaaaagataatctataaaatagagaaaattcaaaattgtgcaaaaaaatgaagttaaaacttcaggcctgaattcgactatgtttagactagattttagagaaagtcaaaacatgaaagttatagatctctctttcatcttaccggaacatcttaaatcgttcaattctgagcaatatcgagaaagttatggccaaaatacagtcgaaataacagaaaactcactgcccaaataaacgggagagcgcctaggcatggaaatcatgggccgcggcccgccccttctaatcctaagcaaaataggttgtttttagcgtttttatcttttttttttaccattttttttggctatataagaagtggacttcaataattcttaacaagcaatcaaggaagacgaaaattagagattacttaag

SEQ ID NO: 160531 - DNA, 670 bp, Cannabis sativa
atctatagtggaagaggcgagctctagaggacgtacccgcacaatttcggggaacctctataaaaccggtgttatctattctctttacttttctgcattctctatattgtttatacatttttttgggtattgaatcgggttgggaagaatttttctaggtttgattgttgtgttcttcaaagaagaacaacgaagaaagaggctcggttgaagggggttaattttctggggatagattcaaactagggtacaatcgggttgggtttattctctagctggggttgttttctgggcagtgaggtattaagttacagttgttactgttgtgttcttcagagaagaacaaaggagaacggctagggtgtgagtgggctgctggttatgtgtttgggaaataacatatatatgtgtaatagaggtttagggttttctgctttaaattgaaacgacctgtagcttttgttaaaggggttgtcgtttctttttcttgggtgtttaaatcacaaagtcaaacaaagctttgactggggtaacaaaggtcagatttgaccattgctttttaattgatttctctcttctgtgtgtagggataaacagtaataaaatcctatagtggtatcagagccaaacaaggcacaatctgcagcaaagattaattaagaaagcataa

SEQ ID NO: 160532 - DNA, 519 bp, Cannabis sativa
aaatacttagcgtatattatacgatatacaaactgagtatagatagtatgacgagccaagataaaagacagcgaggcgtttatctcgctaaaagatgtattacatgcaaggaagatcttctcgaccctagagagtataaccatcagggttaagacaatattagtctcaagaagccaaaatgacaagcagctgctcgctatcaaagtgatcttggcgccctcctcaacgaggaatccctatgagatacaacttaccatatatctttaattaaacgttcatcttggcccaataaaggcgggatattcacagctgtgtaaaaacctcatttatttggcttgatttataatcaaatcccacaattttagggataatggctgtaaatgaattttggccagctttgtaattaactgccaccatgcaatttttaatagtggcagataagatcgaaatggggggacgaaaaaactcttatacaagaggccataaaagaaaaacactcagaaatctgaataagattga

SEQ ID NO: 160533 - DNA, 641 bp, Cannabis sativa
attattcgttatcagatcaaaattcgatggtttgatatttttaaaattaatatttatagttaactttggttagtaactattcacgggtaatacccattaagaagtgttccatataatatattagaatagcggtatcaatatatttagaattatattggatatcgacgaatgtatgtttggcttaagtactatttgacactatcacattgctatgactagagtatgactaacgtaccgagtataggctgatattgtgatcaatagtgtaatgaatgaacattcttgactcagtaccatgtgggacgcggagaagggttacggttaggggtatgggtgcctaatcttaatcttgtttatatatctttgttatgattgtatttttcatactgagtctgtcgaatcacagatattgtttgcatgtgtaggtaagagcaaggcttaggttgagcaaccgtgagagcgggcagatttggattgtacatgtcgcggtagttaggcctggagcgtacgatctttgggacagcatgctttattttaaatggtcgctaggcgacaattattgtatcgaatgttttgtattacaattgtaaatattttaaatacaggatcccgatcatgtaaaaaatatttattttcattta

SEQ ID NO: 160534 - DNA, 531 bp, Cannabis sativa
ttgcttgtttataggttaatagatagtcatcaataccatcaccaacaaccatattgatttaaccatccaagccataacgagatggttttgcagaaacccccctcactacaatgaggagctgtgatcttctgaactggaacattagtggtagatttctcagttgtatcaacttgcaaaggttcaagcgagggagtgggattatcctctacttgagtacaagatgatggaacattagaatgagttatatctgaaagcatttcctccaatactactttaatttgcggcttgaagttcttaatatagttatcttcaaggaaagtggcatttgtggaaacgaacactttattatcatccttgtgactataaaatagtccacccctagtctccttagaatttccaacaaataagcaaatatcaattcttttttctactttgccatctttctttcttaagacaggagcagggcacccccagattctgtaattgcgtaaactaggtatacgacccttccataattttaaaggtgtctta

SEQ ID NO: 160535 - DNA, 532 bp, Cannabis sativa
  modified_base (52)..(55): a, c, t, g, unknown or other
tggtgctttcattgagagctgaaggaagcgtctgcaaatagacaacaacctnnnnagctaaaacaacaatggtggagactctcaacacgcgtcaatcccgtcctcctcaaaatgcccaagatcgcgaagatgaggaggtagcctcaagggttaacgtgggctctgaggtaggagaagaaacccatgacgacgaatacgataggaacttcgacgaatacgaaacgtatgacgaaggtagttacacagaactagtgctcttaaggaaaaatgctactgatcatgaggctgaaatcacagcccgaaaagagcaaaataaaaagatgcaagaggtgatgctcgccatgtagaaagccatggaggcatcagggatccatgtgcatcctcaggctatccacgctggacttggagaaacaccagaagagtcctcaccaagcatctaaaagcataagtctagggaacctagccctataaggtacccctctgaagggaactagtagaaaaaccctacttccactcccgggaaaaagaaaaa

SEQ ID NO: 160536 - DNA, 843 bp, Cannabis sativa
  modified_base (234)..(238): a, c, t, g, unknown or other
attttttcggtgatttttccgacggcaatgccaattctgacaacttttatggcgtcggcagcaactccgacgacttttccgacaccggcagctacttcagcgacttttctggtaccaaaagctaggggtgttcactaagtatccgatccaatccggacgatccaatccaattcaatccgcaaaatgcagatatccgcacttgcgcggattggattgaaaaatctaaaatccacnnnnntgcggattggatgttgtttgaccttaaaaagtaatattaaaaagtaaccgatccaatctaatctgcacaattatatatatttttaaaaaattataatatataatatacattaattttctagtaatattaaaaaaaaagacacaaacttctaatttcttaatcttttttaataatatattgagttggtgtattttatttattttataataaaaaaattttaaaaaattattcttattcacataaatatatacacataaatttaaatatatatactaacttattaattttagtaatgaatacatatatattttagtgtaaatctaaagatgagtacataaatattgacatatatgtatatttgtttgatttatatataaatagagatggaaataggttattgttagagattaagaaacaatagtcttttctttaatttttttctacaatatattaaataatttatcattaaaaaaacaaccgatccaattcgcactattgcggattggattggatttaaaccgttatgcggatcagattgaatccaaaatataaaatccgcacttagtgcggattggatgttttttgaccaaaaaagtgcggattgg

SEQ ID NO: 160537 - DNA, 722 bp, Cannabis sativa
cttgtaatcctttctaattggaattaaatgggcagacttagtcaaacgatcaatcacccaaacagtgtcatgcttcaaaggtgtcaatggcaatctagtaatgaagtccattgtaatcttttcccacttccattctagtataggcaaaggttgaagtaaacttgaaggtctctgatgctcagccttaacttgctgacaaactatacacttagttacaaagctagccacatagcttttcataccttcccaccaatattgtctcttcgaatcttggaaaatctttgtacttccaggatgtatagcaaacttggatctatgggcctcaattaaaatagactccttaagatcagggatatttgtaacaaccagtcttcccatatggtataggtatccttcactatttactgtccacccatctagttgctcaccatcctagattcggttccaaataagtcttagcttttcatcttgccactgacattgcttaacttgttgaagtaacacgggtgtagcactatgttagagatacaagctacttcttccccttcatagtattgcaagttataatcacccattgtgattgtccttttccagtcctcaagaaccaaacatatcaaagtaccgtgagaatttctacttagtgcatcagctactacattagctttcccggggtggtactgcaaagtgaaatcatagtcttccatatactcaacccatcttct

SEQ ID NO: 160538 - DNA, 581 bp, Cannabis sativa
atcccacttattacctgattaactcataatataaataaaaaccctaattaattaccattagacttatcgggatattacatccaacttctaattactcccacaatgctactcgtggaagaggcagaggatatgatccttacagaggtcgtgggagctcaagtaattcccgtgtgatttgccaactttgtgggagatcagggcatactgttcaacagtgctacaggcgttttgatgtcaatttcacaggagttgaagatgctgctccaccctcaagtgaaactgccctacaagccaacattgctttctcctcagcccacctgatgatgattggtatctagacacctctaatcatgtcacaccagatgcaaccaatctgatgcaaaggacttcctacaaagggaaggaaaaaatggttataggtaatgcttatcaactctctatctctaacattggtaatagttccttcactgctgatcgaattctttatctgaaaaatatattacatgtgcctgccatttccaaaaatcttatcagtatatctcaattcaccaaagacaataatgtcacaattgaattcacac

SEQ ID NO: 160539 - DNA, 666 bp, Cannabis sativa
  modified_base (434)..(435): a, c, t, g, unknown or other
tattgtaagctatataatttttattatatggtatataagttttattgtatactatatcatctaatctcacatcatgtatgttagtttttattttattatacataaaggtgatatataattttgttaatataatatatacaatttttaaaaaaatatattatattatattatattatttggctaattaagatttttgcccccctcccccgaatgtaccaaaccatacctcttaaacttttctgatcgttaaaaattccccctaaactattgagagtgttggatttaaaggcttttatctaattttagtaaggaaagtctaacatgaatgaaagttcgggacataatttggcacatgtcaaagtacgagggacgtgatttggtagatattaaagtttgaggtacataaacaatcactaaattagtaaaattgaatnnaattagacaaaagtccttaaattcgataatctcaatagttcaggtggcatttttaacaatcaaaaaaattcaaggggcatgattttgtacatgtcaaactttaggaggtaaaaatcctaattagtcattttattttattttttattgtaagtatcttatagtatggtatatagtttttgttgtctatagtatatcatttatttaaattaatatttaatttctattttatta

SEQ ID NO: 160540 - DNA, 532 bp, Cannabis sativa
  modified_base (33)..(56): a, c, t, g, unknown or other
gcagaacttgtgaccggggattgggcgactgannnnnnnnnnnnnnnnnnnnnnnncggctggatctttgtctgactcgcccagcgcgatgctggtcgcaggttgcttcttagtagcttgatagactcttcgtatcagtacggtggcctatcttgtttggtcgtcaattgctgcttgttgagccctcaacgtttccacctctttatccatccattcagcgaacaaatgcctttgttcttcaaatgcaaggttcactgcagtacggagttcttcccgatcatgatgcagagtattagtatggccttgcatgagtccaagagcatcacggaggttctagatgtcggtgacatctctaacggttgttcatacatttgttgctgccggaactcaagtactaggtttacccagattggctgctgaactattatttccagtctcttgcacaccgagtgcaattccattcaaaggagacgtcacaccatgacctatggttggtggttgtgtgattggttgttcaggatttgtggctggt

SEQ ID NO: 160541 - DNA, 650 bp, Cannabis sativa
aaagaaaaaagaaaaaaaatttctgattttttaatttttttgaaatatttataattatttttaaaaattaatattacatggatcactaaaaacttgccacctgtacaaatgtgtacacgtggacagtccaccgtggcacttaactgtgatttttgaacggaggtgtgcagagcaaaacgaaaccagtgttaggtagtttagccaccaaaaatttagtttttgtgtttaagtgttacaaaccataaagttcaggtggtttagccgccaatatctcgttctaaaattgtaaataaaacataaaagtaaagtaaaataaaaaacatgtatttgtgaaggaaaaaaccctattctttatgataaaataggttaaatagatttttatcgtatccaaaaagttatcacattttttttcacagaaagaaaaatctctcctcttccctctcaaccgtataattgttaatatcatgtattgagaatattattgatttacaaaatagatcattgttctctatgtgccacccacatcttaagttgtagaaaatgttttagaaaattttaatttgagtattatagctaggataggaatgttgattattatacaagggaaatttgattttctatacttagaaaatcaaaaaatttgatttcta

SEQ ID NO: 160542 - DNA, 609 bp, Cannabis sativa
  modified_base (49)..(49): a, c, t, g, unknown or other
attagttattatttgtttagaaaatttttttttaaccaaatgtaagcanaaaaaatcaaatttcccttacatgatggatgtcttaaataattatgttacatgctattatataaaaaaaattacaaataaaactatctagatgtagaaaaatcacgaatggcgtataataatttatccttatttagagtgagaagaaaaacgtaaatcgtttagtaaaataccaaaggctgcccgcttgtggaaaagagttttggaaaatgaaaagggactttgtttgtaaactttgttatagaaaatagtactgcactttgcacggtgttgtaatataataaatttatatatttagttttatatatatttaattatttatatttctatacatatacatatatgtgtgcacttttaatgggtattacctatgaatgggtaaaattagaacattttgagtttttatacttaatttttctatctaattagaaaaatttctcatttttatatcatatgggctaagattgttccatcggtaaaaaaaatattaagaaaaagtgttttagcaagaaaaataagaaaagaaaaagttgagtttgagttaaatatttttgtatgaac

SEQ ID NO: 160543 - DNA, 567 bp, Cannabis sativa
attatgtacagaagaggattctccatgtcgttgctcagatgcgttactcaagaagaagctgcacgacttttatctcaagtgcatgattgattttgttgaaatcatgctgtcgggcagactttatctaagaaaattctaaggcaaggctatttctggctgacaatgattgaagattcaaaggcttatgtcaaaaatgcgacaaatgctagagattttctaagatacctcaagctcctccaaatgatttaactcagatgcaaagtccgtcgtcttttgccatttggggaattgacctgattggacaattacccaaaggcaagggaggagtgcagtacatagtggttgtagttgattacttcactaagtggacgaaagccgaaccactagcaaccatcacatctaaaaaaagttcaagactttgttgtgaagaacataatctgtcggttcagattcccatacaaaatagtttcagacaatgccaaaaagtttgatagccagtccttcactgatttttgtgtgaaccatggtatcatcaaaagtttctccgcagtcgcgcatccccaagca

SEQ ID NO: 160544 - DNA, 521 bp, Cannabis sativa
aaaatccgaccacccgccccgacccgatgccgaaaaagccaaaaaaaccaaaacccgtattgtcaggtcgggtctgacccgaagaagtataattcgggtatcgggttcgggtttcaaaaagccattgaattttattcgggtgtgcacccgagacccgaccaaaatatattatatataagtatatatttaataattattattttatttgtaatattcttaactaaaaaaaaaaaactagaaattaaaaacctaattaatggtatacgcatcccaatgtcactatcccatcccattataccattattacctgtataatcatattcattattaataacctttactttctcctcccaagtcccaaacccaatcgtgatctgttcttctcccaagaaaaatcagcatgttaaattagtttatttctcattttatgcaacccaaaaaatatattaaaaatagaaaaaattgatatttttaaaaaataaaatatcattgggcccaaaaaatctttcaatcggatctgg

SEQ ID NO: 160545 - DNA, 935 bp, Cannabis sativa
acattccgtgaaagtacattacgggacaaaatcatatccctatatatataataataataagaagaaaagaagctcaatgaaagaaagagagagatttataaaaatgaaagagaaagaaaaaaaaaagaagaagaaaaggataatgaaaaatttaatagaagttgaaataaataaaaaatcagtgtataacagtattagagaaaggctaggggtaatggtatcaagcaagtgacatattattattagtgtaaatcaatattgaatctcatataatttaatttaataaataatataaaaaatatataaccaatcacaatgcactatatctatatgatattgggcaccatatgctcatagtataaattttaaaacttctcttaccatactataaatgtaaattttgaaagaaatataatattttgagtaaaaatcccacaattttattacctgcaaagttggggcaaaactgaaagcagtggaaggatgtgaactgtgttatctgatgatgattattgtacaatgaagatggcatgttcctatgactgctactactcatcatcgtgtttgatcgttgtacaatctccattgttgaattttgacgatcttgtacaatttccgaaacctcccttgtaagaatatgatcatgatgatcgcctcgacgagagagattaacatgatcttcatcatagagaagcctgacaccacaacatttcacttgacagctactaaactcatctgtgtagtcatttgggcggaaagaaaatgttgcagaagggttgatcatctgcctacttctactgctggccactagaggacccaggatttcatttaagcaggacaaaataaaacattaagggctcgtttagaatgctgtattagatcgtattgtattgtattatattgaattgtatttatatgtggtattaacttttatg

SEQ ID NO: 160546 - DNA, 514 bp, Cannabis sativa
aatggcttaaaaaaatgtaaccatgatgtttacaataaaaatgtaaccattgaaacttcttcctaaaagtattttatcataatgtaaaataataataagcaaattatacaaaaaattgtaataatctcatacacctatgtaaacaaacactttatgcaatcctttctctttcaattcttattagtttaattttcttccttattatatagggtaaaaatagtaggacctaccatataattattctatatatatatgtatatatataaaggagaagtatgaaacggcgacatgacgctctaaaatcactctaaatacatctatttgttatctcctcaattctctcattattctaattttttattaggtttgtaaatattctactaaaatataaattacaaacaatatttaatttttgtattttttacacgctaaaacatatttttttatttctaatttatcaaaataataataatacagtagaacctctattcaagaatactctattcaagaataa

SEQ ID NO: 160547 - DNA, 559 bp, Cannabis sativa
tttctgtcagctggataatgaatccctccatgaggcttgggagaggttcaaggatctcatcaggaagtgtcctcatcatggtattaagaagtggatgctagtccacatcttctacaacgggctggttggtaatacaagaacacttatagatgtcgcagctggtggggcatttacgaggaaaagtgcaaacgaggcctatgaactgctagaagagatggccctgaataattagcagtggccaactgaaagaagtcagaaaaacaaggtggctggtatgcatgaggttgacgccataacaaaactgacagcccaggtagaggccttgacaaaactgatagttgtgcaggaaaaacaggctcaagttgtttgtgagctctgtggaggccctcacccctatgaggaatgcccggtagatgtgaatagtttgcccatggatgaagcaaaagccattgggaattactctcaaaataataactttgggtttaatcaaggagggggtcaaaggaatagtgggttctatcagcaaagaaatcagaaccagacaaagaaccaacaacaa

SEQ ID NO: 160548 - DNA, 500 bp, Cannabis sativa
  modified_base (27)..(27): a, c, t, g, unknown or other
  modified_base (305)..(305): a, c, t, g, unknown or other
actaatcagattgtaaagagttttatntagggcataaaacccaacagactgttccaccaggcatgagcgcccagatgaccatcggagatgcaaccgaattgaaaaatcttcgtgctgtgcttggactcatgcagggccacaacaataccctgcatcacgatcaggaggaattacgtgccgtagtaaacctcgggtttaacgaacagaggcgtatgttcgccgagtggagacacaaagagatggaggcattaagggctcaccatgcagaaatcaaagatcttagtcggcaagctactgtgctgatncgaagagcctatcagactgtaggccagcaggcgccgagcgtcattccccttggaaaaaccgaggatgacccaacggtgaatgattcccagacaaacaacggtcagttgtcccatccccggtcacgagttccactcgtgggccaagaggtaggcggacaaaccttgtccaggaattcatcaggaggagtcatgctc

SEQ ID NO: 160549 - DNA, 547 bp, Cannabis sativa
taatagaatactttaccaggcttcttggttttcactctgagagaaaaggggtttagatatttttggatcgttttactaaccttaaatgagttatatattattgttttacattgtttgaagaaagatttatataatagagcaaaaattaaaaaaaaaaatatatatatatatatatatgaaaatacatcaatacagacaaaaattatttttatactttgaactgtttattttataatttatttataattgtcgtaaaattatttttttttaattattttttattattttatagtttataagattaatttctcattattttttaattattttcttaatttttgcttaaaaaaaatatatttttatagtttatttatagttatataaagttatcgtgaaattaatttttcattattttttagttgttttcttaattttactagaaaaatatatttttgtagttttaaattttacaagtatatgttggtttttgtgccctaaataaaatccattacaatctgattagttatcaatctaagaaattagaagt

SEQ ID NO: 160550 - DNA, 548 bp, Cannabis sativa
ggccgaggtccgccgctattgctctttagcggccaggaatgatactaatagcggcggagaggtccaccgctattagtgttgaacgtcgtagtgtttttttgtttttacacttcaaaataattttttttttgtatttctacggaaattcacatagcaacccacatagcaactaatgaaataacttaaatcacaaccaaaatctacatagcaacccacatagaaactattggagcaactaccaaaagaacctaaaccataaatttgaaagaagaaaaaaaaattaaaaatagtatatgagataattcctcattttataattagtttctacaatattattttgaaataactaattactaaaacaaatactataatatatatatatatatataatatatatttaactagcaagcacttatttattttaacttattcgtttattttaatttattaatatgtttaaaaatagcataaatgttactaaaaaatgtaacataaagtataataaataataagaataaatataattgaaatgtaactaaaatttatat

SEQ ID NO: 160551 - DNA, 502 bp, Cannabis sativa
tgcactcagtactctagtcgtactggtgttggtggcattgattcgtacttttcaatattgcctaacatatatttgtcggtatcccataccataacgccatttatgatatgttaatctaattggcaatacatactatccaacactctctagtatcactagatatcagtatctaaatgcaaacctatgtacatccataatgttatttctagtatactaggtaaacggtatcataaaacacgtaaatctaaaacatgctcatatatgcatctgaatactaatcttacctcaattttgaaattaagagtgccaatcaacttgagtgaaaaaaattactcgacaatcagaggccctaagtctatggtgtagaatcatggggataagatgaatgaggttccatctcaaaaccaattggcgatgaggggagtagcccattccagttatatattctattatctttccacacattagcaatgtgggactctctaacatccccctcaagatg

SEQ ID NO: 160552 - DNA, 722 bp, Cannabis sativa
ctggatcgagagatatacatggtgcaaccaagaggatttgaggattgagctcatgtagattatgtttgtaaacttaaacaggcattctatggtttgaagtaggctccgagagcatggtatgacaagattgctgagttcttagtggagagcggttatctcatggcacatgcagattcaaggttattcatcaaaataaaagaagcaaagaccacaattgttcttgtatatatcgatgacctcatcattactggcgatgatgaagcagagatttatcaaacaaaagagaacttatcagtttgctttcaaatgaaggagcttggaaaattgaaacacttccttggactagaagttgatcgaactaaggaaggcttatttctctatcaacaaaagtatgctaaagatttgatgcaaagatttggaatgcttgagtgcaagtccatctcaacacttatggaagctaatgtcaagctatgtgctcgtgctggaaaggacttgcaagacagagcaatgtattgacaacttgtaggtagtctaatctaccttacattgactcgaccagatatttcttatgcagttgatatagtgagccgatatatgcaacatccaaagaagcctcatttggaagcggttcaacgaatgatgaggtacgtaaaaaaataccattaactatggtctcttctataagaaaggggatgaggttaagatcattggctactgcgatg

SEQ ID NO: 160553 - DNA, 618 bp, Cannabis sativa
aaagctgtgtagaattttttcaactaaagcgcttccttagctgcttcacaagctgttatatattcaacttccatggttgaatctacaatactgctttgcttaatgcttctctaaactacagctcctccaccaagagtaaatactgacccagatgtcgactttcggctatctttgtctaattaaaaattagaatcagtatacctagtaggaattaactctctaccaaaatatacaaggatgagatctctcgttctccgaagatacttgagaatgtgctttacaactatccaatgttcctgcaatatcctaagattaagaaaatggattagcaaaccctaaccagttggatatgtattaatatgaaattatattattatataatttattatatgtgaattaatttgataaaaaacatgttaagaccccgttggtgagtcaggtgcatattcatattttgacccgaaaagggtaaaactgtgaattttgtttaattgcatgcttatggactatattattatatagtatacttgttttgttctttttcatgtattttctgacaagttggcgcggtatagtcacaatcgggtatttcgggccgaactgggttcagggccgaaa

SEQ ID NO: 160554 - DNA, 550 bp, Cannabis sativa
tgcttgctgtgtaaagtgcagactgaaacgtcagctcacttattctttgactgtccaacatctcggctgtgtttgcaacaaatcaaagattggctgcaatggaaaacacaaaatcacaatcttgctggtctggtacgatggctcgggaaagctaaaatcagcaaatttaggaagcttgtaatagctgctgctgttactagcttagtttatcatatatggaagatgaggaatgtgacttagggcccgtttggcaccgcttttagaaaagctaaaagctactttttgaaaaaaactgtgataaaaatgtgtttggtaagcagttaaaaaacagttttttgaaaaaaaatttgagaagctacaactaaaagctaaagctgctccaactcaacttttagaaaaagttgtttgataaagactacaataatttttttgtactaaaatcatatatatttatttattatatattaaaaaaaattaaaatatttaaaataaatgaatgatatttaaataaataattattaaattttttatttttttcaaaaaataataa

SEQ ID NO: 160555 - DNA, 608 bp, Cannabis sativa
tttaagttagactaatattattattttaattaatgaatatttttccttctctttcttagtgtcactttttaagactcaattaagatgtatatacaattatacataaacttattaagatgtatatttaaagtaattatgaaattaaaaaaattacaaatattataagtaaatggaaaaaaaaataatcaaatgtatagaaaaaaatattaatttttggatatttatataaagttgatcaattgaatatataataattatatataaatatgtaaaattaattgggtaaggtattcaattacccctataaagagaaacaataataatttttagacaaatcggtgtgaatgaagaaatattttacttgtagtattttttttactgaaaaataaaatatattgtgtttacttgtagttaataagtataatactcacatagtttgtaaagaatgtgagactcttacaatatatatatatatatatatatatatattacttagaagatatatcataaaaaatataaaatattaatagataaataataaaaaaaatattcataaaatgacatctcattttatttatatttttctttatatattgagataaaaaaaa

SEQ ID NO: 160556 - DNA, 505 bp, Cannabis sativa
gccaatagcttgttgcaatgtgttatacaaagctgctaccaagttgatttgttcaaggctgaaactggtattaccggatttgatttcacagaatcagagtggatttgtgcaggggaggttcattgggcataatagtatggtctgtcaggacttaataaggcattatggaaggaaaacctctaaggcgaattgtatgatcaagttggatttacaaaaagcatacgatacagtggaatgggattttattgaagagatgcttgtggctttcaaattcccagctagctttgtcaaacttattatggtgtgtgtcagaaccccaaaattctccttgatgttcaatggttccctacatggattctttgaatcaaaaaggggcctacgacaaggtgatccgatatcccccctattatttgtattgggaatggaatacttatccagaattatgaggaaagtcaggcttaaacaggactttaagtttcatgagagatgtggagaattgaagctc

SEQ ID NO: 160557 - DNA, 649 bp, Cannabis sativa
  modified_base (398)..(404): a, c, t, g, unknown or other
caaacatgcaaaccttagttaatagttctagcttttcttaaggtcacgatcaggacatccatgaatctagtaatagtgtacactaagtacataacatttccatcattctaaaattttcctatcactagaatatatccctagaaggacttaggcacctggtagtaactaatcatagaccttatactatcatcaatatgcaatccaaatttctagggaggtatgtttggatactattcaaaaattcaacttaatgatctttgaatcgcacatctaccaaatatttctccactcctatcagttcacaagatctttaaccacttaccttgatggtttttcgccattgctagaaattcatgaaatttttcaaacattctaaatttctttgcataaggtaaaannnnnnntgatcgtcttaagaatataacaaaaactcatatccacccctaaatgtacatccatattcgaatatagatgattatttatagacatatttactctttgcagagaatgatcatatcaaaactactatgaacaaggtacaaatgccatagttatataaatgtgttgtggtcttttgatgatttaggtctagttactataatgagttcttagaatagtccaagtggatcctggtcatagaatacaaaac

SEQ ID NO: 160558 - DNA, 768 bp, Cannabis sativa
aaactacatgtggacaggtcggctacagatcaactatccggtgcaggaatcgcacttgtaacacctgggggcaacacctgcccctgtagtcaaatttggatttaaggcatccaataaaaaggccgaatatgaagctctaatcgccggtctaaaactagcccgggaaatgaaggccgagcacattgagatctacagtgattcacagcaggtgataaatcatgtatccggagaatactaggctcgaggggagaagatgatagcgtatttgagcaaaatacacgatctactcgcacagttcaaaagctatgctctcagacaaattccaagggaagaaaacacgaccgctaatgcattagctcgacttacgagcatcaatgtaaataatagagctaatctaattcatattcaatttcttgaagaacctagcatcactggcatggaggagattgaaatgattgatacatccccgaactggatgacgccaatagcaacctacctcaacactggggaagtcctagataatagaaatgaagctcaaaaaatgagaaggaaggttgcacggtacatcatagtagagggagttatgtataaacgaggattctccatgccattgcttaggtgtgtcacacaagaagaagctgcacgacttttatctaaagtgcacgatggattttgtggtaaccatgctcccgggcagagtttatctaagaaaattctaaggcaaggttatttctgaccaacgatgattgaagattccaaggcctatgt

SEQ ID NO: 160559 - DNA, 569 bp, Cannabis sativa
  modified_base (534)..(535): a, c, t, g, unknown or other
ctggtttcactcagtctctctcagaccacaccttgttcatcaaaaatgataaaggcatttttctcgccctattaatatatgttgatgacattgtgattacctctaataacaatgatgatgttacatcttttaaatagcaacttcactttgtgtttcagcttaaggacatgggtcctttacgttttttcttgggattggagattggtcattcttcctccgggatatctgtctctcaacgacctttcacccttcaacttttgactgacacaggttttttaggagcttctactgctcccaccccaatggaatcattcgcctctcatccgatgttgaaaaaccattagaaaatccaaaaaatctaccgcagcctcattagtaaactcatttacttaacaattacacgacctgatatctcttttgtcataaacaaactaagttaatttctatccaatccgagggctccccacctcactgctgcttatagaatactacaatatcttaagggtacctctggccaagggctatttttttacnnagcatcttccactaacttatctgcttatgctgaa

SEQ ID NO: 160560 - DNA, 587 bp, Cannabis sativa
ccgcttcccaccccgtggcacgaggcttatacccttcctgggcgacgggacctctcatcacctcctccagggtggccaggcgctttcctcctttcttaaaagatttggacccggatgtagacattttggttctgaaaaagatttaaaattccagcagtcaggccccataccaaaccctaagtcaaaaaagggaatggggatcccctaaccgctggaaagaggctccctccggacagttttcaacaagaaagccttagagggctttcctggacaaaagtcgggtgcaagaatctcacagatggtgacattatgaatacgcaaagaaaagaaaagaaaaaaaaaagagagagggtaaaaatcgagaaagacaaagtcttctctaaacctttgaatgtcattgcgtgaggaaaagatgggtccttggaaaaatatacagtacacataataaaaataactcaaaagccagaaaggggaatctaacgtattacgcagaaactcacgacaaaaattcccagaaacttcaaacatcaaacccagaaaaagcagatgaacagtgaagcatgcaatgaacacgaacaataaagtac

SEQ ID NO: 160561 - DNA, 712 bp, Cannabis sativa
tgttgagccttgtaaataggtgtatgggcgcctagatacaagtcaaatattatatgatatgttatatgcttttcttactgagttattgaactcacagttctgcttccatgtgtatgtaaaggaaaggcgaaagctgaacaggaatgaacttgagctaggatgagattgtacatgtcaaagcagtgcgacctagagtgttcgatctcgggacatctggggattttattttgtagtcgctgtgcgacctgattaatatgtattttggaatattatgttttagaagtttgaaaacgggatgcaggcacttgtaaatattttgatataatattaagtttaatatttaatataaaagtttaaatttgacacgtttttcgagaaaattctttgattagcaaagattacacagtatttgaaaatgcactgtagcgtgccttaacattagggagttacatcaattgtaagatcccagaaaataaataatatttaaataggcatatttttattaaatatgtaattatgttggtaatgaaggaagattatgatcttacttagggtaactattgagaatttactcaatgaaataaaaagcataactattgaggaaggcgtgtgatgctctgcttctcttcccatggtgaagaagaggaaaggtacatcgaagcctcgtgcagccaatatcactgtagcggatgcaagcccggagctgtcctca

SEQ ID NO: 160562 - DNA, 563 bp, Cannabis sativa
gttttgatggttggaataatggttggaataggttttggaataggttttgtaggttttgtgcaattgtgcaagtttgagtttgagctttgttgagttcaaagctttgatctctaatggcataatttgtttcaatgagtttttctgtgtataccctaattaagtactctggaaggtttggttgcgtttggtggaagattgagcaagaaacgaaaaatttggggtgaactggtgcaaaccgactagccagttttactagacctctaaaaccagctagccggttttggcagggtccccaaatgcttcgttttctcgatttttcgtccatttcagtgtcgtggttgggtgtttccctaatttcagagtttgagtaacctctagggggtataacagaacctaggattgtgggttcgggtttctcgggattagggttttgagcatgtgacttacctggtttcatattttgattagggcatccatctaactcgagactttccgttcaggtcgaccagtacacttgaattcataaagaaggtaagagttgtatataatgtgtgataacaata

SEQ ID NO: 160563 - DNA, 590 bp, Cannabis sativa
gttttgtcaaagcagaaatttattcttccaatctcttagtataactatctggaagctcacgtttgcgaattctatcgttgatgtggtttcagagaccattcccgcgaggtctcgctttttctcctttggctttttcacgcttggcatcaaggcgtctccgaaggtcaattgtaggccaactatcttcaggaaaaatttcttctatccgatcatcctggttaacaaaatcactatggcagttttttcttcctttaatggtaggcctttgcacctaagtaccaagcatattgttatgcacaattgggcctcgcaaagcagaagggcattcaagcctataggcattggcagccttctttgtccgcaagggctggttggttatgttcatgttgattttaggaggtaataggacagttttagtttgaggctcacctacctttgccttccccttgtccttcgtaggagctaaggttccaacatcagtagggtttgctcttttttccttgtaaataggctcctctgaagcatcttcctcggagtctttatctatatcactaaaattggcttgcagttgtgccatcattttctccatt

SEQ ID NO: 160564 - DNA, 517 bp, Cannabis sativa
tgaagaataacttgattgacttttttggctgcttggaaatttggattgactaattggttgcagtactaaatggatagatagaataatcatatggaattagggtacaaatgtgtttacttaagagcccaatttagtgtataatggtttattgtattggaaattcaaagaagctcaatttgctatttttttctactgcacatttgcatacttttgagtaaaattacatataaatatgcaaagtcatatttctgattctcaatccattactataaggtagtaaatcatgattacaataatgcttttggtgataactcaaattttttacaggttacaaaacttaacaaacttttcaaatcagacttgcttgagggctttttgggagcaacttctggaaatatgtcattttggttgggaccttaggtaataacaaatgcttttctacaatttttcttaacattcctatcatttttgaaatctatgaaccattttttctttctcagttacattttgcaggaca

SEQ ID NO: 160565 - DNA, 556 bp, Cannabis sativa
  modified_base (283)..(286): a, c, t, g, unknown or other
  modified_base (402)..(402): a, c, t, g, unknown or other
atttagggcacaaaaccaaacaccctcaagtttttgggcagatttgcattctaacattgtgatccgaactctgattttggagttctttatatcgttggaaagctcgtcccgagctctatgtgattatctgtattttaaatgccatgaatatattttatgagaatgcaattaggggttaactctatttgtgaaaattctagaatttgtgactaggattaccgacacctggttaggagcacccggggatttggaatctttgttattgcgggacatcaggtaagannnnagttagcacgtagagttatgcatggtggcgcttatattataaatgatatatgtgagtaattagtaactgggattagggttatcaccctaacatgagcggttaatagcctagggttnttaccctagtgatatatgttgtgtaaatgctatgccatgttgaatatttatgtatattgagatttagggttatgtgttcaaggcataaccaggttggacttggtaactagaaccgagatgaaccattctaaggccttattgtatttagacatgt

SEQ ID NO: 160566 - DNA, 505 bp, Cannabis sativa
  modified_base (60)..(64): a, c, t, g, unknown or other
tataaattgaaagaaaaaagttaaaaatacttagtaaaattaaagatataaattttatannnnntaaaaattattaaaatagggtgtacttagaaatgtttggggtgtacttagttttggacgatatttttgaataaagtgctgatttcattcaaaaaaaaaaaaatgtttggggtgtaaattaaatttcccatatatatatttgtaagggtgttacatttgcatcccattatttaaaaaaaaatataaacttaaataatttttaaaaattactttaatatatattttttaaattttttctttattttatgttaatttcaatacttattttaattttattttcttaattttttctaacttatgtatatatattttatattttgttctaagaaaattttatataattttttattttaatttattatcataatatttaaaatataattttattttatttgataggtatattttttaaaaatacgaattagaagaaaaaagttaaaaa

SEQ ID NO: 160567 - DNA, 612 bp, Cannabis sativa
tgagagcaaacctagacatttttgcctggtcacatgaggatatggtcagaattgatccctttcacacgtcctaaatattgatccaaacttccgaccagttcaacaaaagcgaagactgttggacaaggagtgaacctttgccctgaaggaagagttagagaagctacgcaacttcataattgaaactttctacccggcttgggttgctaatcttgtactagtacctaagctgaacaagaaatggcaagtttgtattgatttcactgacctcaacaaggtgtgccccaaagactgttttccatttccaagaatcgatcagcttgtggacgcaacagcaacacacgaaatattaagcttcatggacgcctattaggggtacaaccaaatcaaaatgcatcaactagaccaagaacataaaagttacccaacagatatgggtccgtattgctataaagtcatgccatttggtctcaaaaatgctagagcgacataccatagattggtaaacaagatgtttaaagaccagatcagacgaaacatggaagtgtacgtggatgacatgctcgtcaaatccagaaaggctggggggcatatagatgatctggacgaatg

SEQ ID NO: 160568 - DNA, 550 bp, Cannabis sativa
gtattcctgtaatgagatgttttgatgttttgtacttaaagtttgtatagtgtttataacactgttacatttacagaagcgaagatgaacgcgtaagtttttcaccaatattgacacgttgttgccacgagtcaaatggtgggatagttcacgctcgtcgttctaggagtttgtcaatatgattatatgaatcatcaaaacacgttgatccattttagcaaaaaaaaaaaaaacacgttgatccaattcatttataaaattatggtggatgttaatccaatcacatttttagcaacaaaataaaataaattattattattattttatatatgtcttcaataacaaattataaaataaataaaataataaataataaattcagaaaaaaaaaattgtatttataaaaaatgtttaattttattttacattgtatttagaaaaaatatatatatataaatggagtatacatgtaatatattaagttttgaaatataattatattatgtgtattaaatttttaaattattattttctttacattaaaatatta

SEQ ID NO: 160569 - DNA, 725 bp, Cannabis sativa
tatataccatttaaaaaaaattatatacagctataaaataattatactgtacttttaaaattatatataataaaataaaaattaaacatgcatgatctaaaacaaaatgatatattatacaataaaatttatatccatataacaaaaaatatataccttacaattgaaatatatatataataataataacagataaaaataaaaatatatagcatgctaataaaattatatgtcatgtcaacaaaagtacatagaaaataaattttaaatattatttttttaaaaataatataccgcataacaaaaaaaaatatatcattcaccaaaacatatatactaacaataataataaaaaatatatacatatattactaatatatatctttatactatactaaacaaattatttacttacaattaaaatatataaaccatgaaaacaaaattatataccaccattgaatataataaaataaaaactaattaaatattgtttaaaataaataattaaaatatataaaatataaataaatatatgtagcatgctaataaaattatatacacgcattaaaatatttatattatgctaacaaaattataccactattacatatagccaaataaaaaataaatatcatctagaataataatatgtcatacaaatatactgtacaacaaaatttatatatcaataactcataaaaaatttgaaaaatcaacataac

SEQ ID NO: 160570 - DNA, 541 bp, Cannabis sativa
tgtctacgtagcgtagacctacgtgtttcccttacacgtctacttacaatgaggccttagaacggttcctctcggttctaattactgagtccaacctggttatgccttgaacacataaccctaatctcggcatagcattcatataacatatattcatattctcatatatatattcatattctcatatatatatattcatattctcatatatatatatattcatattctcatatatatatatatattcatagtctcatatatatatatcatggcatagcattcatacaacatatatcactagggaaataaccctgggcaattaaactgctcatgttagggtaataaccctaatctcggttactaattactcacatatatcatttctaatataggtgccaccgcaaataactctacatgctaactactgtcttacctgatatcctacgataatagagattccaaatacccgggtgctcctgaccaggtgtcagtaatcctagtcacaaatccgggattgacacaaatagggttaacccctgat

SEQ ID NO: 160571 - DNA, 637 bp, Cannabis sativa
catccacatataacttccaagtgtccgcgtctcggtgaacaggcagaattccttgtaaagttataccttctattaagatgtctgccaaggcttggcccttgatgggtgttcaagggtggtatgttatgtcaaactgccccagttcgattgacctttttatcaatcttctagaagaatcaggttttgataaaactagtctcaagggatgatcagttaacacttttatggggtgtgcctagaagtaaggccgtagcttgcgagatgcgtggactaggcacaaaacgagtttttgagagggggatatctagactctgcccctagtaaccttttacttacatagtaaatgggttgttggtgcttaccctcttctcgcactatagccgcactaattgcatcttttgagatagccagatagaggagtaacgtttctcaagttattagtttttccaaaacaggaggcgtcgctagatgctttttaatgttttgaaaagcctcttcacactcttctgtccattcaaatttcttgttgcctcgcagtacattgaagaattgtaaacacttatcaattgacctcaaaatgaatctgttaagtgcagccatccttcctgttaaggcttgtgttgggaatattttacta

SEQ ID NO: 160572 - DNA, 529 bp, Cannabis sativa
  modified_base (38)..(47): a, c, t, g, unknown or other
atttttattttatttccaaattaatcacaaccatttannnnnnnnnnaatgacttaaaaaaatgtaaccacgatggttacaataaatatgtaaccattaaaatctcttccattccattagatggaatacactctctaaccttattttcaatacatcgatctaactaggaattttacttttatattttaataaaataaaaataattaaaattagatatttaatcaattatgaaaataaggaagcgataattaaagccaatcgacttttactgttctagccatgtaacatttaaatttagataaagttactttcattcataattttgatatatttatttatttattttagttttgataacctccctattcacattagttttgtctgtatgagatagggataatttttagaccgtttattatgtggaattgttaatgttcactgcatttattgtatatgttgccacatacaaatctaatttaatttaaaataatttattattattctttttctaaaagtaacctgcaatgac

SEQ ID NO: 160573 - DNA, 510 bp, Cannabis sativa
gcgtggaaagctatctcggggtgtttaccaactcgttcccagttacgtactaaacatgttcttgttgatccccactgtgtgttttgcaattccgatgaagaaaccattgtccatgttttggttggctgtcattttgcacaatcttgttggaataggtctggtctggggttgcaattttctgcagaagctacctttgccgattagtttaaggcgtttttgatagggggtagagtggctttggtggatgagctattgatggtggcatggggtatttggaaagcccaaaatgagcttctttggcagggtcgttcttctcaggctgcggatgtggttcggatggctaggtctactctttataattagttgtcggctcaggaaaataggttcaaaccgctgttatttgatgttgatgttgctggtagcagtgtgtgttgggagaagccgcctgctgggatgttgaaaatcaatattgatgggacgatttttgctgcaacgactcaatatggtacg

SEQ ID NO: 160574 - DNA, 540 bp, Cannabis sativa
tcatataggggttccatccggttcactgcaacaacaagttcggcctgcacagcaggggcaggagctactggtatttctggagcagggactgcaggagtaccctgttatcttaaacgccgaatctcttcatcttattcaatgattctagcttgcatttctgcaaatctattttcccattcttgggcagcttgtggcgggttagcatcaccccgaccacgtgccctacccctgagacctctacctcagccacatatattaaggggaatctgagctccctgaccaccacttgatccaaccgaattgccctggctcctggtgtttcgcctggcgtccatactaatctaaatagcctgcgtaaccaagagctagtctggtcagatcgtggtcaaagaaaaacttactaatgccgcttatttggaaattaaaaagatgcgcctattctactatcaggatactaacatgcttcataacatgcttttcttaaatcatattattaaataaaccactaagcaataaaagcttactgaaccgtgaaacaag

SEQ ID NO: 160575 - DNA, 514 bp, Cannabis sativa
tgctttagatggaacaacatttagaatgtcgtttgccatctgtatagcatatccctagaaggacgtagacagagttgaataactcggcatagacctgactatttccaaaagagtacgattgctaatatgaactccattttgctgtggagtgctaggtgcattatattgggattcaattccaagttcaattaaaggatctttgaactggatatccatatattctccacctctatcagttcgcaagatctttaatgttttacccaattggttttgagcgaaatcatgaaattcctgaaaattttcaaacgtttcagatttcttttacattaggtaaaggaaactatatctagagaaatcatcaataaaagtgacgaaatactcataaccacctcgggcttcgacattcaggggtctgtagacatctgaatatactaaccctaggggttgtttgtcacgctctccctttgcagagaaagaacatttggtcatctttccttctaggaaggactcgcat

SEQ ID NO: 160576 - DNA, 573 bp, Cannabis sativa
ggtattaattattaccggcggtctagttacttattaccggcggatgcttccgccggtaataatgaaatctgttgtagtgaaagcccttaaataatgagtttctaaagatttaatatcttatgttttcaataatacttatttgatattttatattttaaaatcatacatatttagtactttaaatttaaatttttttgataaaattttatcagtacagtcaaactgtctaaaattttatgtattcaaaattcaaatttagttatttaattatatataactgagaactgtttggttaaattgataaaattgtattaattaaatttaactttagggtactaaatagtgtataatttaaaaatatgaagtaccaattaagtattattaaaaacgcagggtaataaatatatttttcatcaaaacacaaagtactaaatgagtatattccctaataattagccccatatatataatatgttagagattttataacaatggaagaaaatcaagatttattacaactctattgtaaaataatacaaggactaaaataagagattgattaaatatatgcta

SEQ ID NO: 160577 - DNA, 662 bp, Cannabis sativa
  modified_base (599)..(606): a, c, t, g, unknown or other
gtgtgggtatgtttgcggtggcttcagcttcattgcactccgtgatgaagtctgctagcgcctgccctttcatggaactgcgtggaatgtagtgtagatcaaattggcttaactccattgcccattcgaggagccttccagatgcctctggcttttgtaagacttgccagagtgggtggttggttaataccttgattgggtgagcttggaagtaaggtctccactttcttgaggccatcaggaggcaaaaaactagtttttcgatcacccggtatcgcgtctccgctcctatcatgcgcttgctgacatagtacacgggatgctaagttttttcctcttcccgtactagggccgcgctaaccacattctcggagacagacaagtataggaacaagtgctctccgagaacgggcttcgataggattggtggattagccatgtgctctttcagttttttgaatgcctcctcgcactcgtcagaccattcgaatttctgacatttcttcaagatgttgaagaagggagtgcatttgtgtttcttgagggaaggcatgctgaggagagcttgattttttttctggattttcctcaattccccnnnnnnnnacaatgaagcccaaaaacttccctgacttaaccccgaaagtgcacttcttcgggtt

SEQ ID NO: 160578 - DNA, 532 bp, Cannabis sativa
aactttcttcgagttttccagagagaaagaaatcctcaaatcagaaaaccttcaaacactttacagatttctttgctaacttttgcttgttactgtcagtctacgtttctttgttaatcaacagcaacccccagttccaacacttcatgtaagtttttcgcatccctcagtttactgcttgtgtttatggcatgcttttactgtctgtttgtttttctgggtttggtatttgaagtttctgggaatgtattcccttgagtttttgcgtaataggtctagatttcccttctctggtgttagggttactcttgttacgcactgttgttatattttgtaaaggaccatatactcttcgtgtgatggccttcaagggcatagagaagactttgtctctcttgattttctacccttcctctttatttttcttttatgcgcattgtcaccatctgtgagatctttgcacccgacttctgtccaggaaatccttctaaggctttctggttgacagtcgtccggagggggcctctttcca

SEQ ID NO: 160579 - DNA, 644 bp, Cannabis sativa
tggaagttcaagagattcacagaacttccattgtccacgagtatacggtggacgttatctccgccaatattggcaatgatgaccaatgcatcatgaatgtgggtggtggacccatctcgcatcactctccatgaatgtgatatcgtcgcactccctcttgaacagcttttctggtcgctcgctcaggttgttctcattggtgagtcgcttttctctggcttttcttgcatatcgctcctgcgagtttttggagtcacctgcgatatggggtccgcctatgatggttaggatgttgcgaggagttctcgaaccactcgcattttgattctcttctttttcatccgctcggggatgactttcctcattcttcttgtacttgcgaaaatttcctcttctgatcagctctttaatctcgtcctgcaaaaaccaacactccagagtagtgtgaccaatatcattatggtacttacagaatcttttagggtctctcttgtcgcggtttcccctgattgggggaggcttcttgaagaccccatttttctcttcgacgaagtagatatggtctctaggtactgccaactcggtatagttcacgaagcgtgggccacatttccttcttggggaggattccttctttggagggg

SEQ ID NO: 160580 - DNA, 730 bp, Cannabis sativa
ttttggacctgcttttgggtcaggacgtcttttacatttgcacctaaatatatatattttgtttagatacatatcttgcttgtttttgctaaacttttacttttggcctgttttacatttatccttgtggtatgccttactacctccctgagtggcatgaaaatattgtttttaaggcactcagttttattcataaatttagaggttgcatacactttttggtacaaattctcttaacaaagcctaagtttatattttttgactattggtaatacttccggagatgatcagcgttccaggccctaggcagcatggttccatccaatctttttagcttataggtcccggagccgatctcatcctcgatttcatatggtccttcccaattcggcttaagtacccccactccgggttcttgagtagctgggaagactcttcttaagaccatatcaccaatagtgaattttctacttttaaccttagagttaaagtacttagtcgccttcttttgataagtcgccattcgtatttgagactcatcccgaagttcctcaatttgatccaatgcttcttgtaataaagccttgtttgttattggatcataagttgttctcctgtgggatgggaataacgtttccaccggaaccattgcctcacaaccgtacaccatcgaaaatggcgagtggccggtcgtggttcttggggttgtccggtaggcccataacactct

SEQ ID NO: 160581 - DNA, 549 bp, Cannabis sativa
agattggtctctcgaggttggctggtttaggtccagaccttcaggattggttcttcgttccctgtgaagacgattattacgacgtctagagttcgttacctgagggttattagtgcgagtagtaggggctcgagggaggcgccgggcccttaactttccatccacctcgacctgcagcgcgcgtagttgatcctgaatcacagtatatttgtcggtggtgagttggacgattccctcggataccaccgccggagtgacaggcggaaagtgcattgttgctggtggcgtggacgtttctctgacttgggggccagttgtttcagggaatagattgagaggtctaatattacctctccctactctgccgctaacgacatccataggtggcatcctagctccagataatggcacgttcatcattccgatgttaatggactcattgtttgcacctccatttgtttggtttccagccatgatgattttctttcttgaactgaataaaactgtaattctcgttcccacagacagcgccaaatgttgtcgagcaaa

SEQ ID NO: 160582 - DNA, 500 bp, Cannabis sativa
ccggcatcgggaaggtcgccgaaattattgtcggccccgaaaaagtcataggaattagcattatagccagaaaaattacggaaaaaatcactaaaaaactagtttgtctatcaagaaactagtttctcagtaattttttcggcgacaatgccaattccgacgaattttctagagtttgttgtcagtattggaaaagtcgtcggagtagctgccggtgtcgaaaaagtcgtcgcagttgctgccaacaccataaaagtcgtcagaattggcattgttgtcggaaaaatcactggaaaaattactggtttcttcacagtttcttggtaatttttcccgtgactatgccaattccgatgacttttttgaagtttgttatcggtgctggaaaaatcgccggagtagctgccaatgttagaatagtcgtcagaattggcattgtcattggaaaaattaccaagaaactggtttcttcatcaagaaaccggttttttcatcaagaa

SEQ ID NO: 160583 - DNA, 529 bp, Cannabis sativa
tatgtggatgacatgctcgtcaaattcaggaaggatgggggccacatagatgacctggacaaatgcctcaaagtcctcaggaagtaaaacatgaaactaaatcccttaaaatgctcttttggagtcaacttgggaaagtttttgggcttcattgtcaatgctcgaggaattgaagccaatccagagaatattcaagccctcttggatatgaagtcgccaactaaaaccaaagaagtgcaaagtttgactggtcgaatcaccgcactcagcagatttgtttcaaaatcaacagataaatgtgtccattcttcaatatcctgcgaggaaacaagcaattcgagtggacggaagaatgtaaaaagctttccaagagctaaaagcacaacttgcaaaacctctcgtactctcaaaacctctggacggagaagaacttggaatatacttagctgtaacggagcacgctctaagtgccgtgctaatcagagaagagaacaacatacaacacccgatctattacatcagtaaaaga

SEQ ID NO: 160584 - DNA, 652 bp, Cannabis sativa
  modified_base (384)..(386): a, c, t, g, unknown or other
  modified_base (605)..(619): a, c, t, g, unknown or other
aattattttccatcttagtaataactttcaataaatattacgaaaattattcaatttaagttgatccaaaattagttaaaaaaatcattttcaactcaaatataattttttttataaatatatattgcataattcgaaaattaatgtgtttaaaataaatacatttttcgaaaatgctataaaataaaataaaatatatcctaaaaaaatattctaatttatattggtccaaaattaaataaaaaaaaattaattttagacacaaagattattttcctattaatttaatattaagaaaattatcaaatatttaattatcatgattaaaatcaacttaaatataaattttctatttaattaaatataactagaaaaatacttcannnaaacagaaaataactatctagactttcactaattaattactttattttctaattataatatattttagtcatttattttaattaatcattaaatgaaaaatttattgatttatgttggtataaaattaattaaaataattaatttttaactttttcaaaattttctatattaaaaaatgcaattttgaatttatataaaaatgattaataaaataaaannnnnnnnnnnnnnnaaattatttaaatttaagttgttctgaaattaa

SEQ ID NO: 160585 - DNA, 562 bp, Cannabis sativa
tttagcttaacatgaaataaaacaaattgtagaaattagaaattgtactttaaatggtggtcatccaatctgagtactttttcatttttgttgaaacctttgagcgtagtccgcccagcaggccattcacttaaaagtaaatgttctttcagtacttagtttggtcgtccgacctggtactttattggtagtattttcttaaatgttttccattccaataccgtggtactagaataagttgcattttttcatcatacttacctaatttatttgctccggattcgaggacttcgacaacttgatatggtccttccaagttaggtccgagtacacatgttgtactgtctttggtgtttagaaatacccttcttagaaccatacctcccacaaagaatttttgagccttcacttgtttattgaaataccgaactactttttgttgatgggctatcaaatttaagttttctgtggttcgcttctcttcgatttcattgagtgattcggccaggactacgtgattggtatcttggttgtacgccaatctcctgtgggatggtggctc

SEQ ID NO: 160586 - DNA, 702 bp, Cannabis sativa
  modified_base (629)..(630): a, c, t, g, unknown or other
agggtattcatgcttgccttaactgactacttcaccaaatgggtagaagctgaagcctttgcacaagttagagatcgagaggtaaaaaactttatcttgaaaaatataatatacaggttcagaattccaaaggagatagttacggacaacggttcacagttcataagccaagacttctagaacttctgtgcataatgggggatacaattgtcattctcaactccatgatagccttaagcaaatagacaagcacaatcaaccaataagacaatagtcaacacactcaagaaacatctagagaaagccaaatcgagatgggcagatgagttaccaggggtactgtggtcttaccgaacaacagcaaagacctcaactggagagaccccaatttgcattgacatatggaagtaaagcagtcatcccagcaaaaattgaaataccaaccatcagatatgaacactcgataaatgatctaaatcaacagaacatgaacataaaacttgatttgttagacaaaaagagagaaaaaacgcttattagaataccagcataccagcaaaaggtggcccaacatttcaataagaacattagggcctaacaattcaaggaaggagaatgggtactacgannagtgttccaaaacacgaaggaagaaggagcaggcaagttaggacccaattgggaggggccttaccaaattac

SEQ ID NO: 160587 - DNA, 532 bp, Cannabis sativa
attggggagtacacttttaacaccttttaaatgtaacattttacaaaatcggtcatcatgtcgtatttgtgtcatattttatgtgatttgttttttatttcgtgtcaagcatgtcgtgtcgacccgttttttgactcgtatgtaattatctcaaccctaacccaacccgtaaaaaatcgtgtcgtgttcgtgtcgacccactgtgacccgttttgctattattgaagctagaattgtacagaaaaataatagatttaagctccattaaaaaacttatatacatttatgtgtatatagtttgttatatatataataaaaattgaaaaaattaaaatatttttaatttcaatgttaaagaaaattaaatttaaaattttttaacttaacattgaatcactaaatatatatttttatataattatattattattaattttttattttattgtatttaaaaaaatcgtgtctaacgtgtcacattcgtgttaagcgggtcgtgtcgtgtttgacccgtttttatttcgtgtcaagt

SEQ ID NO: 160588 - DNA, 758 bp, Cannabis sativa
ttaaagggatattagcggctaagctacttgaactttaagttttgtaacacttaactacaaaaatcaaaattttggcggcaaaacctactgaactcccatttcgttttgctctgtatacctccgtccaaaaatcacagttaagtgccacagtggactgtccacgtgtacacacttgtacacgtggcaaattttcaatggtccacataatattaattttaaaaaataattataaatatttaaagaaaataaaaatcagaaaaaaaaaattaaaaaatattttttttactttttttttctttttctttttaaaaaaataatttaaaaattataacaaaaattatttttttatttttttattttattttcttttcttttttttttctctttcctttttctttttttcttcttcttcactaaaaaacctaccaaactcgacccccttgtgcccccttgtgcgacgtcgaccaacctcggcgaccaccctcgaccccttgtgcaacgtcgaccaaccccggcggccacccccgaccaccaccgacccccttgtgctacatcgaccaactccggcgaccaccacgaagagagagagagagagagagagaagagacgagagagagaggatttgtgcgacgtcgaccaactccgcctccacctccaatctgggtgctttggctccggtggtgagacgagagagagaaagagggctgggaggggttttgcagaaaaagaagaagaaagaagagaagaagaaaaaataa

SEQ ID NO: 160589 - DNA, 508 bp, Cannabis sativa
gaactcatcaagaagatttacattgttgagtttaggagtgttaattgggtcacattcaatgtttttaggtctatccagatatcatccaatcatatattggatgttagattttaccattcgatccgatccaattagtttcggtcatccaatcgatccaacatccattagatattagattagattgattctatccatttaatgtatttcatatatatttattggtgtaatttgagtttatccagtattttagacttagtattttttggattggatcggatccattcaatattttaagtctagtgtgtattggattggactggatccatccaatccaagaaaaaaagagtaaaattttaatattaattttcatatatacagatttgacgtattacaatataaaatataattacaaaaatactaattagttcgattagatgttggatgtatttaatttatagacacaccccatccaccatccgattcagtctaattagatatttaaaaataa

SEQ ID NO: 160590 - DNA, 640 bp, Cannabis sativa
  modified_base (584)..(586): a, c, t, g, unknown or other
tcactttcttcttcaaatttgagcgaaatccatcgagaaactttacgtctttgataaattgacaaaatttaaatttttcatcaggtttgagaacgtaaggggcgtgcggcttcatcaacttaccattatcatcttcataaatccacatccattctcttatttccaatttcttcaaatcatgcctcacgttagttgtgtcttttgatttatcgttgtccaggattgttcctaagtgactgtcacacacattcttctcaacatgcataacatcaacattttgtttcaaagtatttgtacaccaataatcaagctcatagaagatacttttttcctccgattttgatctcttctgcaacttttctgcattttacacctccaactggtcatatttttcatgaaatggagaaattaaaagacccgcaagtttgtttacttgttaaaatatttcctcacaagtaaaatgtaacggtggatgtcttcttttaatttctccatcaaagttggtgtcccttctatattgatgggtactcggcaagaatcttctctgacctacaaaagttgtcttaccaatcactcgtatcgannnagtgtcttcgttacatgttggacaagctttgtatctgttaggttttatgcccta

SEQ ID NO: 160591 - DNA, 518 bp, Cannabis sativa
gtgatgcctcgttttgtactttcttattttgcgagaaccataagtatacagttttatacgcgagttataacttttgattttcctttcccgtcggatagtttttaaattaaaaattatagttttttgatcccttcttcgtcaaaaaggtttgatcaaggtgttataacgattcgacccctctctcgtcaaaaaggtttggttagagagttataacagttcgactccactttcatcaaagaggtttagtcgagaacctttgaattttaaaaaaaaatcgaaatgacgggtttgcattatacaacatatttccagatgaattccagttaatcatacacaaatgccccttaagtaatttttaaagaataaaactttgtaattacttagtataaatgattctctttattcagaacagaagtttaaagtttgcatcagtaatgcgagttacatcatttatttattggtagtagggtcgcaaatgttctacgttccaatagtttttactagcgagccatcaagtc

SEQ ID NO: 160592 - DNA, 513 bp, Cannabis sativa
  modified_base (345)..(346): a, c, t, g, unknown or other
atcatttataggcagctaagtgttttaaggataaaatatattgaagagtagaacggtaaaaattttcctataaaggatcatgattatttggatagaaacaatgaataattaatagcgtatatatttggaataaataaagtgttctatataattaggagtgcaattttaaatttatagtggagtaagaggaattaataagatagagaatttacttggtaaattctggaactacttattgggagcttgattatataagctcatggtccccgcactagttgagataatgttggcttgtagactcagttaattacttttaattaatcaattagaattctaaattagacnntgtcttatttgtgaattttcactaagcaagagcttaatagagaagaaaggagattttaggattatttattaattaagggagtttgataggtctaattaataaataaattaaatgataattttatttaataattaattataattgttaaatagataaaattgatattt

SEQ ID NO: 160593 - DNA, 593 bp, Cannabis sativa
ccctatactataggcgacgggttttaaaccgtcgcctataccttgttataggttacagttttaaaccgtgccttatagtactagttaccattttttatttttttcatcgacgatttttttttcagtcgttacactagaaaaatagggaaaaaatagattttttgcaatttttccactgcattaatttttaaattttttacaaatctgtatagtcacaataattaaactaacgctaatatcatctaaatatatttaaaattctgtataaacacaataattaaattaactctaatatcatctaagtatatttaaaaatctataattcagtaaacactaattataatcatctaaatatatttacaaatctatataataacaataaatcaagatatatacacactgattaacacgacaactgttgtcgctctgctttcgctttcacctaatgaatccactgatcacgcataatatttatctcattatttgtatatggaatggagaacctatcatgttgggtcaacagttgtattgaatcttctacggtcataaaactttcaatgaatttcattacgtagtatccacactatttgtcg

SEQ ID NO: 160594 - DNA, 753 bp, Cannabis sativa
tcttaaaacttcaaaccagcaaaattcctggcactccagattttctcttgccttttctccgacggtgtcaatctcggttgaactgtcgttgtgtgtcagtattggtaactgttcaagcttctcccatttttaagtggtttacatatgcactttattattgtttgatggtgatatatatatgttatactcaaaattcagctattcaccaaaagttgacacgtgtactataaaaggaatataaatcagctcaaagaatataataattaaattgcattattaaatgcagtctaaataactcatttcaattaattaaagttgatagaaatattcaaactcgttgaccacataaacatatgcaagataagaataataactattagcatatgtaattgatgagacaatacgtccatcttgggataaacagagtatataataagagcgtacaagacgagacatcaaggagcttgcagctcattgacccacatatttgtgtatggaggaaataactacattcatccatctcgctttctacacgacgaagtagtcacctcgctagtacattacaatatgaagaacactgctagaagaagtaaatctatacttagcatcttttcctataaacacagtgaaaaagataactcacttctagcgagaaataacattcttagtcagcataatcgtttaaggataaagataaagagtagttgggtaattattagatattatcccattgttacgaaaattataaacact

SEQ ID NO: 160595 - DNA, 504 bp, Cannabis sativa
ctcaccaataggaaggccaagttagcacctgaataaaagaaccccccgacactcaaatgggcatcaagtgacagaccaactccatcacaggggctggtcggccacccctaactagccttatggtcggccaatcttggaactgtaccattgctggccagcttgcccttcataggggcctgggcagccaggaggtgttctgcatggttttctatgcacttctacacgtggacaaccattcttgggctgcgaattaggccctaaaagcccaacaaaatagctgaataatatctagattcaatggtattttggtcttttgtaattaacttataaaatatacaaatatctagagtttcaagttgtaatctaaggtttaggcctcctatataaaggtcataagtctaacctagaaagcctaagctaaaatctaatcttgaaacctgcctccatgctctaagcctaagtctgacaacttctcttcttcacttcctctctcacatgcccata

SEQ ID NO: 160596 - DNA, 570 bp, Cannabis sativa
gagtaatgttgagacctttcatagattattttattcattcactcaataaaccaaacacaaatatacataatgtgcatctattttgaaaaaagagcaaccaacttctttttcttatattttcttgtatctaagcttaaaagtcagtccaaaaactactatcctacaatcataatcaaagttcaaaatcaataaacttatatattgaatacaatattattattttacacttgttcaaacacttgaaagtaaattaaaaaatttaatagctacaaaagttataaaatgaagaatatacatatatataaaaagaaaaataaatatatcacaacctatcataatttgttaaactcttattttatttttatttatatgagtactttaacaaggaaaatagttttaatttttatttatacaaagtcataaattttttttcatgatttatacacactactacaaaataaggctttagcttcccttttttgaacccattttataaaaagggaagctaaagggtctgaaaatacccgcttattgaaaatttacctgtagaggcagtttttttataaaaac

SEQ ID NO: 160597 - DNA, 553 bp, Cannabis sativa
  modified_base (517)..(523): a, c, t, g, unknown or other
ggggcaaaaatcctaattagcctaactaaaaatgtaataacttaatattatttattgatggttgctaaaactcaattttgaggttgtggggatgtagcaaaaaagttttttcgctccattttttagcctcaagcaaaaaaaaaaaaaaaaatcatactaagaaaattaaatattttctatttaatttgataattattaaacaaaattataaaaaagcccccacaaattaaataaattatgatcatttttatttaaagtatatccaaatttttttacaattaaaccctcacatagcaaaatctctgatttcatcattactaaaaaaaataattataaatattaattttaaaaatattaaattattatattttgatcctctagccaataattaaagggatacttgagtttctatatttaattttggctaattaggatctttgccccctgaacttttgacatgtatcaaatcatgtctcctgagcttttaaagtcgttaaaaatgccccatgaactattnnnnnnnttggatttaaggactttttttccaatttta

SEQ ID NO: 160598 - DNA, 568 bp, Cannabis sativa
  modified_base (275)..(285): a, c, t, g, unknown or other
caaatctacctaaacatgcatataataacctctaaaaactacagcaagcatcaacaaaacaacagcaatagatttttcatttttttctttgaaaactaaagttttgagttaaaattccacaactttaaacaacataactatcatgcatcacaagcagatcaattctactcaattaaacaatattaaacctctaaaatcatctcacaaacacagcagcgacaacacctcaagaactagcatgcaaatcatcattttcatccaaaaattccaagaannnnnnnnnnnagctatagaaatcataccaatcaacttgtgaacactaaatcttgttaaaaatagcttgaatcaccaagaaaatatccacttccttactgctcaaggagggccgaaaagagagagggagaaagcttgagttttttttttctaaattttctaatttttctatttgaatgaaatgagagaaaagagcatatattaaaccattatttcagccaaaaggaacataacacaacatccattttccacttactaagtccactaaaggacaaaacataaatgggacaaaatg

SEQ ID NO: 160599 - DNA, 591 bp, Cannabis sativa
gtagtatattcagtaactgacatctcctcagtttgtactaattcagtgaactcttttcgcttagcactacgaacagcttcattataatacttagcgttgaataattccagaaattcttcccaggtcataacagtgacatcccgggtgaggcacactaattcccaccacacgagagcgtcctcctggaactgaaaagtggcgcaggtcacctgatcattaccaaccatccccataaaattcaaaatccgctcaatcacaatgagccactactcggccttcatcacatcaggacctcccagaaacactggaggcgcttgcttacggaacctttcgtataacggctccatacggttgccagcaataggttgttctgctggcaccgctggagctacaacagcctgagcttgttgtggaggcacgacaagatgaccatgctgccttaaccttaaaatttcttcatcttgttggcgtattcaatcttgcatttctgcaaatctttgctcccaattcggagaaggttgtggtgtatttacaggacgaccaccctgagctctgccacggccacggccgtgaccacggggattctgggga

SEQ ID NO: 160600 - DNA, 620 bp, Cannabis sativa
ccactcatttttgtatttattatcctttttttttcttttactattttcattttcaactattaacatagtttggatttgaagtttcattttatctttcagataggcttttttctggatatattagtatattgtgtttcatgaatgaacaaacaagtttgtttagtacgtactatagtacacctttttgtacaaagggatgccatttttaggtaatagttttgattataagcttagtttgatcattcatgacagaaatggtgagattttgtgatttgccaagtgaagttgtggagaaaatcatgttgttggtgcctgcagattctctagtagaatgtaaatctgtgaacaagttttggtattcttgtatttccactttcatcaacgatccaaaatttgtagctaagcacctcctcaataccaaaaatgaatcttccatatcctttctttgtttcaacgacccttccccccatgacgatcatcgcatgatcacatacccattgctcaatatagtccatgttgatggtaatgatgaaggtgctgatgatgatgacactataatccatgatgatgatgatgatgatgacactataatccatgataatgatcatgtcactataatc

SEQ ID NO: 160601 - DNA, 548 bp, Cannabis sativa
  modified_base (502)..(503): a, c, t, g, unknown or other
aaagggacatgacaaagttttgtcggttccacggagactacggccacaacactaatgaatgctacaacctgaagggagaaattgaattcgtaataaagaaaaaaaatccacacctacagaagtatgtcgagaccgaccaaggtcagaacaaccaacatttgctacctccaccagtagatggacacttacaagatattattggaggcccgcacattgctgaagattcaagtaaagctcgggagaggtatgcccggacagcacaacacgaacacgaagagattatcctagccgtggaagaaaggatgcccaaagttccatgagcaggagagccaatcatatcattcaacgatgaagacgctgtcaaagtcaaatttccgcacaacgaaccgctggtcgtgaaagtccagatatgcaataaaatggtggccagaatcatgatcgacaatggagcttcctcaaacatcatgttcaagattacttacgaaaagatgggactccaacnnaaggatctaactccatgcctccagcctgtctatggtttctccgat

SEQ ID NO: 160602 - DNA, 555 bp, Cannabis sativa
agagagagagagagagtgttgatggagaaatagctatttatattatatttatttatttattttattatattatacatatatatatattctcttttgactgagtccttatgtaataccctcagattaagaaatgggttagtaaaaccctaactagttaattgtgtattattgtagaattatattactatataatttaatatatgagaatttatatgagatatgatatgttaagacctcgttggtaagtaggggcattttagtcaattttgacccgagaagggtaaaacagtgaaattaatttataaatgtgcttatagaactatattattatatggtatgcctgtgttgcctttttcatgtgtgttctgataagttggcacggtatagtcacaaccgggtatttcagaccgaactgggttcgaggccaaaatacaattctaggataaattattggcatttgaattatgtgtgattaatctgaaatttatttgagtataattgtgtgtgaaatgtcatatatgcccttaaatgtttattggtatgctttatggccct

SEQ ID NO: 160603 - DNA, 552 bp, Cannabis sativa
actctgattgtgaggaccgggagccatgcgccagacacattctagaggcggagctccccaaaaactttaagatgcccgaaatggcagcatacactggggactcgaaccccagcgatcatttgtcctggtttaaccgagtaaggacggtcatgagggtcagtaatgatgctaaatgcttgtgctttccactaacgttaagcggttctgcggatgaatggttcaaaaagttggaaccaggatctgtggactgctggaacaaatacaagttagcttctggagacagttcgtcgccgcgaggaagattaatcttgaagtaagcgccctgactaacatcaaccaactacccacaaaaacattgaaaaatttcataaagaggttcaaggaagaagcgttgaaaactaagaaagttgatgacggacaacaacttgcacttctccaatctgggatccgtacaggatccccattctggaacaaattacaacaagaaggagctgcaaatctccaagatttccagaagaggttccaaaagtacatcaacttggaagaagccca

SEQ ID NO: 160604 - DNA, 527 bp, Cannabis sativa
ccactcactggagtcctaactgactccgacatacatccaactacaccctcagctcgcaatgctttttccaccatctccccatacgtggtcttttcgtctgtagtgatcattaggtcatgcttgatcttcacatttagtccatctagatacttttcctttttactgaagtcggttggcacgattcctgaggccaaccttgccaaccgatcaaactgcgttgtgtattctgtcacactcatattttccttctgggtcagatgggtgaactcttttctcttggcacttctgacggcctcattgtagtactttgcgttaaagagttcctggaacttttcccaggtcatcgtaatgacatcatgtatctgggacaccatgtcccagcaaaccaacgcatcctcttgaaactgaaaggtggcacacaccaccctgtcattcgcggtggcaccaatgaaattcaatattctcgtaatcactcttagccactgctcggctttcatgacattcagacctcctagaaaaaccggagg

SEQ ID NO: 160605 - DNA, 512 bp, Cannabis sativa
ttcgggtctgcatcccggtaggggtctagttctgggtcttagtcagattctagttcctagactcaaacccagtgtcggactcggacccaagtctggggtatgggtgtgggtttttgtcagggtatggaacccagatccaaacactgactacgggtccgttccaagcaatgagtcaggggtcagggtcctagtctagttccactttgggtccccagtcctggtctgggtcctaggttacagtccgggtttgaggtcgggtctcggtcctaatttttatggccatgtcccgggtctaggtccctcatccaagcccgagtcctaggtcccagtccaagtccaggacccggtcgtgggtcaagtcctagtccgagtttgggtttgggttccgatctcggtttgggtccaaatttgggttcgagtctaggtgcaggctcgggtctgtgtcccgagttccgatctgggtctaggttccggggcccaagtctaggtccccaatgtaggtccaggtccta

SEQ ID NO: 160606 - DNA, 519 bp, Cannabis sativa
aaaaaatcttctactatttgccactcacccttctcagtagtggaggcttatcgccaacaagtgtcattcatctccactttcttcctcgtcccatcccactatcctactatgcagaaaatctagaaaagtaattaagcaaaaaaaaaaaaaagataataataaagaaagaaagaaagaaaaacaaacaaaccctaaaagcctaaatagctacaccttgctccaacattctcctaaatttgttctgccagtccccggtggccgtattttttgatcttagcttctctggttcaaactttactaagatttttttagagcaacccctcttgctaatacaaattggagagttttagtagattataccagagccggggatgttgggctgggagtactagaagaagaacaaagataaaaaatactgaaaagataaaaaaaaaaaaaaagattaattaattagtttttaattaaataatttatttatttatttgtttatttcaaattaattttaactaaaaatataat

SEQ ID NO: 160607 - DNA, 541 bp, Cannabis sativa
agatcctggtaaaataacttccaacagtaattaacctctatgtcagctcttgaaaacttgattcacacttatctgtccatacaaaacgctgattctttttggtcagctcagttaagggtgttgaaattttagagaacccttataaaaatagacgataataaccagccaggccaaagaaacttctaacttctatcacagttttcggtctcggccaatccctgttggactctatcttttctggatcgaccttgatcccatatttgctaacaatgtgcccaaggaaggacacctgagatagccaaaattcgcaattcttcaacttggcatataacttgtgttctcgaagtcgttgcagaaccatccagagatgttgttcatgctcctcttctgattgagagtacacaaggatatcatcgataaatacaataacacatatatcatggaaatccttcaatgccctattcatcagatccatgcaagatgcgggagcattggttagtccaaaggacataaccagatattcataatgtccatacctagt

SEQ ID NO: 160608 - DNA, 662 bp, Cannabis sativa
ctagctgaagcccaataatgagggtggtacttatatttgggccgggaagctagattgggctggaagcccatgaagtattattggactaatcatccatttctattcggcattatttcaaaaaaaattataaaaatactactgtacaaaaattttaaatatttttactattttaagattttatttaaataaaatacagtttttggatatattttcatgttaatatttttattattgttaactttttattatttgcatattattttttatattattttgatattattttcatgtaattttttgtaaaaatatatataaaaaacttataaatttttatgaaaaaatgaagtctatctaatttcattcaatttgactatttgagtgattgtttatgtactaaactatgttccccagactttgatatatatcaaatcatgtctctcgaactttaaaatatactaaatcaagcctcctgaattttcatctatgttagactttttacaaaaattaggccaaaatccttaaatccaaccatctaaaagttcagggacaaaattcctaattaggcttataaaaatataacttagatataattaagtcaaaaattaaagaggaaattacactccataccctttttatattgtcctcttttatttttaaagtct

SEQ ID NO: 160609 - DNA, 529 bp, Cannabis sativa
  modified_base (298)..(311): a, c, t, g, unknown or other
ttaaaaaacaaaatatcttagggatacacatccccgcgcgaatggggggacatggttcctccatgcgcggctcattcagacaaaatcccttcagacaggggcgtgtctgaagcttgctccccatctgaccaagatcttttgcccatggaggctgcatgcagctttctgtctcggccaaatgcccacatccacgcgctcaggggtatgcattgcatacccctatgccccaattttgtttttgtgataacttttgattcaaaaattatttctcattaaaacaaaattcaaattttggtannnnnnnnnnnnnnatctaaattttcaattaaaaatctcattaccagaataaaattaatttttattattttttaattaattaaaattagttttagatattaatagcctttgaatttaaaaatttgatttttcaacaaactaggcttatggttatttttgaaatttttgattatttttgtctattttatttattttaattataagatgagatattacttattttattattaaa

SEQ ID NO: 160610 - DNA, 543 bp, Cannabis sativa
cgctctctccaatgcttgggaaagataagccgatttgcaagagaaacgcccattactttccaaagtccacaaccagctatccttgccactaccttgaggaatttcatccttgacaatagccgaaatggtctcacggtcaaagagcctatgaagtttccccatatcccacccacccgtgggtgttatgagatcagcgatgaaattcacagatatttatggcgtcatatttaatatctgacacattattagcaacgggtactatgccggtattaccttttaaataaaaaaattaaatattatatataatgtttataaaatataaatattatatatattgtttataaaatatataatttataatagtattattaatatatacaaaaatatttaaaattataatattaataataattttatattaaattaaaaataaattaacaataaattaattattacgcacataattaattgataattgtctaaactaccaaataaataatggagaattatctcatatactatattttttacttttttttttca

SEQ ID NO: 160611 - DNA, 535 bp, Cannabis sativa
  modified_base (99)..(110): a, c, t, g, unknown or other
  modified_base (508)..(510): a, c, t, g, unknown or other
taatttttgaccaacttaaattagaatatttttcctagtattaaattagaattagtaattaagttttttttacacttaattatttaattcttatatttnnnnnnnnnnnntaaattaaaaattaaatatttaagttaattttattatagatacttaaatattagttatttttaaaatatttaattgaatagaaaattattttaagttggacattttaatttcagaacaacttaaattaagaataatttttaaaatgtattttattttattttattaattatttttttaataaattctaaattgcatttttcttaaatgtagataattttgaatttttttttttgaaaaatagattaaagttgaaaataaattattttaattaattttaaatcaacttaaatcaaataaatttttcattaatgattaattaaaataaatggactaaagtacattatacttagaaaattaaaattagttagtgaaagtctagatagttattttctgtttnnntgaagtatttttctagttatattta

SEQ ID NO: 160612 - DNA, 551 bp, Cannabis sativa
  modified_base (308)..(308): a, c, t, g, unknown or other
atctcacaatgaaggtccctactcccgctggagtaggttttgtgcgagcagtccagtcagactcgcgagaatgctataatgcagctatcaagctcgcagagaagaaatcggttaatgtcatctatcttttagaagcactgcccttttgccaggaggtccttaggatagaagaagtaccgtataaagacgaaccagatttggatcctaggatcctcgattattccgcaaccggccaagtcgcggaagacactattgaggtacctattgatcccgtagataatagtaaagttttgaaaattggttctaantaacttttcagcagcgagaaaaactaacaatagttctcaaacaaaatcttgatgttttcgcttggaaacattcagatatggtcggaatatctccgaaggtcaagtgtcatcgcttgaacattaacccaaaggtgagaggtgtccgacataagcgccggaaaatggaccccgcaaggtaccaagcactgaaggaagaagtcgaccgcctcttggcatgcagcttcatacgggagtcgttctacc

SEQ ID NO: 160613 - DNA, 543 bp, Cannabis sativa
tatactgcagtatgaaacttaaaaaaaaacacagtaaaaaagtaaaaaattccgtctgacagtatttttgtaaaaaaatagcaaaagttagtatactatgtaaatttcccttttattattttacaaaatagaagatccaattagtaacttaacttttacaaaatacagaaccctctgttttgttaaatgacaaaatgaaccttatattttctaaaatggtaaaaataagaccccaaactgattttttgtcaaaataagatttaataataatctgatctagagatgttatgacaaaactggttacattttctgtatttgttcgtgttagaatttgtcttaaagtttgttatattaaaatataaaattgttgaaaattgagttcaggaccctatttatactattttagaaaacataagatttatttagtcattgatgtattactttttcataaataatatattatttttaattaaaataattatatgctaagtcataatcaatggacatgtgtatcaaagttataataaattaaaaaaactaaat

SEQ ID NO: 160614 - DNA, 514 bp, Cannabis sativa
aaaagaagaaaaaaaaaaaacaaaaaggaaaaagaaaacaaaaagaaagagtaaaataaatttaaaaatattttttcattgtttaatttttgataatttataatttatttttataatatttaagtaattaatgttatatggatcactaagtaaaaatatgtcacgtgtacacttgtttatacgtagacaatctaatgtagtacttaactgagatttttagatgaaagtatgaaaagcaaaacgaaacctgggttcagtaggtttttaccgtcaaaattttaatttttatggttaagtgttaaaaaatttaaaatttaagtggtttaactgccaatattccttctggttgttgaaccgtagacaaatactatcgtgggaccacaactaaacttaattattcttaatgagggaaaataacggctaaactctcttaactatcacttaacttgcacttaaccctctatgctcaaattttgaaggtaaaaccctccaaactattgaattgcttgcaaat

SEQ ID NO: 160615 - DNA, 587 bp, Cannabis sativa
gatcattagacaaggatattactagccaacgatcaataaggacaccccacgagtttgtcaggaaatgtgataagtgtcaaaggttttcacatatacctcgggtgccgccaacaggactaagaatgatgacctcgccctacccattttctatatggtgaattgacttaattcgggcattacccactgggcgaggaggagccaagtatccggcaatagcactcgacttcttcactaactggacgaaagcccagccccttatttccataacctgtaagacagtccttgactttgtcatcaagaacattgtttgtaggtttggaattcacatgaagacagtatccgataatggaacccactttgatggcaacttgttcactgaattatatgagaggaacaaaattatcaaaagcttcgcgtcagtatccaggcctcaggcgaatgggtaagtggaagttgttaataaaaccttaaaggatactatcaagaagaagttagaagctcccaaaggcaggtggatcgacgagctacctcaagtactctgggctcacagaactaccgagaagacggcaaccggacaaacaccattt

SEQ ID NO: 160616 - DNA, 519 bp, Cannabis sativa
cccggatatagccagggacaagccctggcccccgcatcgtcccattttggaaatccctcagggataaatggacaagccccctcgcacttcacttcgacaaccagtctagccggtccttcccagggctcgagaagtaaaaggtcctccaaaggcagcacttcgacagagaaaaagcgacaaaaaagggggtatactccccaatatacccagtacactgagttaacggactcccaagaacgtgtgtactttgctactaggtaaaatacgcactaccggagaccacctcctttgtacaaaggcagctcccggagggacccccaacaagagatgcgagtaccataacgacattgggcacatcaccaatgaatgcaaaaatctcaaagacgagatcaaaaacttaatccgatcgggacacctctatgagtggattaacggttgcctcacctcaacctaggtcaggtggctggaactttgccacaagtagcaccagggggtgcagcaggggtattggctccagtt

SEQ ID NO: 160617 - DNA, 511 bp, Cannabis sativa
gtagttttttgtgtgcctactgccgttttccttttggagttagaaaacaatttcattacttaaggatcgtcaagagtgtgaagtgactttcatactcttgtctttttcctccctttttccgtttctctttttttattgccttttggatatttgcacctgatgtttgcttaggagaatctctggatttcttatctttggcagacatccggagagggcctctttccagcggttagggaacccccattcgcctcgtttgttttagggtttggtttgggggctaactgcagattcctttttcagatgagtgaggttcttcgcgaccttcacgatcacagattcttctgctttaaccaagagattttagaacttcatcaaacccagacaatgtcttcccctaattcaactggagcaaaatcttcaaacaagggtcccaagaaattggccacctttgaggaagtgatgaagggctcggtggtccacgagaaatacacctgccggtccactggctggg

SEQ ID NO: 160618 - DNA, 558 bp, Cannabis sativa
tatgtgtttagttcatcgttttagaagttcaatattaggttgttaaatcaacatacttgcaaatagatctaagatcctggataaatataataccaacactcatgccttgggaaagaaagtggtttgcttaatgttgttgctcaacatgagagtggtaatggaagcttggccgtaccctcttgtgatgaaggaaaagctttgtcccaattttttaaagctcaagaggagttactttatgacttgaaacactttggaaagctagatttgtatgagatcaagaggttgggaggtgacataggtgtgttgactacctcggaaactaatggaagaacaactccttttaagaaaagaaaatttgaaggctccgcttctttatgcactagaccccacaagactattaggactcatcctgatgtggttcgagacttttcatgggatactaaagagatggaccgggaatctaaggtgatttatgacgatccatccgaagaagcgtctgactctatgagctgcaatgaaggaattatgaagaatccgttgataggttcctttgtcatt

SEQ ID NO: 160619 - DNA, 529 bp, Cannabis sativa
  modified_base (60)..(69): a, c, t, g, unknown or other
taaaccaagaccaagacctagatacagatctaaaccaagacccaaaaaccagggccgaannnnnnnnnnaagaacttgactcagacctaggacctgaagcctgaaccaggctgggactaggacccaaactcggaccagaacccaaaccaagatttggactcgaactagacccgtacccaaacccaaaaacgaacttggacccggactgggacctaggaaccgaacatagatgggggacccagacctgggaatggggcccccaaactaggaccagaacttgggcctcagaacttggatagggatctgagacccgaccccagacccaaacctatacctaggaccaacctaaagacctgggattcggaactcgatgcttggacctgaccagtagtcggtgtctagatctaggacttagcaggaacccgaacccaaactcgaactcaaactaggacccggacacataccaagacccagacccacactcgggaacaaaaacctatacatgaattagaacgggaccaagatcttt

SEQ ID NO: 160620 - DNA, 555 bp, Cannabis sativa
  modified_base (26)..(26): a, c, t, g, unknown or other
ttatcagaaaatcaattatttatttntttccttaaatagaaaatcattttcttaattagaaaataacttccatatataaaatattctaataaaaaattcctaattagtctgtatattatttcctttacaatatattaattatcagtattcttagaggttataataaggaataaaatattaaaaaaaaattatagaggactttatagaaatatatatataaaaaatcatcatactattttttatctaacaaaaaaagcacaataagagatttctttagttatagtgaaaaaagaatattagaactgaattctcacacataataaagatttataaaaaaaaaataataaaataaatctatagaatacttttatatgacttcaaaatcgttattgttactgtaatttacttgtaattaccattacattcattcaaagttggtgtcatcaccatgtctcatcattacggtacattaaaatttatattaggtatgtgaaaattatttagaatttttactgaatttaaattatatatcgtaaagatttttaattaatattt

SEQ ID NO: 160621 - DNA, 522 bp, Cannabis sativa
ttgagaatcaaggtagttctatgatcctaaccttgttttaattgctgaaatattgtggaaaaaggcatgtttgggtttgtgaatttcatgttcttgatgaattggataataggttgcatgcttagtaaattggatgtttaagcttgttaatctcttgtgttgtgttggattgagcttagagaataattcttggatgcttgtcaagcttgagtttgattatttacttgttgtttgtggttggttgctgctggaaaatttttatgagtgttgggttttagctcaaagttcttgagcttgagtgtagcaagcttgaagcatgagtttatgtgtcatgcaatttgaaatcttgggtttattgatggaaattgatgcttgaaatatgttagttatgcatctagtaatttgctagtgatcctaattgctaatttgaatgtttggttgagaaattggagtgaaaagtttggtttggaagctgaaaattcgaagaggggctgctggttttctaggttctgcacccagatg

SEQ ID NO: 160622 - DNA, 562 bp, Cannabis sativa
  modified_base (292)..(294): a, c, t, g, unknown or other
  modified_base (323)..(323): a, c, t, g, unknown or other
gttcgccttgtcacttacattgttgcttgccaatcgagctaacgcgtctgcagttgtgttttcttcccttggaatttgtctaagaccgttttgaattgtggaagcagatcatgtattttgcttagatatgttatcatcttttctcctcgagccttgtattctccggatacgtgatttaccaccagctatgaatcgctgtagattttaatgtgttcgactttcatctcccgggctagttttaatccagcaattagggcttcatactcggcctcgttattagatgctttgaatnnnaacctgactgcagcgtgcaggtgttgccncccaggcgtgacaagggcaattcctgcaccagacagctgatctgtaccagctctgggttgctttctggtatgctttctttcttgcctgtgcattctaccacaaaccctgctaaggcttggcctttgatttctgttcggggttagaaagtaatttcatattggcccaactccaccgcccacttgagtagccgtgcagaggcatctggcttttgcagtatctggcgtaatggttggtcagt

SEQ ID NO: 160623 - DNA, 501 bp, Cannabis sativa
  modified_base (52)..(67): a, c, t, g, unknown or other
ctcgatctccctatcaggtggtaaccctggtaaatcctctggaaacacatcnnnnnnnnnnnnnnnnactgatatccaagggaactggtctaaatccatagaatcatcctcgatcgcaaatagattcccataacactctaagtttctctttccacctaagcatgcccttaagatatgattttgtctcactgcgctgatgttggctcgataaataatgaaatcaccactaggggttaaaagagtcactcttttgtgtgaacaatccataattgcttggtatttagaaaaccaatcataccaagaattacattaaactgatccataggcaacactattaagtttctagacaacttgtgtccctccatcacaatacaaacttacctacatatggtggatacctcaccgtgtcccccccataggtacactcaaatatgatgcaagactaaaagttttccaactcaaacccaacatactagcaaacatcaatgatataaaggaatg

SEQ ID NO: 160624 - DNA, 530 bp, Cannabis sativa
aaagaagtaaatcacaaagtacttaccgcggccaaggcgtggctgaggtcctgaacttggaagacggaattcaaggatgcacaagcagcgtatagcttaggcacgcaccgagtcagctgggagacgtactcaccggtcatctcggaggcaaaaggggccaaggtgggcccgaggaaacggttgaaccagtccgtcagggggtccaggttcagatcccacggattccggaagttctcctcgttaagagagttttgcacctcctctcgcaaaaccctcctcaaggcctccacctcagcgtgcccccgggtgtacttgtcaagggcataattatacttggctatccgaagctcttgcctctcctcatctccagggaccggagtcagcacaatgccatgaggcactgtatactcctctgcctcggggggatatcggagtcatgactcggggccggagtgtccaccctccgcgggcgtttagaagactcctcagctaccatcttgcctttacgcttgcgcacaagagcaacctct

SEQ ID NO: 160625 - DNA, 585 bp, Cannabis sativa
tacaaatgtacacaagtcaaaatacaatgcaacatacaagtaataaaaaataattaaagaagaaaaacatatacaatagatattatatattattaaagcaataaagcattattaagaatttaaacttttatatgtaataacttgtgattaatttttgttgttttataaaaaaaattgagatattatatttcttcatttgttttgtaatacaatatttttatttttgtatgtatatcaagtttgtgcttataaaattcaaaatacaaattttaagattttttttacaagaattatcttacttgattacagtgacggacctagaatttttgatcagtgggggcttaattattataaatatattttttatttactttacattaaaattataattattttgtggggactttttactattttgttgtataattatttaattaaatagaagatatttaatttttgagtaatttgcgacataaatacgtaagtttatttaatggttgcagtttaatacctaaattaaaattttggcggtaaaaatacattgggtaaatggcagcaaaacccccaatactttggttttggttt

SEQ ID NO: 160626 - DNA, 556 bp, Cannabis sativa
gattctttagttttatagttttatagcttttattattattaaactaacaaatttcaaaattatttctcccacattatttttcttctttttttttaataccgaaaataacggatgatctggttacaattatttatttaaaaaaatatttattgttcagaggtccaaatatattcttggtttatctatttatttttaatagattgcaatacccattttttatatttttgtttttaaaacttgagatatgtactttcttcaaaatttgaggatcccctataatagtcttaaattgctttttattctttgaataataaaaattgtattgatcgctcttagaagatggtctttttcaggttcacacttcattcatctgctccttccattcatacggatattgatttagatataatttttgcttaggctagatttgttttaatactaccaatatcaattttcctaatattttgaaataatgtcgaatgagccttcgtgttttatgctggtattttatgcaattaacattttctcttttgttttctttctctgggtttctctt

SEQ ID NO: 160627 - DNA, 519 bp, Cannabis sativa
  modified_base (462)..(462): a, c, t, g, unknown or other
agtaatatacttttcttctatttttctctatctcaatatcaatatatttatctatttagtattaaataaaaatagtcatgctttttctatgttaatatgattaggacaaatatatcgatattataatttgatgattagtcttttattgcattattgccaataaggtatattgtcatttttagatttttcataagattattttctatgatcctaacgtgagaattattattactcgaatacattttattatatatgttattcatgttttatcttccaattcaatttttgggaagtgaacaatttaactgtgttatatgtgggaatcaaaatctaaataaatgagccaaacatataggtgattcttgaaaccttatcacttttgttattgaatttttcaaccaattttattttttaatttttatcaacgatttatttactttttgcgcttaaagttctactaancactttttgataagatatctctctgtggatacgaccgcccatactacactacaacaa

SEQ ID NO: 160628 - DNA, 527 bp, Cannabis sativa
tttaacgtacttaactacaatccttatgggatcgacctcactcttgatgagtttactacttgtcacgtacgtgcacttgcgtgtgcaaaatatcacaacagtaatggtttggaaacatcaattgccactcgaatccttagaaaaggaccccaaccttcattaagagacttttcatgaacatcaacgaaagttccaatgagatttccaataacacgagcaagggtttcagatttacttaggaaaagtaatctgaaaacttgaatccaaaaggtggtaatggtgtaggattccattggagcattttgcagaacacttggagagcaaagaatcatatgttggttatgaaaatgccatggttctttagaaaatactctcctaagatctccttcatagccaaatgtgaccatatacgattcaaattcatagttcgaaatagatatagcaaactttcctttccagtttgtagtgatgaaattgtgcaattgctttgggttatatcctctacgtgagaagattttgtagataag

SEQ ID NO: 160629 - DNA, 508 bp, Cannabis sativa
  modified_base (30)..(31): a, c, t, g, unknown or other
tgaagaatcaagcgtctttgagggaagctnnacggagatgtacccttgatttgaggggaactccgaaatcaatctctttgtcttttgcatatatttttttgcactttgttttcgggtctactctcatcaacagacaaagattattttatctttattattatttttttttggttgtctattttgtgtaggttcttgtgtgaaagctcttgcagagcttgaaagagaagaggaagaaacacaaggtgattcggctgggtttgtgttgcagcaagggaaaggaagaaacacaaggtgtttcggctggtgttgatctgcagcaagagaaaaggaaggagaagaagaagctcggctgggtttggtttgctgttcaaagaaaagagaagaaggagagaaaggagaccgactgtttgttttgaagagaggaatttttgttgctagggttttctaagcaaaaaggaaaagaaagattatatactgccttgttaatggcagtagggttttgaataaa

SEQ ID NO: 160630 - DNA, 654 bp, Cannabis sativa
gctcgaggcatggattacatgttaggagattgtcacaatattttggtttaaaaatattttgttaaagattatgactcgaatacttttgtaaaagttaatgattaaaagtttatgaattaatcaagtgtttttgttttaaaataatgagatttcatgccttggttattttcaataaattagtttattgtctttattataaatagttttaaacggactagggagtgatgtctcgggaactcggggcgtgttaggttatttttagtatgaattttagattaattttagtatatttttaatttaattttactcgtgtttggagcaattttacgcttgttatctttttttgctccaaacacgagtaaaattaatttaaaaatatactaaaattaatactaaaaataacctaacacgcccagagttcccgagacatcactccctagtccgtttaaaactatttataataaagacaataaattaatttattgaaaataactaaagcatgaaatctcattattttaaaacaaaaacacttgattcattcataaacttttaatcattaaattttataaaagtattcgagtcataatctttaacaatatatttttaaaccaaaacattgtgacaatctcctaacatgtaatccatgcctcgagc

SEQ ID NO: 160631 - DNA, 578 bp, Cannabis sativa
gaagtttcataattttctgaatttttggaattattgtgaattatttagtttatttcataaattaattgtgaaaaatacttaggatgctcaaaaaaatctagatttattttatatgatgggctatgatatataaactgttataaaattgatagattgaattttcaggcgattatgtatttttgatgaattattgatgttatttcttattttaattatgaaaatacctaagttacttagaaaatttaaagtaatatatttgtggcttagtatagaatataaactgtgttagaatagttagattcagtttttaatcattttttttatttttcatgaatttacttagttaatgctcaaataaattatgaaaaaatagttaagtgttgttaaaatagtaaaatttatttttgtaatgccatttactgtctatgatataaaataaaataggttttataatttattggttgatgtaggtatttattgtacgtatttgtgattaattaactatttatttggattttaattagaataaatagtattttagtaaaattttacgtaaaaagtgttgggttttgtgccct

SEQ ID NO: 160632 - DNA, 605 bp, Cannabis sativa
aaatcggttggcacaattcccgaagccaaccttgccaagcgatcaaactgtgtcgtgtattcagtaacactcatgttctttttttgagttagctgtgtgaattcttttcttttggcacttctaactgcctcattatagtacttggcattgaatagctcctagaacatttcccaggtcatagttgtcacatcatgaatcatgaacaccttgtcccaccagactagagcgtcttcttgaaattggaaagtggcacagaccactctatcaataccagtgactctcataaaattcaaaattctagtgatcactgttagccattgctcagctttcataacatctgggcctcctaggaaaactagaggtgcctgcttacggaacctttcatacaggggttccatctggtttacacccggttcggcctgcacagcaggggcaggagctactggtatttctggagcagggattgcaggagcaccctgctgtcttaactgccgaatcacttcatattgctcattaattctagcttgtatttttgcaaacctgttttcccaatttagggcatcctaagcagcttgggcagtctgtggcgggttaacatcaccccg

SEQ ID NO: 160633 - DNA, 500 bp, Cannabis sativa
agagtggcctgtgccacattccagttccatgaagacgctctagtatggtcggacatggtgtccctgacccaagatgttactacgatgtcctagtaaaagttctaggaaatttttaatgcaaaataatataatgaagcagtcagaagtgggaaaagaaaggaatttgctcaactgactcagattgaaaatatgagtgttactgaatacacaaaacagttcgatcgattagctaggttggcctcaggaatagtgccaaccgatttcagtaagaaagagaaaaacctggatggattgaattcgaaaataagacatgacctaatgatgactactgatgacaacaccacctatgctgatatggtgggaaaggcactgcgagctgagggcgcggtggagtgcacccaggaaacccgagggacttaggttgctggtggggctcatactcctcttacctcaggctttagtatgggaggtagtggctcccccccccacccaaaaaaaaa

SEQ ID NO: 160634 - DNA, 535 bp, Cannabis sativa
  modified_base (48)..(49): a, c, t, g, unknown or other
  modified_base (506)..(508): a, c, t, g, unknown or other
tcattgggttaagatgaatattttaaactttaatatttatgttacaannaggataaaattattcaacctagtgtatacataaaaaaaatgatacatacatatgtgtgtgtaatatagtgctttaaaaaaaactaaggtagtaggggtatcattgtgtgagtagcaaagttaacaatagtgattgattctcacattagactttttggtaaaagtagtagagtaattatagactacatgttagtgatgtgttttggttaattcacattttaaggttatcacaatataatttatttatgtatgaaaacgtaaaatatgtatttgtatatattttgtggatataaattatattttatgtatgaaagaagtctcaaatttggaatatctttcaagaaatgggttggtttgggttatgtagagttaaaatgtgtccaaccactactacaaatatcagaattcgcgacggtccgaaaaacgatttttttcggggaccgtcgctaaaaaaattnnntaactatttaaaaccgtcgggaaaaat

SEQ ID NO: 160635 - DNA, 851 bp, Cannabis sativa
  modified_base (657)..(659): a, c, t, g, unknown or other
gatctttgaacgggaccgagacctagacccaggcccgaacccggaaccagagccagcctcgaaccctactcgagaccaaaacccgaacttgaacctcgcccgaacccgtacctcgtgacttgaaactagaactgaaactagaagcggatttggacccaggaataggacttggaccaagacatggacccaacccaaaactgtaaccagaccaggatccagactcggacacaaacccagcctgggattgggtccgaaacctgaatccaaacccgaaccgggactcgggacctaaacccagacctaaactcagacccaaacattgaacatgactcgggacccagaactgggatcgagaccgagaattggaccccaatctcggtcctagtcttgttcaagggtcttcgtctgaaattggaagtagacggggacccgaaaatgcgaccaaaaccaggacttggacttgtaaccgtaaccgtacatggatgtagacccagaaccataaccgaaccagcacctagactctagctcaaacctagacctgaaccggaaccaacaactagatcccaacccaaacatggactcgggacccgaacttagacccaaacatggaaccagacttgggacacaaactggggtcaggacctagaaccgcacccnnntctcgatcccgaatccaaactcaaacctgggacctaaaccagaaccagacttggacccgtgacagggatctagatctggactcgagatccgggaaatagggcttggaacagacccgtagtaggtatctagatgtgggactcagactagatttcaaacccggaccaggacctaaacccgaacccagacctaga

SEQ ID NO: 160636 - DNA, 810 bp, Cannabis sativa
tgaatctccatttatcttatcgattatcgattatcccaatttatcctataatttatagtttcaagaatcctaatgtaacctattaatttctctcgagcgatgatagatttaacttagaataactaacacaatatctctatttaatgttaattaaataagcactcataaagcaatatgattctctttaaatgaaactcatagaattagtggaatctctcaatctcacacttttcctatgttatgcaattctaagtccgattttagattacctctctcaagtataaaacctaaaatttctatactaattaatggtgatcaagcattaagaagatgataattagcacaaaattgcataaacaaataacaagaataaatatgggaataatctaaaaacttaaatttataatctaaaatagttccatcaacactctaaaatgagtgtttagttcataatcacaaatataatataaccacaataatcatgttcataattaaataaataatcaaaagactaaagaagaagaagaagaaaagaactctaatgatgatagttgatgatgattgtgtgaagtctcttctctcttgctcttcaatgtgtaatctaatctcaaagttgcttgtttctctctctctatagtcgtaatataatttacatgcttctttatgtaggccaacaaagatagatcaatcctcttagaattaggattttttttaaaaaaaaatgataagtgatgcattatagtgcctataccccgcgctatagcgcctaagcgaaaaaatctcgaacccgtgctgaaattatcttttttt

SEQ ID NO: 160637 - DNA, 533 bp, Cannabis sativa
ctagagtgattttgcttgtaatttcaaacacatttttatattgtgattgaggtgaggttggcaccggtattgtaaacaacccggttatagtgagattgtcacaacaacaatttgagaaagagttaatagttctcgggcggagcaaaactattgtaagaggtttggaaacaccttggtgaaaatttcctggttgtaagggttagtcaagcccgttaacctggctcgatattagaactcaaagttaggtccatagctttgaagaccatttaaaaattgagagtttgcaatttctaacccttaaactctttactatacaagtttgattatttgttatactttattgcttgccatattacttgtatttatttgattaagtgtttaattgtatagttttgtgaagttttaatttaccgaaattaacttaaatttccaattcacccccctcttggaaaatttatcttgggctaacaattggtatttgattagatttcacaatctagagcatggcgtttctaagtaattcacaaaataac

SEQ ID NO: 160638 - DNA, 527 bp, Cannabis sativa
cgtgaaaaaaaaaagtttttttttaggcctggagcccagtggtcgcgacctgagggttcctgggtcgcgacctatttttcaagtcgcgaccgtggtcgtgaccttgacttttacaaaaactcacgaaatttttttggttccagtggtcgcgactagcctttagccaagtcgcgacctattttccaagtcgcgaccccagtcgcgacttccttatttttcagagaaggcttaaattcgatcgtaagctagttgcgactagccctaggccaagtcgcgactggctcacgaaattttctataaaatccaattttccccctcattcaaccctacatcaaaaattcaaaattcaaaaaccctctcagccgactctaccccttttcctctcaaaaattcaaaacttcttcaccaaacttcaaattctttcatctccaatccaatttcctaatcccaacccatccttaaacctaatttctttcatcaatctacactttccatcaaaaaaacaacccaaatactcatcaatttca

SEQ ID NO: 160639 - DNA, 1072 bp, Cannabis sativa
atttaaatttaaaatattataaatgtttttaaccatatttttaactttattgtatcatttattttatattgtaaattgaattcgtacacgccatatttttagtaaagtttggaaataaaaaacctttatatcaaatttacaaattcaacttatatatagacacactcaaatttagttatgtgagttttggtttagaataagtaaattacaatatatgcattatcagatacgtcacctaattaaaaaaattaaaaattttaaaaaaatacatatatataatcacattttaatgacacactaatgtagcaatagctaattttttttttcttaaagatcaaaatctcaaactccatttcaaaaattaaaaaaaaaaatgcattacctaattaaaataattaaacatacatgtattgcacttaacatcaccttattgaacctaattaaaaaaaaattaattttgcgtgcattgcacataacatcaacctagtcttaataaaatatatacatatagtttataaatttatttatgtagaattaataattttattctaaattagaatatgtgtatatttacttaaaagtaattttattattatgatagtagtattaaggattgtttattgttatttttgttacattgatattaatatattttagtgttttgaattttttttagtataaatttatttaattataacctctcaattaaatataatttacttgatccaaatttattcttaaatagatgttccattgcatttcattatttaaataagtagtttaatttttcataaaaaataatgtatgtattttaattaatatgggatatagaactatttgatgaactagtcaaaaaaaaaaattatttgaggaatatattattatgtatataaacataaatctattcaacaaaacaatgaacacaagttttgatgaatccaccatgagtgcaaaagaggtcatgagaaaagtcatgttaaaactgtggaacatccaaaatatctcaaaaattctatcttcaaattttagtgagctaataacgatttaccttttatattattttaattaattt

SEQ ID NO: 160640 - DNA, 548 bp, Cannabis sativa
  modified_base (31)..(37): a, c, t, g, unknown or other
  modified_base (63)..(69): a, c, t, g, unknown or other
tcactttctggggacttaaactagaaactannnnnnnaaactagaaactaaaagtttccctannnnnnnaaagcatggcaataccctaaacaatataaaaacaggaacgactagggttcccaaaaatcccccaactggtagaccggttctgcaaccagaattccgattctgggaatcctagaacaccatccggaattctggttgcacaaccgaaattccgattcctcgcaggcaacacacaaaattccataactcattcaaatcaaacccaactcataccaaaccttcatgacctgttctatataccccaaagaacatttctaaagcatcaaaacaacccaggaaacacagatactaaaaatgccatcaaagctccaagctttgagttcaaaagtcaaacttggttaaatctaataaacatgcactaaatcgtgttcaaatcatgatgcttcaccataatataaccccagaaaacaacactaagcaataactacaactacagcaacgaaaatcaacatattacattgaaaattatagttttgagctaa

SEQ ID NO: 160641 - DNA, 792 bp, Cannabis sativa
taatcctgggaatggatttcttgtctaagtacggggcaatgattgattacaagcgaaagatggtagtgtttgaacccgatagttccaatctagcggtgtttgtgggtaaggtacaaggatcgcgcatacccagaataacatttttaaaagctagagatctaatgcgcagacgtttcctaggattcctagttactacaatggatactagccaacctatgtcatctagacctgaaaatacgagattggagtgtaaatttctagatgtattttcggaggatttacttggattaccaccttctcgagagattgaatttgttatagagttagttctgggagcagaattagtatcaaaggcaccgtatcgaatggctctagtggaataaaaggagttaaagattcaactccaagagttacttaatttgggatttatcagactgagttattcccctggggctgctccagtgttatccgtgaaaaagaaagatgagtcgcttcgaatgtgtatcattatcgagaactgaataagctcaatatcaagaacaaatatcctctaccccgaattgacgacctatttgacaagttgaagggtaaaagattgaccttctctcaggttaccatcaactaagaattcgagaagaggatatcctgaagactacattccgtactaggtatggacattacaagtttctggtgatgtcttttgtactcaccaatgccccagctgcattcatggatcttatgaactgtgtattcaaggatttcccagataagcatgtgatagtgttcattgac

SEQ ID NO: 160642 - DNA, 534 bp, Cannabis sativa
tgaaatctactaaattatatccctcaaattttgacatatatatcaaatcatgtctcttaaactttcacttatgttagactttttttactaaaatttgacaaatctttaaattcaaccatctcaatagttcggtgaggtttttaacactttaaaagtttaaggacatgatttattacttgtaaaattttgggaggcaaaaattctaattagtcctataatagtacaataaactgagattaacgactgaacctctgtgaataaacttactttcttatacataccacgaaatgtagtaaatttcacatatgtttgtttttttaataggtttatatatgaaattcaagttaattggaggccttggtcaaaaatttaagggattatttcataaatacataaaaaaaaataaaaaaattaaaaaattacagttgtacagattttaaatatttttacgatttttataattttatttataaaaaatacagtcttttgatgtatttttatgttgtactcttattaattttttgttgttgtttt

SEQ ID NO: 160643 - DNA, 545 bp, Cannabis sativa
tatgtcggtccaaccatttcaaattgtaaatcatgctacaggcactccgagtcaatcacaccaacgagtgatgctttttaacttgagtataactcaactcaaaaagcaagggacaaactgtagtggccaaaaattgctctaagcccaacgaaaaggcccaacgatcgaagtacttacaaagtccatttataagtcagaaacaaggaacccgtaagtccgatggctcatatgggccacgcccaatccatgtcttttgggtcatacccatattcgaatgtccaacccacaataaagcttgatcttaaagtgtaatattagggttgacacgtggaggaggaagaacgttaagtttcctagctaacccacgaaaatagcaatcttcccttgcatagcggagcgaaaatattaaccctctaagtgatacgctaatgggaggatgctcatccaggaacgaacttaaaagatggcgctcatccatggagaagtggaggaagactgtttctctagggacggaccacgtttcaagaggtagccgttttcctaag

SEQ ID NO: 160644 - DNA, 553 bp, Cannabis sativa
cctcgttgtttgatgcatcaaattaaaatctcaaagcatagtgaaacttaaaggcttccagtgaaattaatattacccttgcacccgagccctactcgttggatgcaccatccacgtataacttccaagtgtccgcatctcggtgaacatgcaaaatttcttctggagttattccttctattaagaagtctaccaaggcttggcccttgatggatgtttgagggtggtatgttatttcgaactgccccagttcaatcaaccattttatcaatcttccaaaagcatctggtttttataaaacttgtctcaagggttgattagttaacacttttatgaggtgtgccaggaagtaaggtcgtagcttgcaagacgcatggattaggcacaaagtgagtttttaaagagggggatacctcgactctgcccccagtaaccttttacttacatagtaaataggttgcaggtgcttaccttcttctcagattatagccgcaccaatcgcatcttccgagatagccagatagaggagtaacgtttctccagttattagttt

SEQ ID NO: 160645 - DNA, 547 bp, Cannabis sativa
tggctagatgggcgtttgctcatcaggtgtttgggactatcccggtgtcctcattacctgacaatattttatgtaacggccgagaggtctaacgtttgtttttatttatgatatgaacgcttcttttcaaaaaaaaaaaacatttaaaaatggagcttttcaaaaatatacgtaaaatgtaaataatctcgaaattctgttttttcttattttcctgcgtttgaaaagtaacttttgaattacttaaagcatctccaatgatagtattctttaaaggtgttaaatatcttcacatcattcaaagatataatattttattttatctttcttccatatcatttttagttacagaacacatttattttccaaaaaaaaaaaaaattaaaagtaaaaaatttactttcattttgtattaaaaaaattaaaaaacaaaagtattacccagcaccataacttaatataaaaaaaaattaaacaaaacctatataaatatctttttaaattacagtatacatgcactaaaactttactacacatgtataaaaac

SEQ ID NO: 160646 - DNA, 541 bp, Cannabis sativa
tttcacgaaattttgaatatttttacgatttttttgattttatttacagtatatacgatctttttatgttgtactcttgttaatttgttggtaatttttcgttatctgtaggttattttttattgttgttttgatatttagatgttattttcatattattgttatgtatttttcttattatttttatggaaaactgtaaaaatgtaaaaaaaaaatcttaaaacgtaaaaatgtatttttttttttacaaaaaatagtattttatgtaattatccttttattaaataacaaaataaactctgtattttttaaaatagtacaaacagagccatgagctcaatttttgatttttttttaatattatccacttaaagataatttctagcacgaatagatgtagaaaagataacaaattttatcataagaattattattaaattttattttaagaaaaaaaaattagttcaagatactatttagtattatttcagaaaatacacggtccaatttaatatttaaaaaaataaagaattcaattagt

SEQ ID NO: 160647 - DNA, 817 bp, Cannabis sativa
tatcaaaacccgttggtggtgggtttgaagacgaaccctcctccacattcctagtcctcttaggtgccatttttctcttttgttttgattttttttttctgatactttttcttttcttttcttctttttttttctaaaaaaaaattaggcagcacctccccttaattttctatatcccaaaaaattcaaaatcactcaaacaatattctcaaatactcaacaccacaatacaatgataacaaacccaatatcaacaatattcttgcacaacacactattataccacccaaaatctagaaaaagttaatcaaattccttacagattaaaggaagtgatacttacaaacccgaagaagctttactccacctccattattgaatgttcttgaaaacatgaggttgaagatgaagacaatggtgatttttggatttggggtgttatgggtgatttttggtatgggttttgatgatatgtgtagattgatgagtgaaattgggtttttgaatggattgggtttgagaaatttaagaaaagatgaaaagattgaagattggtgatgaaaaattgaatttttgagagaaaaagggtagggttcggctaagaggatttgaaaatttgaaatttttggtgtagggttcaatgagggggaaaaatttgaatttatagaaaaatcgcgagcaagtcgcgacttggcttagggctagtcgcgagtagctcacactcaaatttaagccgtctctagaaaatagggaagtcgcgactggggtcgcgacttgaaaaataggtcgcgagttggccaaaggctagtcgcgactt

SEQ ID NO: 160648 - DNA, 688 bp, Cannabis sativa
  modified_base (611)..(612): a, c, t, g, unknown or other
ctagaaatcactatctagaatattttcattaaactaagtgtatttatctaaattaattttaaaatatttcatgaaaatataaattaattatgttgctaattcaattttaattaggttaaactagttcatgtgagagaaggttgggttcaatatgtcgtacctactactaatgaccccctaactctcacacaaggcccaaatcagaggaatttaatctttcattaaagagaaatttacataatatacttatttttgctattttttttacatatatactgtgaggcggtaatgtttacatttttactgtatatattatttaaattttatacggtaggcttctttttttttttttttttacagtatatgacagcttttttttaaacctttatatatatatattttatagtgacaaaagctgtcacttttaattgagtttcaatttttttttaaatattttttaatattatttatttttttctttacttttttatttaaaatttataatgataaagatgaaaatatatatatataaagtgttgatttgattgatattgtcacttgtgacaagttttttatttattatttttatttttattaaattaaaattaaanntgataaagatgagagtcaaaacgtattttcatttttctttttgattatattttctatttttctctctctctctctc

SEQ ID NO: 160649 - DNA, 521 bp, Cannabis sativa
cttatatccttccaaagttcaccgaggacttcaatgccccccaatatcgcagataactttccatcttcggttactcgtgaaactttggtcgcctccttcatgaatttgttgatctatgctcggagaggttcgcctggtctttgcttgacttcaaccaggtctcccagatgcaacgaaagttggtgagaggacgagagctgtgcatggaattccgaagagaaggctttccatgaactgaactttccatgggccaacttgaaataccattgttgggcggcttccaacagggtagcaggaaagattctgcaacacacgtcccctcgtacaccttgtaaatccatttgcattttgaaatacttgaggtgagaaagaggatcttctcttcctgtgtacattttccacgttggcattttaaacttgtggcgcaacgccagaagattgatctcgggagagaaaggagttccgcgtgctcggtccagtttgagatcattatttctttgtccagccatgccttggaacat

SEQ ID NO: 160650 - DNA, 579 bp, Cannabis sativa
acatttgctatgcagtaggaattgtgagcaggtatcaaacaaacccaggagaggaacattggactacagttaagcatattctgaagtacttgaaaagtacaaggcaatatgtgttagtctacagggtggtactttaaatctcgtaggctataccgactctgattttcaagcttgtcttgatgacaggaagtctacatctgggatggtgtttactcttaggggtggagaagttgtttggagaagtgctaagcaaactgcaacatcagactctaccatggaggtcgaatacatagttgtttctgaggctgctaaggaactagtctagcttagaaagttcttctcgggacttggtgttatttttggaataaaaaaaccactgattttactttgtgataacactggagttatagccaacagagttgagcctcgaagccacaagataagcaaacacatagagagggaatatcatatcatcatggattatatggcaagaggggatgtaatggtggagaaagtggatgctgaagacaacttagctgatccattcaccaaaattttgactgtaactacatttgaaaa

SEQ ID NO: 160651 - DNA, 500 bp, Cannabis sativa
tacctaagttagtgacacctagcaattctaaggcagcaaaggatcaattagaatcgttttcatataaagaaaatcaagaagaaataaagaaaaaaaatcaaaaattgagaaaaaccatctttctttctctctctccgttgttcggccaccataaaaccagaggagaccacctcaattcagcttgttttctggagttttagctagggattcaagtaagactcaagttgaggtaaaccctagaccaatggttctttgttttcaagctttgatatggttttagtttgtgattttgagacataggggctgttagagttagaaatgtttagggttcgaatttttaggttcatttgagttgaatatagcttcttgtagctggttttgatgtatgagattggatttatgcaagtttcagttttgaactaaaagctttggtctttaatggcatgttggatttcattgagtttttctgggaaatacttgttggattatgttgtatatgc

SEQ ID NO: 160652 - DNA, 519 bp, Cannabis sativa
gaatgtaattttagtataggcatatatttttggtgtcaagctgtcaacaacaagggcaagacctggactacacaagaaagttcctaccatatggtcatactgctaaaaacttgagaggcaaatgtttacccaaattttaatgacgatgacgtgtcaagagtagcaacacgtggcacaaaaataccgagactaaattaatgaaaaatatgtaaagtcatgaccgttaatcatgaagggtggtctgaccattagaatgaaagttagacagtcacccttacccctagcttgagtaaggtgggcgtctccgagaaggaaaaacgaaggactaacaccttcgtaagcggaatgaacaatcaccacgcacccacatgccaagttagtctagggggttcttatacccgatattcggctgccatatcaatagaggacacgtgtcaagataaaaggagtatggatcgacgtaatcactttttatgggataactcattaattgcttaagtattagagtatatttgtaac

SEQ ID NO: 160653 - DNA, 647 bp, Cannabis sativa
  modified_base (63)..(75): a, c, t, g, unknown or other
ggactaaccaatgctctgacaacttttatatgtgttatagtatttatcgacgacatccttgtnnnnnnnnnnnnngaagaggagcatgagcaacatctttgaatggctctgcagcgactacgagaaaataaactatatgccaagtttaaaaagtgcgagttttggctatctcaggtgttttttctcggacacctcgtcagtaaagacaagatcaaggtcgatctaagcaagattgaatccttcagggattggctgagaccaaagacagttacaaaagttaaaagtttcctaggtttggtcggttattatcgtcggtttgttgagggattttctaagatctcaacacccttaacggaactcactaaaaagaattagcggtttttatggacagacaagtgtgaagcaagctttcaagaattgaagtagagatcgatcacagctccaatgttagccctaccatctgataaagaaaaatttgtagtttattgcaatgcatccagctagggtctggggtatgttttgatgcaagccaaccatgtcatcacatatgcctcccgtcagttaaaagaatatgaacaacaataccctactcacgatttagaacttgttgcagtagtttttgctttaaaaatttggcggcattatct

SEQ ID NO: 160654 - DNA, 738 bp, Cannabis sativa
aacaaaaattttactttcattttgcgattaaaaaattaaaaaataaaagtgttaccaaacaacacctttgtgaatagaagctaaatattaacaaggtaaaaatattaaaacactaatattggatcgaaggaagggaacaccttgataatgtattcgaagatttcttaatagagcatgttatattattttttgaataatataatatatctttatatataaaatgtggctatttaattattttttttgttagtttaacaaaatatttcgttaaatttaacggtgttagtagggttagttttataaatatatatattaatattatttattttaaattaattaaaatatatataaatattaatattatttgttttaggttatttatttaagattaatttaaatacatataaatattaatattattattaattttaaactttatatttattttccttaaaattttaaaactttaaatattgtttttttaaaaaaattaaaaactaataagtggttttctttaatttataaaattttaaaaatacacataacaaaaataaaaattaaaaatataactaaatatacgtgcaatgtacgtaacaataacctagtatataatatatgtatctttatatataaaatattgctatctaacggtttttgttggtttaacataatattttaagaatataaaaatatttcattaaatttaacagtgttagtaggatcagttttataaatata

SEQ ID NO: 160655 - DNA, 506 bp, Cannabis sativa
  modified_base (448)..(449): a, c, t, g, unknown or other
ttcatattgttcaaatcgcttagtaagagaaacaatggcttgatcaacaaggtaaaaaaaaaattaattaattctaaaagattcttctccaaataactcaatcgatggggtactcaaattctcatcaaattgtctttttctttgaattgtgcgtctttgaggaaaaattagatcgatattcatttcaatagcaatttctttagcattattcaaggcatcataaaaacctgtttctcgacatttttcaaaaaaaaaaaaaaagaaagaaagaaattaacccttttattttttcataacaacatcaataagcatatcttttgattgtaaaaacttgctaactaaataaatagcagataatatttcaaaccaaataataattgctattaaaaacgcaaaatctccaagctcattgtggccaaggattttgcttcacttcttattttagaannaagttcatctttttctgacacttcaagtaaagcttctttaaattctgatatttgaaa

SEQ ID NO: 160656 - DNA, 773 bp, Cannabis sativa
gagagagagagagagaaatagataggcggttgtattgaaaaaaataacctgaacaagaaagtggggatggagaagtaaccatcaaatcacataatgtgaagactcggtttgacctagtcaaaccgagtatatatataattaaataaataaatataatataatatacatatgtatatacaaaaaaaatatatataaacacataacagtacatgtcgtccctctctctctatccgtctctatcattttctctctcttcaaacacaaacccaaaagaaaacctacaaaccacaatcaccaccacactccggcgaccaacctccggccaccgcccgaccctacgcgccccacagaacggaactctaggtgccggcgacctcaccccacaagcgtcgccgctcctttcgccaccgttagctcgggatcgcaagtcaaagcttgtggtttcaaactttgaacggatttttcggtcacctcccacgtccgtttgacacatcgtcttcaccaataaactcaacttgtcgaggagaacaacgtacactaaaccatttttcccggttcgctacttttactggtgatatttttgtagctccgcccctttctggcgactttctggtgacatcgtgtaccgttttgacaaacgattggcatgggtgtgatctactcgtcaaggtaatcgttttgatatacactacgcctattttcggcgacgtttccggtacaccgatttttactgccaccgattgttaatgtgcaccgcttaggtgaggcttcgg

SEQ ID NO: 160657 - DNA, 509 bp, Cannabis sativa
tcccaagtcacgagttccacttgtaggcctagcggtaggcgggcagaccttgtctagtaattcatcgggagaggtcatacctgatggttccaaccaggttaaaggtgccattcctcctatcaaccaagaaaataaatctctaaggcagtcaggcgcttctgtattcgaaaggttgggggtgacacatgacataaggaatgatcttaacagaaggagaggagtagacaatcagaatgtcacgatgatcgtacagcccagagcccgtgcttaaattcccgctcagaaagatgctgacgtgattcaaattgaccagaatgtcgagcaggttagcccagccgtacaggcatagctagacaaactgaaaaatatgttccaaggcatggctggacaaagtaacaatgatgtcgagttggaccgagcacgcggaactcctttctctcccatgatcaatctcctagcgttgccccacaagtttaaaatgccatcatggaaaatgtatacaaggagag

SEQ ID NO: 160658 - DNA, 511 bp, Cannabis sativa
  modified_base (321)..(326): a, c, t, g, unknown or other
aaccataaccggacaaggacccgaactccaaatcagaccaagactcgaatgggagctggacccggatccctacccaaaccttgactcgggacctgaacctgaacttgaactcagacccaaacatggaacaagactagggacaccgaaccagggtcgggacctagaaccgcacccctgtcttgatcccgaatccaaactcagaaatgtgacctgggccctgaacaagaaacatacctagacctgtgacagtgatcaagatcttgactcgggatttgggtaacggggtttggaacagaccagtagtcggtgtatagatctggnnnnnnagacctaaacctgaaccgacactatgactcgaacccgaacctagaccaggacgaaaacccacacaataactacgacctgcacccagaatcaggatatggacctgggaaacaaaactatgaccaggacctagtacccgacccagactcgaacttgaacctatgacccagctcgtgcccggcaccag

SEQ ID NO: 160659 - DNA, 508 bp, Cannabis sativa
gtatcatttgttgtgataaccagatcgtgcttaatcttggcattcaaccccgccaagtacttctcctttttactgaagtctgttggtacgatcccaaaggctaacttagccaagctattaaactttgttgtgtattcagtcactaacataccctcactttgtaccaactcaacgaattctttccactttgcactgcggaccgcctcattgtagtatttagcattaaacaaatcccaaaattcctcccaggtcattctagcaacatccttggtcagggataccatctcccaccacaccaaggcatcttcctgaaattaaaacgtggcacatgccaccctgtcattcccgaccactcccatgaaattcaatattctttgaataatagttagccactgctcagccttaagaacatcttggcctcccaaaaacactggaggttcttgcttcctgaatctctcatataaaggctccatacggttaccagcaacttgttgctctgctggcaccg

SEQ ID NO: 160660 - DNA, 565 bp, Cannabis sativa
  modified_base (474)..(477): a, c, t, g, unknown or other
cctcttctgcattagccattccgagacaaaaaaccacttatttttctcttgtatatttgcaactcagtgtttattgcagattaaatcttggttgcattggaggattgaatcggtggaccttgatgtaatattgaggtggattgaaagatcaaacaagggcaggtttcggaagagtttttggtatgctgttattgcttcagcagtgtaccaaatctggagggctcggaatttaatgttgtgggagtccaaggagccgagagtcactgaggtgactaggaatatcaaagaagaaattaagagcagatttacttatgtatggcctaaaaaagtctcagaatatgatgctcaatggtttataggaattgtacagcaatagtgaattgggaaatagaagggtcattgtaattttgggatgtaattgtaattagatggtgattcatacaagggattcacacatagaatttataggtcttnnnntttgaaggcgctaatagtttgtaaaaattctgttgaggtaatgcatttctctgatttaccaaaaaaaaaaaaagagttttatttaggg

SEQ ID NO: 160661 - DNA, 524 bp, Cannabis sativa
acgggcaccacccccagtttctcaatttcactgtctgaagcttacttagccagacagtccgtgtgagcattcttctatctggggattcattcaactttatagtccgcgaactcgtggagcagttcccggactatcgccacatacgcggccattctttctccgcgcgtctgatactctcccgacacctggttcactaccagttaggagtcgctgtagacttctactcttttggcccccacagcctttgctaatctcaaccctgctatcaaggcttcatactcggcctcgttgtttaaagccgagaagtcgaaccatagggctacctggagtcgaagtctactcggatatatcattgcaacccccactccagatccatttttgttggacgctccgtctacaaatactgtccatgttgggaccgacggtgccagtatgttcgcggttgctttggcttcattacattcggtgatgaagtttgctagcgcttgcccctttatagaaatacgaggtacgtagtgtaagtc

SEQ ID NO: 160662 - DNA, 513 bp, Cannabis sativa
aagccttgatcgccgacttaaagatagcggaggccttgaaagacaaaaaatctcatctgtcatagtgattcgtagctgatcataaactgggtcctcgggaaataccaggccaaaggcttgaaaatggcaaagtatttagagaaagttcaaaagaacttggaaagattcgattactttaaaattgagcaaattctgagagagcagaactccaacaccgatgccttagcaaaactggcctcgtagaatgatctggacgaactaaatcttgttccggtagaaatgctgagcgagccaagtatatgtgaaacaaaagacgttgagatgatagacagctctccaacatggatgacacctattgttaacaatttactcaatgggcaacttccaaatgacaaaaacgaggcgcgaaaaattttttatacagcgcctcgttacacaatgatcgaaggcaaactatatagaagagggtattcgatgcccctacttcactgtgttcttcccgtagaagcaaac

SEQ ID NO: 160663 - DNA, 616 bp, Cannabis sativa
  modified_base (137)..(141): a, c, t, g, unknown or other
accttacattgattgcagcaaaattaaatgattccctccactcagatctctaacccttgtttcttttctgtagcagagtagcaccaaaatctgagtccgattctccttcagttgattggattcttcatagtcttacnnnnnatgattgagtaccaacttgatatgcgtgggcatgtactctatcactatagggttcaaaatattgaagagaaagagagagagagagagaaggattcaaaatttatagatagaaagagaaggctcaaatttgactgaaggccagtgaaagcataagcttcatcaactgccaattttgagtccatcactatctatttataagaattcttctaggttcaggtttgaattacttggcattaaaaaattgataaataaatggtaaaagagaccttaagttgctgaccataggatgtgggcccaccacttgcaatttttccattttcaactatttatcctattctttcacaaaagccatttttccaattaaccaacttaaatgccaaaactatttattaataattaaaataaattatcaaataaaatttccatttgatattgaaattttgtattttaatatttcaagttttattatttaatt

SEQ ID NO: 160664 - DNA, 544 bp, Cannabis sativa
  modified_base (484)..(492): a, c, t, g, unknown or other
aaatttttaatactataaattattgataaattttcaaaaattcatataatatttcaataataataatatacactatcatataacaaaaaagaaaattatgaaattggtattatcaccggaaaaatcaccaaaaagctagttccttcatcaagaaaccgatttcttcatcaagaaaacaatttcttggtaattttttcggtgatttttttggcgacaatgccaattttgatgacttttccattgtcagcagctaggggtgttcgcgatgcgggtgatgcggtttttgactattttttcaaatcaacccgcacatatatttttttaatttcccaaaccgcacccgcaccgcgaaactaaaaagctgcaccgcaaaaaatggtgtggtgcggtgcggtttatgcggtttttacgatttggactatcactagataattaaattatcacaaatccaacaacgtttgagcaacacttgtcaaaaataccnnnnnnnnngaaaataaatatgaaaaaaaaagtttcaagtttcaacgatacaataattatt

SEQ ID NO: 160665 - DNA, 537 bp, Cannabis sativa
  modified_base (157)..(179): a, c, t, g, unknown or other
aaaaatgagagattttttaaggaaaagaaaaaaaaagttgagagattaaaaaaagagaccagaaaaggataaaaaaatattaataattagtaaaaaaacaaaaacaaaacacatatatttctataaaagtgtacctatataacagaattcttggttnnnnnnnnnnnnnnnnnnnnnnntttatttatattaaaaataaaagagaaatttgcggctaaacccctttatgttttaatttgtatacacataaccctttttcttttcttttttagtggtgaaaccccctttagtttagttctgtttgcaaacttaaaataacagttaaattttccagttaagtgccaattaggaagccaactaagattgccaccatgtacatctatgtacacattgcatattcttattggtaccaaattttttaattatttcaatctattttcacaaatatttaaatgataaaaaatatatataaccctaaataaatattttaaatttaaaaaaactaaataaataaatataaccctaaaatctaaattt

SEQ ID NO: 160666 - DNA, 867 bp, Cannabis sativa
  modified_base (380)..(382): a, c, t, g, unknown or other
gtcacggttcaaccgagtaatgacggtcatgagagtcagcaacgacgccaaatgtttatgcttcccactaacattgagtgggttcgcagagaaatggttacaaaagctgggaccaggatcaatggactgctggaacaagctacaagttagcttccggagacagtttttcgccgcgacaaaggttaatcttgagatcagcgccctgactagcatcaagcagctgcccacagaaacattgaagaacttcataaagaggtttaaggaagaagcctcgaagactaagaaagttgacgacggacaacagcttgcacttcttcaagcaggaatccgtacagggactccattttggaacgaattacagcaagaaggagcctccaacnnncaagacttccagaagagagtccaaaagtacatcaacttagaagaagcccaaatagtggcttacgggggatactatccgaccggaatagcagggtatgtgcccagagtccagctcccgggaaccctactaacagctactccaccaatgagcagaatacaattttccgctaccccaggatatgatcagaatcaggcattggctcctgcatcttctcattacgggaatccttctgggataagtggacaagtcccatctcactccgctcctgctgcaagcctagcgggaccttctcaaggctctcagagcaagaggtcctcaaaaggtagcacccggacggaggaaaagcgtcagaaaatggggtacactccccaataaacccagtgtaataccctggaattaaggaaatggattagcaaagccctaactagttaattgagtattattgtagaattatattatattataatttattatatgcgaattaa

SEQ ID NO: 160667 - DNA, 568 bp, Cannabis sativa
accggaggtggtcggggtgatagaaatccccaaaacccatgtggacgcggtagaggccgcggtcgtgccccgagaggtggtcaggagaacccatcctggaagtacagttatggctctaccaacacgagtacagggttggtattttagtgcatctggtacagtggtcgtacttcccttaagaacgttcttatccatttggtgagcttaattattgagctcagggcggcttaatcacaaagtcggtatcgcattacttatatatatgtttcgcatatcttattgagtctgttgactcatcagtttgctaccttctgtaggtaagggaaaagcaaagctggaggaacagtgagatggagctcagcagtgattgtacatatcacggcagtgcaacctggaagggtttcggtcttttgctattttgagtctgtattttgaagttgcctgttcgcagaattataaaaaaaatattatacgtatatattagtaaaatacttttatatcgtattttgatacttgggatcccgacccatatgttaataaagttataatataatcaagttatcttttg

SEQ ID NO: 160668 - DNA, 613 bp, Cannabis sativa
tagggactcaagggggcgtcgggcccgaaatgtccatccacttcggcctgtagtgcacgcagttggtcctggatcgcagtatattgatcagtggtgaggtggatgattccctcagataccaccgctggagtgacagggggaaagtgcatggttgctgggcgtgtggatgtgtccccgacttgagggtcagttgtttcagggaacaggttgagaggtctgatgttgctcctccctactccaccattaacgacgtccacaggcggtgttctagctccggataacggtacgttaatcattccgatgttgatggacctgttgttagcacctccgtttgtttggtttccagccatgatggtattcttacttgaaatgaataatattttaattctcggttcccacagacagcgccaaatgttgtcgagagaatttgacaacaccaattttatattatattattaatagcagaaagaaatgactatgaagaacaagtgcgagtattcaacctagagtggcgagtactcacactaggaatgagaaatgattaatagaaagctggaaataacaatgagacaaagaattatagtggtttagtcagatcacggtctgcttagtc

SEQ ID NO: 160669 - DNA, 535 bp, Cannabis sativa
gtatggtcctctcagactgtccatttgtctatggatgatgggtagtactcaagtgaagttcagttcctaaggcttgttgcaaggccttccaaatccttgatgtaaatcgacgatctccattagaaaattagaaataaggcttgaaggcactccatgtagtcgaactatattgtctacataaagttgagctagcctggtaagcttgtaatcctttctgattggaataaaatggacaaacttagtcaaacgatcaacaatcacccaaacaaggtcatgcctcaaaggtgtcaattagggttgtacagaaatttttgtaaaccgcccaacccgaataacccgcccaaaccaaactgacaaaaccgataaaaaatacaaaccgccataactcgataaaattctaaaccgcccaatcagttaattgggggattgaaaattgactcaaaccgtccaattaaactgccccaactgatttaactcgatttttacttttttttatttattttatatatattatataatatataaatataataat

SEQ ID NO: 160670 - DNA, 768 bp, Cannabis sativa
tgctcattgctgacccatttatatctaacttaatatataaaatgcctatctaacggattttgttatgtacttaacagaatataccaaaaaaacaggttaattttaagagacacctattcaattcacaagtaagccaattttatttacaaaaaaattatacagaccaagacaacctttggtcatttgcacaaacaccaattcagtcacacaactcataaatcataaataaaataaattgtgactcttcaaaaagtagcaagaaaatacattaactaataatataaataatgtttcataattataattccgaacagaatcgtttcttaaacaatatatacatgcaaatcatccaattattatttattatggatatatatttatatataatcaaaatatatcgaccgtaatcatttcttctctgatctattttcattatatatatttaaatgtatttttcttttgtggtatcgatccacacaaatttttagaaataatattactaatgtaataatctacattactaggatgtacatatatatatatgatctgtggtagacgagaggcctgtgagtactgtgatgtttgtgtaaatatatatatatatgtataatgtatatatgtaaggacatatatatatcttacctattatattatataaatatctatctaacataatttgttatgtattaacagattgttgtgtaattttaacagaacatgatctcttttggaaatcttaaatttaacctacactgttaacttctcaac

SEQ ID NO: 160671 - DNA, 548 bp, Cannabis sativa
tatatatttattctgtgattggatttattaagaaataggaaataaagaataaactcttgctactataatattagattaagattttggtatatttatataacccagaggtttattttttcaatgagttatcgtatatacaaacaatttaattttattacatataaaaaaaattaatatgatttctttgttttaggaacaaacaactattgtggaggaacaaaaaatacttgagaatgttgaaataaaggtataaaaaggaacatttaaattatttgtgtatattatgatttaagtttttctatttattttacactatagtatatatttattctgtgttaggatatattaaggaataggtaataaataataaactcttgctactataatattagattaagattttggtatttttattttgcactatatatatatttattccaaacgggccctaagtagattaagattttagtatatttatatagctcagaggtatatcttttcaatggggtatggtatatacaaataatttatttttattacatatcaaa

SEQ ID NO: 160672 - DNA, 554 bp, Cannabis sativa
gcgcgaaaaatgagcccattgttactcggatggttggaaggctgaccttggcttagagaagtcaaggtgccgcacgggtgttttgctgcctgaaaaagtgagcccgtgacagtttgtatcagagccaagttcatctcagtgagaggtgaacgtggttggcctatcctagagaggatataggcgggtggacgtatcgagatggtttgaatgttggaacaagacatcgttgagccagttagtcttttaaagaggattagtaggctgagatggagttaagactgggttgcttttctccatgggaatactggacatcctagagaggagacgttgatggttgcttcgagtcaagttcagagatgctagaaagataactaccacgtgcaattgtggagaggtgcaacagaatgtttgaaactctttggcatagtacaagattgagcggatagtccttactgaatgctttgtacattaggccaagtttgcctgagtgacatcgtaagccgcaggaggcgcttttgttgaaaaggaagcttgttggcatgtgtgtagaagta

SEQ ID NO: 160673 - DNA, 618 bp, Cannabis sativa
  modified_base (115)..(117): a, c, t, g, unknown or other
  modified_base (461)..(462): a, c, t, g, unknown or other
atcaacctggaagaagcccaaatagtggcctatgggggatactatcccaccggggtagcgggatgtgtgcccggagcccaactcacgggtactgtgccagcaacagctccaccgnnnagcggcatacagttttccgctactcctgggtatagtcaaggccaggccttaccccccgcatcttcccactttgggaatccctcggggataaatggacagccccctcgcactccgctccgaccccaagtttagccgcttcttctcagggctcttggaacaaaaggtcctccaaaggcagcaaccgaacggaggataagcggcagaaaagggggtatactccccaatatacccaatacacggagttaacggactcccaagaacgtgtatatttttcctagtggcaataagagatcccaataagagatgcgagtaccacaatgacattgggcacagcaccaatgaanncaaaaatctcaaagacgagatcaaaaacttgatctgattgggacatctctacgagtggatcaagaatcgtttgccccatctcaacccgggtcaggcagctgaagctttgccacaagtagcgccagggggtgcagcaggagtattggctcccgttgt

SEQ ID NO: 160674 - DNA, 525 bp, Cannabis sativa
cataaatctacacaataaaataataaaaatactaaaacataccttaaataatgcataaaaataaacctaacacctacatactttagttttgtaacccattccattataattttcacacaccaaaagcaacctttcatatttcactttgaactcaatttcttagtttgattcactagtgaacgaaatgctctcgaaaaactcctaatgcatctgaaattctactaatacgcttaaaaaattcagtcttgctttgttctttgtaatctcatccacatgaatgggagttcaaatttggccaataatcttaaaaaagacctttcaccccaatcttttaggtccaaattatgaagttgaatccatgttggtatatagcccttccgtcttccttttgaaagtccttatatggatcccaaggtttcataataatcgggttcctattaaaaaataaataaccaccatttaaaaatttatctcgattaggggtggtaaaacgaatttcaacacggcacacgaacacgaacacga

SEQ ID NO: 160675 - DNA, 627 bp, Cannabis sativa
  modified_base (234)..(241): a, c, t, g, unknown or other
  modified_base (292)..(293): a, c, t, g, unknown or other
gacctatggttggctgttgttcaatattcgtggctagtggaacccttgcatttcctagattctgcagtgcgggatccactgctggtggatttgctggatcgattacacctctacgagtctgtaccaccatcgcgtttatgattaaattgttggaaatattttacaaggatcttagatttactaacaagtatgttgtttaacatcataaatatgaacttctaaaatgatatgaannnnnnnnatataaagtataagaaaccttacagtggttgcagtggaatataatgtctcnntccactcagatctttaacccttgtatcctttctgtcgctgagtatgaccaagatctgagcccaaatgtccttctcttgaatctggattcttcacaatcttccacactatgattcaggtaccacttgatgtacgtgggcactcactcactcactcactatagggttcgattttcagaagagagaaagaaagagagatggtggcggctaggtttaggaagaaggctttgagttttctcttaatgtatgagatgcatcatctttttcctgaagccatcactacctattatagtttaccacctagggttaggttagatttatttggcatttaaataat

SEQ ID NO: 160676 - DNA, 622 bp, Cannabis sativa
aaaaaaaaaaaaagacaaaaatttgtctggtacgtcatgtttgtgctgattgtttatgtaaggttattaatataaataatttgaaaactatgtatattaatgtaaaagtttttaaaataaataataatgcttttaatgctaaatatatgttgtagcctagtggtaatttaattagtttaacaactaaaagattgagagttcaaatcctcccgaagaatacgaacccatccatcctcttggagaatcgagtaatggtggcacaaaagatgttttgctagctccgtagaacaatgaaacatcttcgccaaagagtgtggtcatattttacagtggtaatatatactgttgaatgttttatgttttaatagtagtatggttgtttgttaaactttattttaacggaaccctagtttttagttatgataatcatatttttgtaattagatggtactctatttttgtaattctgccattattagtatgagtaatcttaaatatttattaagtgcaagtataattatgcaaaatctcccaattagtcctctcacataatatataaaaattactacttgttataaatattaataattatgtggatgtccaaatcttttatttattacca

SEQ ID NO: 160677 - DNA, 516 bp, Cannabis sativa
tcttagagtgggcaaaagatccatgcagatccaaagcgtagaaatgtagaatttcaggtaggagatcatgtattcctactggtgtctcccatgaaagggatcagatgtttcgaaaaaggggcaagttatgccttaggttgacagggcctttcgagattatcgagaaggtttgactggtagcatatgtctggccttacctccagcgctttcagtagttcacaacatgtttcatgtttctatgttacagaaatacgtttcagattccactcatgtgctgagttatgagaatcttgagctacaaccagatctcttgtaggaagagcaaccagtttagatcttggacagaaaagataaaagtccttcggaataagacaatagctttggtcaaggtactctggagaaatagtaaggtggaggaatttacctgggagttagagtccaacatgagggctcagtatccagaggtgttcaggttagattttgaggacaaaatccttttaacgggggataattgta

SEQ ID NO: 160678 - DNA, 702 bp, Cannabis sativa
caaatgcttcccaccaacaccttgaatttctataacttcccttgatcctcaagtttaaaaagtttgcttccatgagttgaatttccgtaaccctctccactaatgtagcttagctttacatcctagattaaaaggacttccataggcttgtaatgtgaggcttagctttacatcctagattaaaaggactcttcttttcctctcaaatgctcagccaaaatttcattctcaatcccactgtattcactcaccaattctcttgctatatatatgtaatatatatatatatatatatctatgttttttttaatccaactagataaagagagaaaaagcaacaacattttttttctttgattaggggtggtacaccccaaacttagccttaaatttgcttttttttctctctcttattttatttaatactatgattgtacatatgtatatatatatttatttttttgtttttattattttttttttcatttttttaacatatctatatatatagcaagagaaggattctattattatgtgaatcaaaactctcaccaccccgaactcacatcccatcacgtctctagtatgaacttgtttttcgacatcttacaaagatttatcctcacttccctatcccaaataatatttggtttgtccttgataaatttcagcgattaggttcgggttatgaaggatgaaatt

SEQ ID NO: 160679 - DNA, 596 bp, Cannabis sativa
attaattttttttagtgcccatcaatgggtattacccatttagaagtgttctatatatgttatggtctaataagaaggtattatatgtatacttaaattttatagttaatgtttgtatgtttagtgcttgctaattctagttagctaaatataacaaaatggtcaaattttactattattgttagaccatctcgaatgtaaaatgtaaatactatgttaagtttggcacaagaaatgaacaaactttatatttagcataatatttgcaattgtgctccaatgcacaataatattttaagaagtaaattggtctaaaaagtaaaatattattaatgacaaacaataaattaaatatttaaaaaattactaatggcaatattataaataaaatgtatttattaaagtatttcattaatgattaatgacaaaagtgtaattaaaaaagtaacatttattgtgtgtcaaatttggcacaatattatatcttgtgtcaaatttagcccaatttttaacacaccattggagaaactttttattgaaaaatgctaaaaaataacaatacaccacctatttaacactttattagagatgctctt

SEQ ID NO: 160680 - DNA, 500 bp, Cannabis sativa
ggcagaaaagttatgctgatccgaagcccagagacatttcattttaggtaggagaacatattttcctgagagttttgccaacgaaaggtatcaggtgctttggaaagaggggcaagttaagccctaagtttatagggccatttgaaatacttaagaaggtcaggtaggtagcgtatcggctagccttaccaccagcattatcgactgtttataatgtatttcatattttgatgctgaggaaatatgtttcagacccaactcatgtcttgagttatgaatccctagagatacagtcaaccttatcctatgaggaatagctagttcaaatcctcgataggaaagaaaaggttcttcaaaataagaccataactttggtcaaggtgctctggaagaacagtaaggtggaagaagccacctaggaactactagagtccggcatgagggctcaatatccagagttattcaggttagattttagggacgaaatccttttaacgggg

SEQ ID NO: 160681 - DNA, 529 bp, Cannabis sativa
aattaaccaaccaaaaacctgaaactaacacgaatcgacaacctgaatttgttgggaatcccaactacaaaaactggttaaccggttttacatgtacctaaacaagttcaaagctcaaacaaatcgactccaaaccttaccaaaccttccagacctgcaaaattataccccaataaacattttccaagcaatagaacaactacccaagctcagaatctaaaatcactattaaagctccaagtttatgttttaaaactcaaaacttggttaatactattaacagccatcaaaacaagcttatttcaacatttctaaacataatttatcctctgaaaacaataacaaacaccagcagcaactacaacaaccaaaatctcaaatcatgcaaaatttcactttcttaaaaatcaagaaactaaagaggaggttgctagaaactttaccttggcttggattacactaagagctgctggaaagcacagcaattgatgaaaatattaaagaaccctagctggttctatagggtttc

SEQ ID NO: 160682 - DNA, 668 bp, Cannabis sativa
tggtttacaacgcaacctgccgtctttttctgttgaatccgattgccttcaagctgttaatctagtgatgaaagaggaggaaggatgtcgagatgttgatgggctcgttgcgcagatcaaagagctgctgcaacatgaccgagtggctggggtgtgttttgtatttagagaaacaaatcaagttgctcatgttttagccaatgatgctttgattaacaaagctagtgccatgtgggtaggggttgttcccttttgtgcgagtcaagctattcggcgagattcgccatatccattgtaatgtttttaattaaatgaattctgtttcaaaaaaaaaaaaaaataaacattaaattaagaatattatattttaacaaatctcaaacgtactaaatagaaaaaacaaatctcaaactaaaaaaatagaaaattgtaaacaccttacaaaatatatatttatatattgattacgtggataatgtttttttgacagagaagaacaatactgaataataattaagaactcaataaaacaaagaatgatttaatgatttgtactaagtacaatataagagatacttaagaacaaaatctaataaataaatatttgtatatatactcacctgttttaatggtagaattaaagatttcaatatcttgagtatgtgaga

SEQ ID NO: 160683 - DNA, 540 bp, Cannabis sativa
tataaaaataattatttaattttgttgacacttttaaaataaatttaaatatttcaaattattttttttaaaaaaataataattaattgattggtttaaagtgttactttaacaactaactttaatggaaaaaaaactatcaaatcaataattttcattaaatagtcacacttaatataaataaatatataatatataggataaatagcagcataagtacctaaagttttaagtttgtaagagacataaattcaatatttatttttagcggcataagtacctaatatttgtaaaactccagttttgccggtaaaaacttcgttttgaatttattaaaaaaaatatttgaaagtaactgatactgcatgtttctgtttagacctattctagaatgtaatctttatgggttcgtttggatctctatattaggtcgtattgtattgtattgtattatattgaattggattacatatcatatttttatataatactatgtttaactttaatttatactaaagtattatatatttaggtgtccat

SEQ ID NO: 160684 - DNA, 525 bp, Cannabis sativa
cctccaaatcgtatctaccacaatcgaggcatagaggaacaactaatcagtatcaactcctctggatttaaggttccatagaaaagtaacccaattccacattcgggctcccaaatccagaacaggcataaccccccaaggagaagatcgccaaaggtggaaggcaaagttgcaatacaggaacaagtgctctgtggtctcctcagcctccccacaaatagggcctcctcaaaacccattctcttagcaagaggggctcttaagggtagagcattggaaaggatactccaccaatggaccttatgtcgctccaaaatctttgagttccaaagtttgttccatagtgccggagcaatgttgcaaaaaggagctcgatcaagggcttgaataagataggcagacttggttgaaaacagaccatttgattcttttgtccatacctatctatcccttccctggccactcggattaccgcctcttaagatgttactaacagtttcttggtcaaaaaggttgtgtagcttg

SEQ ID NO: 160685 - DNA, 608 bp, Cannabis sativa
atattgaaattagttttatttagggcataaaacctaacaattggactgttacattcccgcacacaataatcgagccacaaaccctgaaagggggatgtgtgccaggtcgagtgctcatgcccagcaaggggaattgttgcctttgcacccgtactttaagaatgtggcagacttcttctgcctctgtccgacccagttcactcccaagggccttaagtatctgtcttccctcttcgttctctatgcctcccagaagtgggatatgccttctccccacgaggttagctggttttttgatttgaagtcaacccctaagcaaggcaggttagggtacttctatttctctcaaccagacttcaagtggttgacggacaccggggattcggccatcagcaatattgggtgttttgttgatgagtacttcatggtggatggcatgggcaccacccacactcagtttcaacagatgcctacatatcaccaccctaccctcactcttactcttagggatagagctcaaaagcttgctcagctgccgggggatgaccggaatatcatccagttgacctccgaggacaactttctgaagtacgggctctatccaaagg

SEQ ID NO: 160686 - DNA, 526 bp, Cannabis sativa
tactcatcgagtggctttctcactatgcatggtagtattttttagccaattacatctaattattaaaatcgataaaaaaaaaaaaactataacaacataattgaatttagtttttggatgcatatatttttgagaaattttcaaaagtacaatttttttatattttatttataattttattgcttaaaatttttaattataaaaatacgcttataaagttttaaattaaaaaaatacactttgctcagtaaaaaacaaaaaaaaaataatgaaaaattaatctcacgacaactataaatcaactataaaacaactaaaaacaacatcatgacaactataaaataaataaaaaatagtatattatttttactgaagagatatttttataaataaaaaagttcaaacagtaaaaatgaattttttttcagtgttgatatatttttataattttttaaaatttttttgatctattatgtaaattttatttattttaattttgtagtggatacttcatgattggaatgat

SEQ ID NO: 160687 - DNA, 635 bp, Cannabis sativa
cccattggctgagaagatgaaccagatcaatttccaggcatataaaagtgagacggttgtggacgcgttggttgtgttggagcacactcatcactgtcttcacatgggcacgttgttcatgtgtcaatacttgtgtcatcgcctcaatatgtctttgcagatgaaatactatttggcttaagccaggttgttaagtagttgcagcaaattgtgagcgtcgttttcctgattgtcctttcaatttgcgacccactcctcgctcatggccacgcctctctccaagagtctcacgaagtatctcaatctcaacatcttgtccacactcagaatgagtagattgattgtcatatcttgtcttcatccgtacctattttaagaataagttaaaaactaaacaaacttacaattatttaaatatattcaaaagtaattagtttacatagtcttacatatttttctttggcatgctcgctaacaaactcgtatgtgcccttctttgtgtgacaagctttccaattctcaatgcaacccaagttttgctgataaataaaaattgtaagcaaattgtaatgaaattaaacttcataaaataaatattatatatattaacttacattttcatgaagggtctcagc

SEQ ID NO: 160688 - DNA, 539 bp, Cannabis sativa
ggtgactattgagatacaagcagccgaagatgtctgaacactttaggattccccaaccccctagcgttccaacttaagattttcatggtgaaacgcggggttgcatcgcaacctctgctgaaacgtcaatgaaaccttctgaatccatcatgttcgtggaaacatataggttagagccatctccttgtgacgaggaaggagcaacaagaccatcattttgattacagcaacgctttaacatttgtctcattgagagttgatcatgttgccttttcgattgcttgttagggttcatattttctttatccacagcaaaagtgggagttttggaggaaaaggaagtggttggaggagtagtggaaatatggaaattttgatttggcatagtaagattgttagagagatgatttggtaagggaaaggtggttgttggaggataggtggctactgttggtattatattgatccaggatcttagatctatttgcaagtatgttgatttaacaacctaatatttgaacttctaaaacgatgaacta

SEQ ID NO: 160689 - DNA, 531 bp, Cannabis sativa
cacactcttcctcactctgctaggtattactttggcatgagtaggcatactctcaatcaccatgcaccacgaaattctatgaaaaaaaatcaagtgcaattcaaaaataataatagaaattaagaggtttgcttttgattcagtttgttagacaagagagagtctagagtcttctcttaaatcaaaacccttaatgttctatttatagggattcattaggtttagggttagagctaaatgggctgattagaaatgtaacgccctgaccctcaggggcgccacgtgtgtgtgtttaaaaaaaaacttattatcactaatctataaattttggaaaagtgtggtttaatttaaatcttaatataaattcaaaataaaaactttcattttaaatactatcgtaatatagggatcccttgtttataaaataaaatacacttttacaatagattacatttccaaacatagaaaggaattcgatcctgcttcccagaagccaagaccccacggctgatatgtacattgctgagagac

SEQ ID NO: 160690 - DNA, 515 bp, Cannabis sativa
ttgttttcggtgccggaaaagtcgccggagtagctgctagcgtcagaatagtcgtcacaattggcattgtcaacggaaaaatcaccaagagaatcagtttcttggtgaagaaacaggtttcttagtgattttttcagtgatttttttggcaaaaaagccaatttttacgaattttccggcgccggtagcaactccgacgacttttccggcactgaccgctactccggtgacttttctggcaccggcagcaactccggtgactttccggcatcaatgacaaataaaactttctaaacaaataaaaacattaaatatgagatttgaaaacctaattacatatatatgacatatccaataccataaaaagacctaaaaataaaaaaataccatataaattattcaaatttaaatgtgtcatatttatcataggaacttttaaaatctcataataatttcctcataattaatattatattagcaacgtaaaaagccattatattatatatatatttttt

SEQ ID NO: 160691 - DNA, 571 bp, Cannabis sativa
gagccattctatatggggctttagaaataggttcgacttcaagtgccaaatcaattacgaaataaattttctcgcagcagcggcaatcccggcaactcctcggaatacacgtcgagaaaatctttcaccaccctgactgcctcatgcctaaatgtttcaggtctgctggagtcaattaccactgctagaaatcctacacatccagtgcatagtaaatctctagcccttagtacaaaaataactgggatccgagatccctgaactgatccaatataaacaaatggatcttcactttctggctaaaaagtcaccattttccgcttacaatctacagtggccgaatacttagacagaaaatccatccccagtataatgtcaaactcagttaattccaattcatgaggttagcacccaactcccttccctcaatcttaaccggcatagacctaatgtgccgattaaagataaccaattctcctctaggcattagggttccaaaccctctttctaaaatattacaaggcctacccaaaagatcaattactcttgtagctacatataagcgtgtagc

SEQ ID NO: 160692 - DNA, 623 bp, Cannabis sativa
aaacatttagtttacccatgaatacccgggtaataatttttctacctaattagaaaaatatctcacttttacagactgagatagactgagattgttttattggttaaaaaaaatgttttagcaaaaaaaataaataaataagtaaaagttgagtttcacttaaatatttttatataatatatttttaatataatataaaaaaaatattttttgatatttttttattaagtagttaaactaagcaaaaaaatttaaatttatgttttattattggttattagatcaaaatttgatgatttaatatttttaaaattaacatttatagttaaatctgtttagtaatgatttgggtaataccaattaagaaatgatccgtatatatatatggataattaactacacatcaattttgtaaaataattatatttttatgtttaaagttttttttttatatttttataatattttataaaaatacaataaaacaataaaaaaatcacataaaattaataagaaagcatcaaaacaataataaagtaacataaaaaatagggtaaataccattttggaccctctgttctacaaaagttatcaattggaccctgtgttttgttaaatgacaa

SEQ ID NO: 160693 - DNA, 566 bp, Cannabis sativa
ccaaattttttttttctccctatgacccactttgtttgagggccggccctgcaagtaacacacaataattcaaacctattacaattaaaagataaagggaaaattagttattaaaatattgaaacataaattaaaaacaaaactagctctacaataaaaaatctcataacacataatacctcataaaactgagtataattttttttttttaaaaaatggagatcaatttcaaaaatattgaggtataaatatgaaaagaaccagttccataacaaaataaataaacacaaataataacacacaataacttaaatataatataaagaaaccgtttaagtttatcaactagttaaaaatttaagacaaaaaaactagttccgtaaagtaactaagataaaaactcacacacaaaaaccagctaaacaaaatagcttaaacaaaaacatccattcaacatgctccatcccaccatataattacactcataccatatctacctcaaaaatactcattcattatgtctatataaccggttctattttagttagggaaatttgaatttctat

SEQ ID NO: 160694 - DNA, 528 bp, Cannabis sativa
ttggttacactcgggtgacaagaacaataaatattttcatgctacggctagtgctcgcaagagatcaaacagtattcagcaactccaagacaacaatggaatttggcaaagttggaacaccgggctacacttagttataaagcagtactttgaggaactttatcattctacagataacttttctgcccaagtcattgataatattaaagtatctgtcagtgccacacataatgaagctctcttacagcccatacaagatgaagaaattaagcaggcagtgttctctatgcaccccgataaagctcccgggccagacggtatgggacctggtttctttcaacatcattgggacattgttggccctgatgttattaaaactgtgaaagagtactttgatacagaccttatgccagagagtcttaatgccactaatcttgtgttgattccaaagaagaaaaattttgctgttatgggtgatcttaggccgatagctttgtgtaatgtcctctataaagtcatctcgaaagt

SEQ ID NO: 160695 - DNA, 517 bp, Cannabis sativa
aaaagaagaggcgggttagctcttctgacagtccccatatggcggaggtcattactaaacgaaaggtatctgacgatgttgagactgatcctgacgatggagccatggaggagatagtcaaagagtttgagaagtgggtggaagggaaagctaagaataccctttacaaagccgccaaagagaaagaaccaaccaagggttcccaaccagccactctcaaaatcagtgattttgccccgaaagtgattaaggaggttcgcacttcccgctgcaaaaccaagcagaccccctttatggccccttctagcagtctcaccgagacccaactccaatttgtgaaggagatgactgtgaatggcaaggatggccagcttgtactcccctccccgaatcagttggcgcatgatcttgggaatggactgtgtgcatggtcccgtcgccatattacttatgggggggcactcccccttcataattttttcaaagacgtggttgattattttggcattagttcggg

SEQ ID NO: 160696 - DNA, 681 bp, Cannabis sativa
  modified_base (317)..(317): a, c, t, g, unknown or other
taatataaatagaacattatgtataattgtataaactgatggcaagtttactatatacattattcagagaataaattaatggagaaatataacgaaatataaataataatcagaatcaatatttgtaatatgttgtttactaaaattttttggaaatagaataatagtgatttatcttgtttactttattaggaaacatgatcggaatgcttaaattaactaaattgcccttttaagttaaaccatattatatggtagttattttataagacatattttaaagaacaaaattgtcattatatatttaatattaaaanataaaataaaaataattaaaattcattactcttaatggcattccttacaaaattatggcatgtttacttaaaggaaatatgaataaatggtatggtattgattctcacacaactgtttactaaatttgggaatgattaccattactgattagtaaacatgcttactgctcttttcccattttatttaaaaaaaaataaatttttttaattagttttttgtttttaaaattaaaaaattaaaaatattttttgaaatcgtgttttataaaattattttcactttttaattttttaattaagaatcaaaattttcaaaaaaaaatcactttctaatttttttcaaacaatttttttcttaattaat

SEQ ID NO: 160697 - DNA, 573 bp, Cannabis sativa
  modified_base (522)..(530): a, c, t, g, unknown or other
attaatctaggaaaggaacattagaatataatcagacaaatcttaagatcaaaaagaggaactatatgttagtcgataaaggtggtacttttatactcttagactataccaaaccaagtttctaaagttgcgttattgctagaaagtctactgatgagatggtgattactctaagggtggagcaatgattttagagaggtgtaaaaacttatctgaaatctctaattctaccagtgagactaaatgttaaagttacatgaaagatactttaaaatatggaaaattctatacagtttttggcattgtaccaataatgaattgactactagtgttactttctaactaacacagatgtagttgccaaaaaataaagaatccagtatccctagaggagtagacatatagagaagagtttcacaatatcaaagattttgtgattaaggatatgtaatggtggagaaaagtttgtattaaatatattttgtcagatcctattacaaagagaatactacatactacacnnnnnnnnnatatcaaggtgttgagattaattgaaatacacttttagtttta

SEQ ID NO: 160698 - DNA, 535 bp, Cannabis sativa
taatcaaggatcctctatagatgatctacatcaagtagggacaaatttactgtaataccctaagattaaggaaatggattagcaacccatactagttaatgtgtgtttattatggaattatattattatatatttaattacatgtgaattaatttgataaatgacatgttaagactctattggtgagccagaggcattttcgtaattatgacccgagaaggataaaactgtgaatttaattaaattgcgtgcttatggactatattattatatagtatacttattgtgtccttttttaggtgctttctgacaggttggcgcggtatagtcacaatcgggtatttcgagccgaactgggttcggggctgaaatacactttcgggattttatattggcattttatggttatttgaatattctgaaattatttggatattgtgtgactgagtaatgacttgattgcccttaaatgtatgtatgtatgttatatggccctaggggcatttgtgtcattttgacatttgtgttatttgta

SEQ ID NO: 160699 - DNA, 632 bp, Cannabis sativa
gtgactcacgagtgctctgtggtggaggtaagggcaaggcaaagttagaacaaccatgagatggcggtcttctctagcaatgtacatattgaccccaccagcctgcgtgttgagttgccaagagttgtttcagactgactatgtttgctgtattttgaactgtgttttggattgttgttgtatatagtcttttggataaatattttataatagggatccccggaactcctttttactgtcgttataatgcccgtttttagtgttttattttagtcaagtttttattatcctcacagtttttaataaataattaatatattagtattaaactagttttataaaatcacacacgtggcattcctatagattagggtgttacaacttgatatcatagcagctatggttttaaaggtcctgaagactttttgaatatgtacatttgctgcgaagacaggtctactcatggtatagtaagtgtttatgttatttgctattgccttacctctttagaaaattatagtgtatgatgggaagaagtagagtgtgaatagcatatgcatattgatgttgatattgtttgaattctaaatggttgaaggttttgggttacaggatattggatcatgcagcgg

SEQ ID NO: 160700 - DNA, 539 bp, Cannabis sativa
gcatccgggaaccactaaaatgtatcaagatttaaaaccctacttctggtggtatgggatgaaaagggatgtggtagattacgtatccaagtgcttaacttgccagtaaatcaaagatgaacatcaaaggccggcaaggttattgcaacctttggcccttcataagtggaagtgggaggacattgcaatggattttgtaactggtttgcctagaaccacaggaatatatatgggtaatagtggacagattcataaaatcagctcactttttgccagtgaaagttacttatgtagtggatcagtacgctaaactgtatgtaagggagatagttcgtctccatggagctcctaaatctattgtttcagacagagatccaaagtttacatcaaagttttgggtgagtcttcagagagctatgggtacaaagctaaagtttagcacaactttcaccctcacacaaatgggcaatcagaaagaacaattcaaaaactggaagatttactacgagcctgtatcatggactttgagggttcatgga

SEQ ID NO: 160701 - DNA, 529 bp, Cannabis sativa
gtccgtcggcatcacattcttgaaattatcaatttcttactttatgctctagaccccctatttccgtcggggttctcgtctgaggggatccgagttctcttccgtcgggagcttttattccgttagtagtgttacctcggtcccccttttgttgtgtttcaggtacttcctccgtcggcaaggtatctgggtgcctcatcgggttccggtctattatttcacttatagttgatctttgatccgtcgattacctattccctcccgttcttccttctgtttctgtcggcgctctctttacttgtttcttgtcgtttaccgttttccttctttttgtccgtagtgctcccttatggattggcaactaggatcaatagcttgatcaaaccgagttgggcctccctttatattcttgggcctgaatgtatttattttgatgggccttttaacgtgggcctttttggagttctttattttattgaaccgtttatttctagattcgatttccatattaatttagttgtataagagt

SEQ ID NO: 160702 - DNA, 546 bp, Cannabis sativa
tctggctggttattatcgtcgaattgtagagggattctctaagatttcaacacccttaaccgagattaccaaaaagaattagtagtttttatgaacggacaagtgtgaagcaagatttcaggagctgaaatagagattgatcacaattccagtgttagccctaccttttgataagaaaagttcgtagtttattgtgatgcatctagacagggtctggggtgtgtactgatgcaggctgatcgggtcatcgcttatgcctctcgtcagttgaaggaatatgaacaacgatacccgactcatgatctaaaacttgtagcggtggtgttttctttgaagatttggctgcattatctctacggagagaaatgtgaaattaatactgaccataagagcctcaaatatatctttactcagaaagatttgaatatgaggcagaggcattttttagaatttgttaaggattacaattgtgaagtcctctgccatcctgggaaggccaatgtagtggctaatgccctgagcaggaagggtcccgggcagggaact

SEQ ID NO: 160703 - DNA, 546 bp, Cannabis sativa
cttctctaaatttcttacagctctctaactctataatattttattagttgccgaaaacctcggtcaacagacctaatacgacgttacaaataagcctttaaagactagttcggtaggccgtataaatgtcgtattgtactaaataataaataatattatgtttgaatacaacaatatattgtattaattattaccactaaaaattttaatatagtataagttgtattatttaatacataacaaatggtctatattagcttgtattgtaatatttataaaggatcccaggtcaaccctaatctctgacccggacccggacccggactcaaacccaaagtcagacctagatccaaacttgcattaggacccggatcaagacccgagctctagacccgaatctgaacccgaacccgaacccataatcaatgttagggtcgagtttattgaaaatatatcataactttacacaatctattaatacaagtcaatacaaaaacataatattatattaaataataatacagtacaatacaatataatccaaca

SEQ ID NO: 160704 - DNA, 538 bp, Cannabis sativa
agtctacacacaacttcagaagtctcgtatagacttgggggcaaatgttatcccaatttttgtactctgacgtggcatcacatgatggtgacatgtggaactgacttctagtatctgctcggagaatacagtctgaataggatgcctcatatgcatgcctgaggcaaaacgatcagcaatccgcgcagagtgaccaacacttagcgaattcagcttttgcatcgtgagtcatcaaagaaatccctataacttggggatcagattgcagagatatggcaagttgtctgaatcccacggtcagtgtattctgtatttattatgcaagctttctgcttatatccattgtaacgagaagggaaatacttcttctccaagctcatagccctataaataaggatgcatgttcactgggcaaaggatcaaaaatattctggcagagagatattatctaagaattcatattcagagatactgttgtaagagctataagaaaatgaatctttctccttattcttgagttaatacaaataacgaggat

SEQ ID NO: 160705 - DNA, 521 bp, Cannabis sativa
cgctttctttgtgtgacattgttaaggctgatgcctgttaatctttaatgaaaatcctttattcaaaaaaaaactctagaattaattgaatgacttacagttaaaagagatagcaatttacaaacttcacttaccctaaaatatatattttaggcggctactggtagtgtttgggttcttcgaaccagggtaataactcttactatatccaaatctatatcttacaattaccaatccgaatacaaatcataatcattacgagcttttataaaatacagtgaatgtttaccctaatcaataaaatcccttggttatatatatcacattatgttaatgatgagctcacttcaatacttctcttcaatctgaactcccttcagatctgatgatgaagacgtaactaaaatctctttagtctgaactcgcgatcttcaagtcttgatctgcaactttggatcaacaccacaaaattcatgaatatcatacctgcaaaattgatagaacaaagaaaaggaagaata

SEQ ID NO: 160706 - DNA, 540 bp, Cannabis sativa
  modified_base (27)..(27): a, c, t, g, unknown or other
ataatcaatttttaaatttaaacctcnaaatatcaaaattaataataattactaaaaataaattaatattaaaatatattaaaataaattaatatatttaagttcaaatatattaaaattaatattttattttaatttgaggtttgaaaatagcaaagaatccgaaattggaaaaaaatccctaaaaaatcagattttttggggaaggcagcagctaggctgcacgtgagaccttacgcgggggcaagagggattgcagccccatcttccgagaaatctcggcgggctgcagggagaccgtcgggcggacagcagtgccccgagcgtgcgagcgtgttcagatattgggttgtctaaagcccatgcgcgcgcggatcctccttgtccgaagggtctatgcgtgcaattgagcatgggcatctcgaattttcaaactttgataacttttttaaattttatcggaatcgagttccgtgaaacacaaaattgcttaatttttcacaaggaatccaaatcaaatactttcagaaacagaaaaaa

SEQ ID NO: 160707 - DNA, 620 bp, Cannabis sativa
aaatacgagcaatggaaacctctaataaaatttatgcatatgattgtttaaattgtgaatgaaacgcaaaaaaacacccacatgttgaagtttaaacttaaaagtatgaggcattaaagagcaaagttggccatccaactttgcaaatttgtctttacaaaaaaagtgccacaaggggcaaaccattgtctcggccgaaaggccattttcaaaaaaaaaaagggataaataaaaaccaagtctacatggtgggagacttggatggatcttcttcttcttccttttcctcggcctcctcctcctccttcctggacttctcgcagaaagccagagtttcctcttcctctcctccaagaagcttgtgtccatgttgggattcgccatccaggctagatatacagtacgaaggccaaccttgttgcatcgttatgtggttttgacctccttctcaatgagattcttctcaaattcatcagcttgggcgttgatggtcttctcgacttcttcacgatctttctttgacttctcggcttcttgtttgaggcaggtgatttcctgctgggcgccgtcccattgcttaatcacagccttgcattggatagtaatttctagacctcgcc

SEQ ID NO: 160708 - DNA, 510 bp, Cannabis sativa
aagctcatagccctatatatagtgatgcatattcactgggcaaagggtcgaaggattttacttgtgagatatcgtctgagaattcatatttagagatattgttgtaagagttataagaagaggaatctttctccttgttctttagttaatacaaataacgaggattaggctattaccgaactgttctgggatgaacctctataaaattcctatgtctttatattgctttattttatttcaatcgttataaactacttgtcgcttactaaattagactcactgtcgttggctaaaagcgaggtcaacactttcattgagagcagaatcaagaatcgctcttcattctaaatttaaccacaagtacgatggtggtatagactcgtaggggcctggttgatccggcaaatctacaggcaatggatcctgcattacagaacctaggatacacaagggttccgccagctattaatcccgagcagccgtcaaacgcgggtcatggtgtgacgactc

SEQ ID NO: 160709 - DNA, 593 bp, Cannabis sativa
ttgaaagggaaacatttggtaagagttcattcttgtgttggctttttttttggttgttgcagaaagctacttgatcattcattataaagcttatagaactacttgaaaaaagtataattctaaatcaaagataggagtggagtggtgtaatgaccttgatcccttcctttccctgcattttagttgactcttgtttgtggttatgacttctctattttttttgttgttgtttttaggtagtatttttttcttagttgtgtttgaacgctgtatgaaccagtaggggtatgtttgttatatatttgtattagtttatcaagtttctccttttatgaatggaaaatcatttatcttataaattattaaagtgttgtttcttaaagaatgctaattttttttgtattatgtacttactaatatttaaaaaatttctaaattaaatttgatgatggaggtgggaaaaattgcataaaaatttgcaaatttcttttacatatagttatgcttcattttataaccgacgcaataggtaaaaaaaaaagtatttcaacaagttatgcaacatgtaggaaccgacgatataagttttttgt

SEQ ID NO: 160710 - DNA, 504 bp, Cannabis sativa
cattaaacacagaaaccctataagctatctaaaccatacagatactttcgtcctatcgaaattcagttctatttcactatagcataatcgacactgacttctcagatctcgcatcgaaatcataaaacagttaattgatggccagacaattaaaagtaattaagtacgaatgaaatagaatacataaaaattagggaaaaaataaatcatattactaccataaaacaatgttaaacaatctctatctaaaccctaattaaatgtttagctactcatgtttatgaaagcacaatcacacatattaactttaagaaaagagaagaaaatattgaagaaaagaatgttaaaaaccctctaaagaatgcctccatattgtagttgatctctgaaattcatactctatattctctgtttatttttctttgaaattgcttgactgaaatcaactccagttcaccctttatataggctttcagggactaaaaagatagaaaaacgcacatg

SEQ ID NO: 160711 - DNA, 658 bp, Cannabis sativa
gtagtttatttttttattaatcaaatataaagtaaatataaaagtattagaatgtaaaaatatatacctatttttccatcgtcactctaatgaaaaggaactatttagttgcttctgatatctaaaatgaaacaattatgatgttacttttttacacacagttaaaaaataattcattcatttattaattgccttactttattgaagaaaaaaactttttagttgcttaagatgcaaataaaaaatattctaatgttggaattttttctatggtgaccgatgatgttttaattggtaaattaacgtaatactaataggttacttgtttataaatttttttatttttataattatttgtatacattgttaaaatgtaactaatgagtatatagttagtctattttttttccggtcgacaaatcaaatctagttgtatacaaagtacatgagtgtaacatatcatacatagtaaacctggataacaatatatgcccttgtcaaaaattgaaatatgatgaaatgtcttgctcataagtttatttggtatatatacctatactcatatatgatgatattttatttggcatatttaaataaatttttattttcttagtttacatagtagccttttcgtatagtctatcatcgtatatgctaa

SEQ ID NO: 160712 - DNA, 559 bp, Cannabis sativa
atctcctcgacatcctccattggttctacaattttttcggaccccactcagggatccaactcatcttcttcagccatttctagctcaatggtttcccggaccataaacacgggcaagtgggttgcaacattgtaacattgccttgcttccccctggtttcctttcaccgtcccgattccagcttcctgggtagggaactttaagcacaggtgccgaatggacgtgactgcgccaaaatctaccaaggccggtcggccgaggatcgcgttgtaagtggtcgggcagtccaccaccacaaaagtgtggtacttgaatgtgctctgggggtgtccggacacaaggtgactggaagtctcacttttcccattgggataagcaccgttccattaaaccatgtgagttgggaaccactgggtgagaagtctcggtccgttaggcctattgcagtgaaggcctccttgaagagtatattcacggagtttccgttgtcaatcaagactctggccaccaccttattagcgatggtggtctcgataaccagcggatcatggtgagggaa

SEQ ID NO: 160713 - DNA, 640 bp, Cannabis sativa
aatcagattatattgaaatgagttttatttagggcataaaactgtttggtttcctctagaaggtcatggtaatatttgacttcccatcttttaaccgtgtttccgatattggacacgtagaatgtacgtcaacattaaggcccattagtgtgtctcccaaaataaataaagtggctaagcccaattggatagtgttatcccaatttttgcactctgacgtggcatcacatgaatggtgacacgtggaatccactcggagcatctgctcgaaaagcatagtccgagcaggatgcctcgctggcatgcccagagcaaagcaatcaacaatccgcgcagagcaaccaacacttagcgaattcagctttcacattgtgagtcatcaacgaaatctctataactcagggatcagattacagggatatggcgtacacacgatcccactatcattgtatcaaacattaatcccacgatctttgtattcaacattgatccacgatctttctgtttatacgcattgagacgagcggggaaactcttcctctccaagcttacttgccctataaatagtgatgcatgttcactaggcaagaaggtcgaaaacagtttagctgagactataccttaaatatattatctaaga

SEQ ID NO: 160714 - DNA, 554 bp, Cannabis sativa
  modified_base (242)..(243): a, c, t, g, unknown or other
aagacaccaataaccgagaaaatgcttacttattagacccgtaacataggctaattataacctaacaaagttcccccaaactagattattacttgcccccgggtaagataaaaaaaaactaactacgctatcagataatcattacactgctgactcatgctctactttcttccttgcacaaactagaatttcaatcttactaactctaacaattaattcagatgctcaattcataacactanncataaccacagaatttattcacacatgaaacattgttataaaagttctactctttctaactgttccacagcccgatagctcataagcttgcatgcttacctctctccactaatgttgaatatatcctttggaatcattaggtctttccgaggtttagaaattatggctctgatattgagaaatcgacaaaagacgatttcggctgaagatatcataagctcacaaacagaacccacaagcttcttactttccttttttttttcaaaaccccatagtgttcccacatttaccaagattgagaaaagatatat

SEQ ID NO: 160715 - DNA, 597 bp, Cannabis sativa
  modified_base (430)..(436): a, c, t, g, unknown or other
tcgagaggaccaaaagagtgtttccgtgcactaacaacccggagggagaggaagaaggagcaagaaatgtcctcccatcgatctgagacatcagattaacaggaaacacggtgacctccgcgatcaccctgaccaaaagaaacacgggctcgcagtctctacgggaacgttaaacgaaggaatcatggctgagcttgccatactccgaaaagacattgcctgagtctcccggagacaaaaaggtgatcactctgactctgactgtgaagaccaggagccttgtgccaggcacatcttggaagcggagctccccaaaaatttcaagaagcccgaaatggcagcttataccgggaactcgacccaagggatcacctgtcacggttcaaccaagtcatgacagtcatgagagtcagcaacgacgccaaatgtnnnnnnntcccgcttactctaagcgggtccatggaagagttgttcaagaaactggaataaggatccgtggattgctggaataagttgcaaaccagctcgaggagacagtttgttgccgcgaggaaagttaatctggaggtcagcgccttgactaacatcaaacagctg

SEQ ID NO: 160716 - DNA, 573 bp, Cannabis sativa
ctttatatagaatagatacattaataatttgcataaaattttttattttatgaatatgcaagggtcgatgcaactcgtgggtgattgggaatcagggttattgttcgagacgaatcaaggacaaaagttgcaggttttgttcaacaagtttcttctcgtcaccaacctttaacaaaaaaatttatggtgattcgagttgctcttcaatggtgccatcgagagaaatttagattcatgtggtggagagtaattgtcctaatggtaggtgtaataattctgtagatgttaatgttattattgttaaggatatataactttttatgtctttttattaaattggtttatgtcgttttgtttctgatgaaaataaagtagcccattcataggcaaagcatagtatacaaagttctcatttttttttatgatattgatcactgtatggctgaccatattggtgaggatgtttgttaacggttaatgataagttcttctttttcaaaaaaaaaaagaaaaatgaaaaaagaaagaaagatagaaaaaaaaaaatctaaaattaaaatgtctctcttagaa

SEQ ID NO: 160717 - DNA, 545 bp, Cannabis sativa
  modified_base (48)..(48): a, c, t, g, unknown or other
gttatgacttgtatatgttgtatggtgtatgttgtatgttgtatgttntatgttgtatgttgtatgttgtgtgttgtatgctaacgtctcatttaaagtaagggaccatggtggggtatgatacggggtaaggccgttgaatgtagagataccctaccctgcattttactgagtcgtgtatgggattattatggtggggtatgatacagtgatattactgttgaatatagagatggcctatcctataacaatggtagggctgcagaggcccaggttattatatgggtagattaggcccaagatattgtagggccaggttaggctatgtaagtaatggctatgatatgccaatgttatggtaatgacattattattttatagtattgatatgattatgttatgagtatgatattagagttatgatatctgtatatgtgaatggtgtgaacaatttattagtatggacctatatgataaaggtttctatgtgtacagttatttggttatggttataaaataaagtgtatgatattgctaaaacttaa

SEQ ID NO: 160718 - DNA, 560 bp, Cannabis sativa
  modified_base (44)..(63): a, c, t, g, unknown or other
  modified_base (155)..(171): a, c, t, g, unknown or other
taaatgttatttctgatctacattaataagtaaatctgattatnnnnnnnnnnnnnnnnnnnngggcataaaacccaacaaatattcgatacaaaatttatcgcctagagaccattcgaaatatagcctactgtctcaaagatcgtacgctccannnnnnnnnnnnnnnnnatgtacaatcttcatctgcttgcactcactgctattcagccttagctttgcccttacctacacatgtaaatgttgggattatgccctaaataaaactcatttcattataatcttatttattatcaatagaagattagaagtcattaatgtttacatgtagtttttcatgtttatagtttaatatacaatttctgttaaatccataatatatagttattcacaattactgtgatgtcaacacagtggaatgtaattgtaattatatgcttcaaaagttgatgtcccataatttatcagtgcactggatttacagtggtgtgatagtcagcgataaagtttacttacaccttggataagtgttatgctctctccaggacattggcaaagta

SEQ ID NO: 160719 - DNA, 593 bp, Cannabis sativa
gcgaaagctaaattcgctaagtgttgagtgctctgcacagatcgctgaatatcttacttaagatgtgccagcgaggaatcctactcggcctatcttcccgagcagatgctccaagtggactccacatgtcaccattctcgtgatgccacgtcagagtgaaaaatttgggataacatttgcccaccaagtctgtacgggacctctgaggttgcgtgtagacttcttccgagctggttctacctttggatggggatacgtgtcgagcgtgaccgttcgagactcgatgtgaagctgactgggtgtcccttcagtttttagctaataaatgctctgacaattaatatttcaaaattcaattttctctctgcacggctgacggttgcactcaattacttttgatttcccatattcgttttttaggcgggaagctgaggcgtctaaggtttctttgagacaattacaccttttcgagacatgcctatatatacccacagcattgccacataaactcatttcataacccttctctgctaagttaggtccagagcgaaaagaaaattttctggcttcaaagtcgccgaagtgccttcata

SEQ ID NO: 160720 - DNA, 501 bp, Cannabis sativa
  modified_base (147)..(150): a, c, t, g, unknown or other
tataataaatcaaataaagacacaagaattttttagagcttcagccgcgagcagttcggtaatagcataatcctcgttatttgtattgacttaagaaaaagaaaaattgttccttttcttagagctcttacaatagtatctctgaannnnaattcttagacaaaatctttcgactccttacccagtgagtatgagtcactatttatagggctataagcttggagtggaagtatttcccttctagttacaattgcataataaatacagaatacactaatctttggatttggacagcttgccatatctctgtaatctgatcccaaagttatagggatttctttgatgaatcacgatgcgaaagctgaatttgctaattgttggcgctctgcgtggattgctcactactcggtcaggaggactttgtccgagaaaatgtatgagatgccctgttcggcctgcgtcttgcgagcaggtacccggagtcgattctacgtgtcacca

SEQ ID NO: 160721 - DNA, 506 bp, Cannabis sativa
aaacaccaaacacaacaccctcagtctctctctgattcgaaaccctagcagagcaagttctctctgagaacttgctcgattccaaaccctagaaacccagaaaacccaaacaaacccagatctaaacatacacacacatagcttttaggttagatgaaaagaaaatgaaagataaggagagaaaacaccagaaatttgtttcagagttcacccaaatctgggctacgtctctgtcaagctcttctcagagatagaagcttgatatccactatcacaaggtttgtttacaaacttttgggagcttcctgtcacagaaatcgatcaggtaagctcgatttctttctttacactttgttttgttattttctctgtgttttgttctcgatctaactctcttcttttctttctctgtgcatgtactgcttcttcgagcttctcaccatgagatctggattctcatggttggatcttggagctgaagactcaaactagggttttctccttct

SEQ ID NO: 160722 - DNA, 695 bp, Cannabis sativa
  modified_base (145)..(164): a, c, t, g, unknown or other
  modified_base (263)..(265): a, c, t, g, unknown or other
  modified_base (350)..(354): a, c, t, g, unknown or other
aatatatgaaatttatttttttatttaatatttttaagttaattttagaaaaatacttagttaatgagatatattctagatagttatttctactgactagttatattttataatttttaattagaaaatattttaagttgaaaannnnnnnnnnnnnnnnnnnnattttggaccaacttaaattaataatttttttctagtattaaattagaattaataattaagtttgttttatacatgattatttaattcttgtatttaannnatttaattaaattgaaaattaaatatttaagtttatttcattcttgatacttaaatattctttttttcagaatatttaattaaannnnnaattattttaagttggaaatttaaatttcagaacaacttaaatttgaataattttcataacatattttattttattaatcatttttttatagagaattcgaaattgcatttttttatttaaatgcagaaaattttgaatttttcttgaaaaatagattaaagttaaaaattatttatcttaattttagaccaacttaaataattatatttttcatttaaatgaactaaaatatattataattagaaaataaattaattaattactatcaaatcagcacttaactctctaccatctatcctgatcggcatatacctaatccacctgttggagataaccaatt

SEQ ID NO: 160723 - DNA, 553 bp, Cannabis sativa
  modified_base (40)..(44): a, c, t, g, unknown or other
caacgagctgcacagtacgtttgaaaatcacgtaatacgnnnnngttagttagggtgttacatgtacatagatctccaccatcaaaagtccctaaaaccagaaaaccccaattctggctccttatctccctcgttgtcaaacatctcttgtctctcactcggtgcagtaacatttgagctcgagtctctcatggaagaagaaagaattcaagaactataaccaggccctattctgtaatcgagctcgccatcgtagccctggttcatgtgcccctgctgcaacctttaattccaactactaccagtgttctggctcgtcgttgactcttttattagatcccatcactaaataagattagaatgaacacaagaaagatacgtttagttggaattagaaggaatgagaacacaatctaataataatagggaaattttatttttaaatcttaaaaaaataccctctaacaaaatttagactcctaattaatttatacaattaaatgctatcgttttcaatttctacccaaaataccctccctttcattttccttct

SEQ ID NO: 160724 - DNA, 501 bp, Cannabis sativa
cttcttcttcctcttctttcactcaatctttttttttttttctgtagaaaaaatggcagaatagtcctcctttacgtgctgcctttgtttttgctgaaagtggaggctgccctcttttccaatcctcctaggttttgtaccatttgccccaaataaaccctacacatggcatgcatctagcctctccttgtaattgctccagccaccactcctagaatgccatgtcatccccaaaaatgccaccacatttaatgaagtgccagctcatctttttctcaagaaataaaacaaatcagctactaacctgtttgttgcagcaaaattaagaacttgactactttgttattttctttgtcaatttatacacaaaagttattaatttccactaataacttcaaattacacacaaaaacataaaacattgaaactttcacaaattataagacaaaataattacaatgacacacaattacatacaaacatgtttaaagtgatatcaaa

SEQ ID NO: 160725 - DNA, 599 bp, Cannabis sativa
tctcgatctcttcatttctcactagctaattctcttctttacaacaaataattgaaaatggaaatgaaataatgtttacaaatgcactactcgtttgttctatatatatagttaacctaaaaccaatccttctcctaataggagtacttaaaatttaaaaataaaaatcaaaatcattcaaataaaaatatttatattacatagtaaaaaaaaaatatcattgtcctaatagcactaggaaatatttaaattaaaaaaatcaagttaggtttctgaaaatttaaacaatgtaaaaatcttcaacattaattttgaaaaataaaattaaaaaaaaaaaaacattacaatgaatatatatttgtaagtttactatagagctaataactcttaaaaaataagttaataaacggctaatgaaattatttgtatgacattattatgttttttttcaatgaaattattcattgttaaaaaaaatatatagaaaatattaaaattgatgttggttgattttttttatgtgaaaagtcgttccaaaaataaaattaaaaaatgaaaagaggcttagatgtattagtgggattgataatttgagtcac

SEQ ID NO: 160726 - DNA, 516 bp, Cannabis sativa
aatattttaattctatttttttacttttttttgtggctaatattttttttagtggataatgactattttgtgtagtgttgtgcattgatagttaaattttggagcttttaatagatttgtaactagttttattctggtattgtatttaatttgttcaattccatacaatatctagagcacaagcatgtaaaatttgtatataatttttggtatatgtaactggtttttttttttagataacaattctagcgaatatattcttattctattttctacttcttttggggctaatattacgctttagtggatagtgaatgttttgtagtaggttgatggtctagtattagagtttttgagaagtttgtaactggttttaatattagtattatgttggtattaattttggtaatgagttaatgatcaagtttttaaacttataagaaacatgtaaaatttatatgagttttggtatttgtatacctaaaattttcattaagaaaataattttgattatac

SEQ ID NO: 160727 - DNA, 870 bp, Cannabis sativa
  modified_base (35)..(38): a, c, t, g, unknown or other
atttctgatattttattaattagtaaatctgattnnnntgaaatagattttatttagggcacaaaacccaacactgagcttcaccaccgtcttctccaactgcgatcgaagttatttccagatgcacccccaacttcagagacttatacaccacatgtaccgtggttgtcaaacttctacgagaacaacgacgagttggtaagacgtctccaaaatttccaagcgaggttgcattcggtacctagaaactcaacacccctagtctctactttaccaagtaagtactttcgtcctaaactagtagtttaacctttttttctgcagttaagttctgggtagaaattatatgttgctcaccatgcattttgggtttttggatagatttttcagttgaatgctctgccgtgtaagacgatgtttaaaatagttcgtcgcagagcttaggatgtgataggagtgattaaacttaggaactcttctctgccttaggaaaattaggactttgtgaatgtcgtttttccctattttgcaatacgaataaataagtgaggttcgacaaggtttatgaaagcattgtcgtgattggtttcttttgtcagagatccttgtgtcggatggtttaacccttgaccccttttttatttttatgttctcgatctatcatcctagatcattttccaatttgctcccacatgtaaggtccgacgaggacctcactaagcaattattagagaggattctcttgttcccttgctattttctttagtgtgggtactgactgcttggcttccttttttgattttcaatcatggtcaatgaaaattgttagcccaagatatgtttccaagagggggggtgaattggaaattt

SEQ ID NO: 160728 - DNA, 883 bp, Cannabis sativa
aattgtaaaaatatttaaaattccataaaatcatatttttataattttttttattgtttttaagtatttgtgaaataatcccataaaaatttgagatgaaaaagaaagttgtttaccttgccacaaagagagttttacatttaataaaaataaaaataaatggtctacatcgagatctattatcttatatattctttactaagaaatatgatgcaccctttaataattgacatgatcatcctatataatacagaaaaataaattagaaagtgacatattattaattagctataaaataaataaatttacacaatataaaacagcaatatatttaaattaattcactgtttagacaacgatctatcaataaatataggcaaaataattaccaactaaatgataaaaaggtacaaattcagattgtctatagagactattcagaaagataaaaataatgaaaaattaaagtacatagttatgatcaaaatacatcataataatatagacccaaaattaaaaaaacaacattacaaaaaaatatatagaaatttttttatatatttttatattttaaactttttatttacaaaaatactttttcagcataaatatataataaaatattttttcagttgttttataatttatttatagttttattatatttattatttatattatttttctagttgttttatagttatcgtgtggttgatttttcgttaattttaatttttttttttttttttttgtgaaaattacatgaaatatgagatttgatactaaagttacaaaaaaaatatgacatttattgtcactcttttatggtatttgttaacatttaaattttttatggtattttcatgatatgccactgtaacgt

SEQ ID NO: 160729 - DNA, 602 bp, Cannabis sativa
  modified_base (197)..(204): a, c, t, g, unknown or other
attataactgattaattaaaatcaattaactaagtctacaagaactaaattctctaacttattaattagaactagaatttataagtaaattctctaacttattaatttctccttacgccactatagattttgaattgtactcacaattatataaaattctctatatgtaccaagattctatatctatgattagcgcnnnnnnnnaattatactaccatgttcccaagatgtaagtattggcctgaaccattggttagctttcacgaacaactctaagaacataaataatacaattcagatcaaacctaaacatatcaggatgaagatctattgacctaagatcaactaaccaatattgacttagatagatataacggtaaatttatgatatcttatccaagttaaatatcgatccagtccgatgtatactccatacatctaatcctagaatacttttccaatgctctggaaaggacataacacttatccaaggtgtaagtaggctctaccggtgattatcatgtcagcctaatctagtttattgaaaaattatcggacttaaactttgaaacatataatcatgattatattccactgtgttg

SEQ ID NO: 160730 - DNA, 518 bp, Cannabis sativa
taatgcgtaataaataattataaacttaatataaatattgtaaataaacgtaattatagcataatatgtatgtaaatgaacgtaattatagcataatgtatatatgtaaatgaacgcaactatagcataatataatctgtaaatcttcgttttattaataaaacctaatatagcttaaatgctaccgtagacgtaggcaaatgatattctgctgaactacttaaatttgtgtattacatattatacatatatttatacttatatgcgtatttagcaatatataaatatagtttttttttttgcttataatttatatatatattatactataattacgttcatttacatatatattatgctattattacgttcatttacatatatattatgctataattgtattcatttacatatatacattatgttataattacgttcatttacatacatattatgctataattacgtttatttacaatatttatattaagtttataattatttattacgcattatat

SEQ ID NO: 160731 - DNA, 540 bp, Cannabis sativa
acaaggggatgtgcgcctggttgggggcccatggtcagcaaggagcgttgatgcccttgcataagtacttcaaggatgtcgctaacttcttcggtctctgccaacccaaatcactcctaagggcattaagtatttgtctgccctcttcatcctctacgcttctcaaggatggggtattccttctcctcacgaggttgcctggttcttcgatttgaagtccacccccaaacaaggcaggtcggggtacttctatttctctcagccaggcttcaagtggttgatcggcacagatgacaaggccatcagcgaaatagggtgttttgctgatgagtacttcatggtgaaggatccgagcattacctggactaggtttcagcagattccaacatatcaccgtcttcccctcactcttgctcttagggatagagctcaaaaacttgctcagttgccgagggaagaccggaatgttatctagttgacctccgatgataatcttgtgaggtacgggctttatcgcgaggattttactcctaagtccgt

SEQ ID NO: 160732 - DNA, 531 bp, Cannabis sativa
taaaataatttccaacagttgaaacattgctgggtttgcctcccaagcctattttcaacaagttcatctcttttcgagcttcctcttttcggatgaacacctaagcactttcgctgaactcagtgatgttcttcactggatgaccctgtaagtcgtcccacaatttgcccccaccggtggatagatcagtagtgatccccgcctgaagggcagtaagttgtgtactatcatccagatttctaacccttgcagcagccatgctaaaacgacttaagtatgccttaagtgtctcgactggctgttgctttatattggttagcaaggacgcctcgggttgcctatcccttgcgacctggaattgttttttgaaatccttggacaactgttcccaggaagttatggaatgatgattaaagttgttgaactagctggttgctgctccaactaacgaggtgggaaacaaaatacaacgtaaattgtttgtcacattactaactcgcattattctgttgaagttattcaaatgcgaga

SEQ ID NO: 160733 - DNA, 600 bp, Cannabis sativa
  modified_base (467)..(477): a, c, t, g, unknown or other
  modified_base (526)..(530): a, c, t, g, unknown or other
tgactcgctaaatcacttttcgaggacttaaaaatgaaactaaaaatttctttatcgatggataacatggaaattccctaaatattgtaaaaactagggtgccctaaaataccccaaccagtaaactggttccccaaccaaaagattagttctgtggggtctgcttagggatcaaccaaaatttaacacctttttaactccagaatattcctactaagcttcttcttcttcgagaggaacacagtggtctgcaagaaaagtccatccttttgtatttgtataaacgatcatcggccaaagagcctaataaaatggactcatggactaaggatatttaacgcctgaaccacgtaaaaatctcttgtttgttattgtattatttataccttcattactttcttaagctccataaaatattcggatgccaaaaaactcggtaaacacctaaaatctcttttcttcacaannnnnnnnnnncttagtgaaaattcataaataagccatagtctaatttagaattataatnnnnnaattaaaaccaattaactgagtcacaatcagttattatctcaactagtgtggggaccacgggcctatata

SEQ ID NO: 160734 - DNA, 558 bp, Cannabis sativa
  modified_base (133)..(139): a, c, t, g, unknown or other
gtatttgtctgctctcttcgtcctctacgcttcccagggatggggcgctccttctccccacgaggtcgcttggttctttgacctgaagtctacccccaaccaagaaaggtcggggtatttttacttctctcannnnnnnttcaagtggttgagcgggacggaccacaaggccatcatcaaaatagggcgttttgttgatgagtacttcatggtgaaggatccgaacatcacctggactcagtttcagcagattccgacatatcatcatcctcccctcacccttactcttagggatagggctcaaaagcttgcccggttgccggcaaaagacagggatatcatccagttgacctccaatgcaaatctagtgcagtacgggctttacccagagaacttttcttctaagtccgtggcggagaagaaggggagatctactgctattcggcctgaacgagctcataaggagggtgagctgattcaacttaagcgagaggctaagttgaagggaggtgcccgggcgaagcagtatgctcaagagtctatgaatcctgaagatga

SEQ ID NO: 160735 - DNA, 569 bp, Cannabis sativa
gagtgaatcaaagaacataatgaacacaaacaggagttcatgtatactcaggattcagattgatctactaatgagcatcattgtgatatcgtaaactcttttcatggtaaacgacaaatttgatgaaagatgtttattacatatcggttcattcatttataatctaattatacacagtgcctttactatatgtccatctacatatgtgatccgaatcaaaattacatacactagaagtataatgtatagtaaatcgtacttaacagttccatattaaagattctcaatactttaatacattaccgacttattttattcatatcgtataatcttaattctcttgtacatccttacaagattataccttctccatacgaataaggaatttttttatatttaataattatactcttataattaatatatcatttattttataattgtatttcatatattaattactatttttatggcataaatcccaacatgcaatctctcatttgcattaaaagtaagtgtagctcattctataactcttatagacaatgtatctgttgggttttatgccc

SEQ ID NO: 160736 - DNA, 536 bp, Cannabis sativa
aagaggcgcatagaattattgtagagcaaaaagaagttgaagagtaataagtaataaattgtgtgattagcttttaataagaaaaaataaataaataatagaaaaattaagaaaaggtttaaaaatttggaaaatctataaaataagaaaattagattcataatttgataagctgctacatcattgctctaaaaattaataaagatgaaagaataatatttcaaaaattataaaaaataagaaaataaaaaaatgtaaggagaattgttaatatttgtggcttttgagttttgtattagaattagaaacaggtatataactatttgtggcctttgagttttgtattagaattaaaaacatgtatataattaagtaattaatatttatagtgtacaaacgtttattataaaatatattacatttaatatagtgagtaccacaaatgcattttcaaaaaaaaaaaaaaaaactaaaactgaaaaaataaataaggtgcaattgttaatatttttaacattaatattaattaaaaataa

SEQ ID NO: 160737 - DNA, 554 bp, Cannabis sativa
  modified_base (202)..(213): a, c, t, g, unknown or other
gatcagtcaatgatcccttttcactgccatgatccaactcctccatgataatattaccatgataatattgtggaggaagattgtgaaggatgtaatgaactaggaaggtatcaggaatgataacatcgagcttcttcaaatgagtagtgatgtccctctttttagaaatgtattcttgaactcctttaacaccggtgagttnnnnnnnnnnnnactcttggatgaggttgttgaataaagatttatctgaagtgtcaaacaactcatccatttttgataaaatctttaaccttctcaggtggctccaccgatccacgcattctcaaaggaattctagacatgatgaacatgatacagagacgattggattgctcccacttttcacgcagtgcaatctcagcagcagtgatagttttagtgacagcagctggttcgtctctccttattgcataatccatgttgtgcaagctaggtggagaagaactcgttccttccagattttgaagttgtcactccgaagttcagggatttcactagtgatttcagcgtattta

SEQ ID NO: 160738 - DNA, 633 bp, Cannabis sativa
  modified_base (571)..(576): a, c, t, g, unknown or other
gcttttacagaacctaatttggattttttatgaattagttaagattttttgaatttgaatgaaaatatttgaaatcggatgcacaagtgtgtgagcgcgggtatcaggcatcgctcggactgcagccttgtttctcgggcatgactccccttccgcgcgcgcaggggtatgcaatgcatacccctgtgcaccaacattgttttcttcatattttttgattaaaaaatcgtttttcattgaaacaaaattcaaattttggtaaaattttgtgtagaatctaaattttcaattaaaaatctaattatcataataaaattcatttttaattaattaaaattagctttagaaattagtaggctttgaaatttgaaatgtgatttttcacaaaaatagccttatggttaattttaaaattttagattattttatttattttaattataaggtcagatattacattttttttattaaatgtgaatgatcttattttgatattaaaataagttttttaaattttaaaatttgctaagcatatacttttttttttaatttgttatttttgaaatatatnnnnnnaattaaaattataagatttgataaatgttagttttaacattttatcttattggatat

SEQ ID NO: 160739 - DNA, 620 bp, Cannabis sativa
accaaacactcagtagttttttcttacagcacagctacagctgctttttctcacagcacagctacagttgctttttcccacagcacagctgtaccaaactggccctaaagcattcaaaaatatgtacatagaagcccagatcaagcttgccaagaacccttcagagtttgctttgcaaaaattaaaagttgataccaaaaatctgttcaattctgctcattccaagtatgccagttatctatcccaactcagtaagataacttggttgcgttttggagatgagaacttggagttttttcatgccagaagaatcaagaagagaaaagaccaaaacagaatcaacataatgaaagattaatctgaattgtttgaagtttggaaataagttgaaccttcaatagagatggaaatttataccgcggggatgggtaaccacggggacccgctcctaatggggtggggattccccatcttggtggttaatggggtggtggtgggggacaatttcaatacccgaagggaggatggggcggggataatactattcgcaccatatccgaccccgatatagatgtatataatttcttttttattcttaacatatatctttatatattaaa

SEQ ID NO: 160740 - DNA, 589 bp, Cannabis sativa
aaaaacaaattattcaaagttatatttaaataatattaaccacatttattcattacataaaaattacaatatcaatcataaaaaattcaattacataatccttatttgaattgtattaattgtctatgaactacaacaacaaaccccatgaatcagagttgccaacaaggaaaacataaaaaagttaccccaatacaaaccaaactaaatgaacaaaaaaaaaactaacactaaattaagcaaacaaacaaacataaaaaagaatgtgaagcccttatcctaatctggctccaactcagaagctagaagcacacacccaaagcatcctctgagcatctgtagtcatgatttgtgatgccaatactgcttgaactgcctactgggagtcacactgaaagataatctctaagcaccataaccatgttgtatctatattgtcaatagttgaaatttttaaatttatagatatctgtcagtaaacgtctctgatacaaattgtagttgccgatataatcattaaggcactcacaatacaaaggttcaatgaagcaacactataccacatctcacctcgagggagggtgttgaa

SEQ ID NO: 160741 - DNA, 782 bp, Cannabis sativa
tggctggtttgggtgcagaggatgcaggttgatcctctttctttgggaagtttgacctccaatgtgttgtatttggattgtttggacttggccttggctttgagcgcaaactacccttcttgagttgtctttcaactttcattgtcatgtgcaccaaatcttccaattccacataatggtgtagttcaacggtatttgcaatctctcgattcaatccattcaaaaaccttgccattgttgcctcccgatcctcttccacattgactctaatcatagccatctctatctccttgtaatactcatcaacactcttgtagccttgacgaagaccttgcaacttgaggtacaagtcttgataatagtgagatggtacaaaatgtcgtctcattaccctcttcatagcctcccaagagtcaatatctcgttctccattcctcctcctgttcatgcacaactgatccaaccaaacaatagcatagtcagtaaattcaatggcagcaagttttacctttttcatttcagaatagttgtgacaatcaaacaccaattccatcttcttctccaactccacgtacgcttcaagatcactcttcccttgaaaagagggaattttcatctttatatttcccaaataattatctacctgattcctagcttctctatcccgaccatacctcctatggttacctgctattatcccatcgaactcttcatcataaattaccccttccccatctacttcattatcatttctttggtgaaccctattcctctgttgcctc

SEQ ID NO: 160742 - DNA, 529 bp, Cannabis sativa
tagaaatgctcttaaggatttatcaagcctcatatgctcagcctagtgtctaaggatgaacatatcctcacaaggttctaaccataacaaaatggtttaaattacttctctaacaagtgaacaatatctatttatagagtttttcactctcatatgaacatgaatgaccaccataaagcccttgcatgttaccaattataaattgagcatttatagtattaaatgggtgattttgaggagttttgcaatgttagaaagactcaaaaacgtttgtgcttgtatgctgaaaaaacagtaactagttactagttaccattttttcaactttagccaatttttctccaaagtgttccaaatcacttctacttgattttgaaccatttatacactttataaatgaataaatcaagtctccaacaactatgtttttaatagctaccattcattcacattcataaacaattagtaacatcatttactaatttaagagtgaaaaagagatgaaagttacatattcaagtgatcatca

SEQ ID NO: 160743 - DNA, 573 bp, Cannabis sativa
  modified_base (54)..(54): a, c, t, g, unknown or other
gtccggatttctctctaggtccagatcaagcttcgggtgtgggttcgcctcctnggtcttggtctaggttcggtccgagtcccaagttccaatactgattttagtttgaattcaatattgggtctaagtcctttgttctaatcctggtctgggttcgagtttgggtccaggtcagggtctagctttgggtctgattctaggagtgggtgtttaagttcgggtgcgagtctatgtttgggtttgtgtccaagtgtggaccctgttctgggtctaggttcgggtccaggtctaagttctggtcccgagtgcgggtccaagtttgtgtctgggtcaggatctcggcccagatctaggtccagcatttcgatcctagtctgagtcttggtccgtgtccaggttcatatgcagatccctatctaggtccaagtctgtgtttgggatccggtcccagatataggtccacgtccaggtgttaggtatggtctgggtacatgaccgtgtccgggccagagttccagtctgagtttgggtctgaggctaggtctttgctcggttctaggtttgggtccgggt

SEQ ID NO: 160744 - DNA, 519 bp, Cannabis sativa
  modified_base (73)..(76): a, c, t, g, unknown or other
ttccctaacttattaattctgcccgcacaactatagagttggaattgaaaagcactctcaattatatagaacnnnntatatgtaccacgatatagataccttatgattatcaattgttataatcctaatagtcaaagatcctctatagatgatttacactgaaaagggataaatttaccattctacccttcaatgtattttaatccttaaaataatgagccacctataaatgatatttcagtaaactaacataatcactgaaacgaggccctaatcatttatttctattcagccaagctcaaaagagatcatcgtttcacttctaaatacttatagaagctacagattccatatctatgattagtgctcccactaaattgaactaccatgttcccaagatataaatatcccccacaactattgttagcttccacgaacacctcaaagaacataaataatacagctaagttgaacctaaccatatcaggattaaaattcatagacctaagatcaaccatt

SEQ ID NO: 160745 - DNA, 514 bp, Cannabis sativa
caactagaagcttcaactcctttataattccttgtagccatattgcttctttgaatgcctctgtggtcaccatgaattttgcctctattgttgaaaatgctactacggattggagctgtgatttccaactaatacaatctccattagtttgaaacacataagaggtagtagaccttctagtatccttgcatgatgcataatcaacatcaacatatcctttcaaagttactttctcttaaactcttttgtaagtcaatccaatatccgatgtccctcttaaatatcttaacaaccatttgagtgccctccaatggtttatcccaggatttgacatgaacctactcaatatgcttaaagcatgagcaatgtcaggtattgtgctagccatgacatacatgagacactccaaagccattgcatatgaaatttcttccatctcttctttctcttctgtgctcatagggctttcttccttggttaatacaaacttttctccaagaggtactgaagtgct

SEQ ID NO: 160746 - DNA, 531 bp, Cannabis sativa
ttttaaaaatttgttattgaagtaattgaatttaatatatttatacactaatatataataatgttatattttctaagatgttgttgggtgtctacgtggtgtgggtgattttgaaactgttggaggtggctggaaaaaaagagatatcaccattctaaaaaattagtaagtttaaaataattaatgatgtatttcgtagtatatgtttgattatatactttatttatttttattttttatgtatagttcggtgacatcgaagattactttgtggggagatttggggaagatgttcgaaccaaaattatacgagaaggataatggccctatgattgtgattgtaacttcaacaactattaaaaattttagaggtaatttttttaaaatatcacactatataatattttaaattataatatttttttgctaacttagatttagtctaaataggtgaagttagttactctacgacaactgccagcaaaatatacataaatctgaaaacagattatgtagcatcattagtagaaa

SEQ ID NO: 160747 - DNA, 621 bp, Cannabis sativa
  modified_base (303)..(304): a, c, t, g, unknown or other
gttaaggataggtttcttccactatctaggagggccatcgaattcttagagaaccttacatgtccattcggacaatgagagcccctacagtccatacttttgcatattatgatgaatcctctatactttcttgtccattccattgttccatataaccaagttgttgcatcaatggttatggtgatcttgtagccgatcaatctagcaatttcgcatattttgatcaatcatccatgcttttattaaggtgagcatgaacaccttatgttgtgctcaactactatcaacacctaaacgattttnntatccaaaaccagtgggtgttaaggataggtttcttctactagctagtagggccagcgaattcttagtgaaccttccttgtccattcggacaataaaaacccctacagtgcatacttttgcatattcttaataatcctccatacttccgtgtccattccattgttctatataatcaagctgttgcgtcaatggttatggtgaattgttctatcttccttaaaagatttgaagacatccatctaatcctctttaataacttcccagctagtttgaaagactgtaatactaaaaccatcaggacctagagccttactac

SEQ ID NO: 160748 - DNA, 527 bp, Cannabis sativa
  modified_base (371)..(397): a, c, t, g, unknown or other
aaataaaaataaaaatgaactttacagaacacacttttattttctgtttttaaaattgaaaaaacaaaagtgattatagaatgtattttttattatagaatgtattttttttttttgaaaaaaaaaattaaaaacaaaaatttattttgatttttgggattaaaaaattagaatacataagtattaccaaatgccacctaggagtgttcatccaatccaatctgcactattttgctcatagtgcatccgatccgcactaagtgcagatatcattttttggatctaatccagtttgcacaatagctcaaatccaatccaatccacaaaagtgcggattggatcgattactttggattggttactttttaatnnnnnnnnnnnnnnnnnnnnnnnnnnnaaaatatttttttcacataactagcaacaaaaaaaaaataagttttagtcattttatgtctccaacaacacataaaaataaataaaataacaaattcaaaggaagaaaaaaaaaattatgcattaaaaat

SEQ ID NO: 160749 - DNA, 784 bp, Cannabis sativa
gagttttatttcgagcataaaacccaacaaactcccacttgcagtaacataaaacaatttgtgcattctaatcaatctgttgtcttcatcttcaaatcaagtgtcgtatatttgactcaacccaaatttctggaaccaagttcataaaatattattaaacatccttaactatatgctttactcatcaagggaaactgaaatccttactgcttaattagtacatctgaatgaacagaagacatatctctcatactttaaaatttggaactgagataatacagtgtagaattttcttcagtagaataactttctagtaatttcgaatttacaaagtcatgtatcttctctggtggagcttgaattattatagaagggttttttacatccttctagaataactcctccaccccaagagtaaccaccatctcaaaatcttaatgagttggtgtagatataaggattagtaatatacagttccttaatatctaacatataggtcactttcacaaatctttcttaactgtcccctaatgttccttatttgattacatctcagatggctcccactcaattgtagatgtctggtaaattgtgattttaacctcttactattgttttgagggatatctagttgtgacttactatcttagtctgaaaactgtaagtttctttaagacgaagtcaacaacatatcaatctagtatttgaagtgtaaaatacttgctagagattaagcaatcaaattgagataccataaaacgttatgaggattaagaaatcttgg

SEQ ID NO: 160750 - DNA, 541 bp, Cannabis sativa
acacactgtttatagcaggtatcaagacccaatacaagatcgaactcgtttttggcaagtttccttttctggtctgatttgctgcatcaaaattcgtttttgatgctgcaaatcaagtttttcttaggaaagttttatacagctgtagattcgactttgtggctatctctagggtttctatgttctataaatagaacctagagagcagccatttgaatcaactcttctagttttcattttttgcatttttcttatttgtgagaagagagttctttctgtgagaacctagttgttcatctaggttctagtgattttcatatctgttcttactctgtcttagagtttgttagaacgaattgactgaacaagagagtggtcttcgggagaagacttgttcaagccttactttgggaagaagtaaagcacgcacactttaaagatgaagagagttcggtatttggaggtcttttagaagtcaaattcataaagtgcattacaaaaaattgcggcaataatttagagggagtctaaacttgtttaa

SEQ ID NO: 160751 - DNA, 549 bp, Cannabis sativa
  modified_base (244)..(246): a, c, t, g, unknown or other
  modified_base (304)..(315): a, c, t, g, unknown or other
  modified_base (430)..(450): a, c, t, g, unknown or other
  modified_base (498)..(519): a, c, t, g, unknown or other
gttcaggtccaaggtcccatttcaaagtttcggttcgagatcgagaatgcgatgcggttctaggtcctgaccctggttttgtgtccctagtctggttccatgtttgggtttgagttcaggtcccggttcggctccccagtctaggtttgggttgggattcgggtcttgctcccaattcaggtcaaggtctgatttagagttcgggtcctcgtccagttacggctctggatctaggtccaatttnnnttatgattccaagtccaagtccttattccagtcccagtcaacttccggttttggttcnnnnnnnnnnnnacagggtacgggttcgggtccactctaaagtttcggactgggtttaggtcttggtgtgggttggggtcctcgtcatggttcgggttcagggttttggaatttattttaccaggannnnnnnnnnnnnnnnnnnnntgttgtttaaacaccctaaatatatactttctaaaacgataaattaannnnnnnnnnnnnnnnnnnnnncttacattgatgcagcagaattaatgtctc

SEQ ID NO: 160752 - DNA, 1056 bp, Cannabis sativa
agattttggtatctcccgaaaataaatgccaaaaattggattcattaggcaacatcaacgacacaaaccaacacgtgttcataaaataaaaatcccattaaaacattcaactccactaactaacatcctattgtcatttgtaatatttcttttcctttcttcctttgttttcctttgaaagattaagtaactaactacatctagttgggttgtttaattcaagtccgggctattgggttggagcaagacatggcccaatacggcccaacagttatggtccccatcgacgtgaagaagaagccccgggaacagaaggttccacttcacaaccggtggcaccctgacatacctccggtggcggaggcggcggtcggagatgtatttagagttgaaatggtggattttagtggcggcggtattaccaaggagtactcggctaatgacatcaaatttgctgatccttttattgtgagtttctcttcttataacttaattaatttgtaacctgtagaatcatgaattatcttcatcacgtgaatccattctatagaacccatcttaagaacatatacttatcttaaaaatatctgtgatgctgagattgagtcacatgttttgattggctgaacttgcttaggggaccattttgatatgacctacgagaataagacaacactagttgatagaaagcaaaaaaaatctttgttctcaaatttaagatattcttaactcaagtttaagatattcacttatctaaaaggataattcttttttcttcttgggggagagtatgctttatagataaaatttatggatctatagtcaagagaggagaaaattagtcttggggacaaagtcctttttttttttataatatatatagggtaatattatagtaggatctagcaaaagttccctaccggtagggaactgcttgattttaccgttaattttaggtcttgtggttattatgatgtaaggtatatactcttactatagaactgcttgtatacaattaaaaatttatacatataataataatatttaataatatat

SEQ ID NO: 160753 - DNA, 544 bp, Cannabis sativa
  modified_base (198)..(199): a, c, t, g, unknown or other
tgaaatttgttttactgtaaatgacattttttttttcttcagaaatgtatgatattgtatgagaagttaatgatataattagtattgattttgtttgtgttgggtttaaattgtgcatttttaattctgtatatgtatatgaaaaagattattattggtaaaaaaatttatttatttgtaaattttaagttttagcannataattagaaaatattgattagtgagttaattttattaaaaaaataattaaaagattatttaatgcttttaaaattaaaaaaaatatatataaaataaaaaattaaattaaaaaataaaataaaaaatgatatagtgacacacattttcagtgactatatatataaaatataaaattaaataaaaaataaaataataaaaaggatatagtgatacacattttgtaactctaaaaagtatttttagcgacacgcattgaagtgtcactgaaacactttagacactctcaaaacgtgtcactaaaaggcatttttgtagtagggccagcagaaaatacaaagcatga

SEQ ID NO: 160754 - DNA, 763 bp, Cannabis sativa
aactgataggggtggaaaaatattggacagttcaaagatcattagttgaacttcaaattgtatgcaaacttatctctccaaaaattcagattgcatattgatgaaagtaaaaggtttatgagtagttactagcagttgcccaagtccttctaggggaataccctagtgataagaaaatttcagaatgatggaatggttatgtacttagtgtacaccattactagattcatggatgtcctgattgttaacttaagaaaagctagaactgttaactaaggtttgcacatttgttagctattctaaagtgattaggggtggactatcttatggtcattaagataagaaagtgtttgtttcaacaaatactgcttttctaagatatgactaaatctgaaagtagcaaagtagatgagatatttttcttgattccataagtgctctatcatcttattctatataagatggtctcactgcctctgttgtcttgacacaacctataacgccctaatgctaaggcacgctacaatgattttttaattgcagtactatctttgctaatcaaagaattttctcgaaaatcgtgtcaaagtaaaactctagtattaactatgaaactttataaactttacataattatttacaaaagccgagatcccgtttctaaacttttttttaaaatattccaaaatacatgaatctggtagcacagcgactacaaaatgataaccccagatgtcccgaaactgaacactccaggtcgcgc

SEQ ID NO: 160755 - DNA, 670 bp, Cannabis sativa
tggtatggaagactctgaaatgcagcgcattcttgattgctcgtgttccagcaaaaaagaggttcctttcaaatacttaggtatccctatttgtgcgaaacgaatttcaggaaaggaatgtatggttctagcagataagatgacagctagaatcaaaatatggagtactagaaacttgtgtttggcagggagagcagttctggttaactcagttctcatgtcaattcattcatattggagccaagttatggtgcttccaaagcgaactataaggaatattgaagccatctgtcgaccatacttatggaaaggaaatcaggtttctcaagggtcgggtccaattgcttgggatcatgtgtgccaaccaaaagcagctggggataggtttgaaaagaatagcaaaatggaacattgctgcaacgacaaaatatgtgtgggcaattgtaaataaagaagataacttgtggattaaatggatacactgtgtatacattaagggagaggattggtggacttatcaagctccacctcaggctagctggtaatggaggaaattgaattcggttaaacacaaatcaaatgtgttatggacattcagcaattcgtaagcgccaaatacaacatattaaatggctacaaatctctttgcccctcacaaagcaaagtgaat

SEQ ID NO: 160756 - DNA, 622 bp, Cannabis sativa
aatcaaaaaggatagctggttattatatacgtaaatattttttgatgcataacaaagtactattagataattgaacttcaggcaatattgtaactgatgttttcctttgctgtacatgtgagtttatctttctctcttttttatttgagcagtttattatgtaatgtatatttgatttgttattatgttgatggaacaaaatcaaagatgagctcaaactctaagaaggctacattgaatatactcttgacagggcagggaatggtcagtatttgatgatgttattagtacttttgctatattattactagtaattaatgatgttatttgttgacttgtggttcttagagatcatcttttaatgtctcccaataagcagttcaagcaatactggcatcacagatcacgcatgcagatcctcagagaatgttttaagagtttgagagcaagtgccttcaattttttttttttgtttgcttattgtattgctagtttctttgttgttcaattaatttggcttgtattgggtagtttactttatttctcttgttcgtaactctgattcattgagtctgctgttttagtgtttatgggcaaagtacaattcaaggattatattgta

SEQ ID NO: 160757 - DNA, 537 bp, Cannabis sativa
  modified_base (480)..(481): a, c, t, g, unknown or other
cagcgagatacagcgagcatgaccaaagtctgatcgcatgattataactcgtattatgcgggacaagagactaactcgcatgcatcaaattatgtgtgagtatcctctccacgttcttgcataaacatagagaccgactctctataatgcgagttggtcccaatgaccctacaaccttgataatgcgatatagactcgcatgtctaggttctgtcagctcgacgtgcgatgtccacaaaggcgactacctaagaacgcagacatcctaaacgtaattaagtgttaggcctacgggtttaacattagaatatgaacagtcaactcgcatgttaagagggcgcatacgttgctgaatttagtaactgttattcatttattgatgttaacgttgtttagtttagttattgtaattcaatgtgtagaaacggattgacaatgaatgaaatcattttatgactaattggacacctgctttgtatnnaaaggggtgatccaccgtgaaatgagacctacgaaactcttgctacagtggactaa

SEQ ID NO: 160758 - DNA, 593 bp, Cannabis sativa
  modified_base (49)..(78): a, c, t, g, unknown or other
  modified_base (413)..(419): a, c, t, g, unknown or other
  modified_base (533)..(552): a, c, t, g, unknown or other
taattatgttaaatgagaatattacttaataatctattttagttattannnnnnnnnnnnnnnnnnnnnnnnnnnnnnaattggaaaattggcgttttttagaaaataggaatgaaagttgttaagactgcaaaattccaagtggggcccattaacaccatggcctgccacttgtataggttttttccaattattattttcattattttaatgccaaataattgctaacctaaacctagtggttgcctataaatagaaagtgatggctcacaccaaaaataagaattattcagtaattcaagagattgcctttcagaaaattgagccactgactttctctctatagccgaccctctctctctctcttttcctcttccaatttcgaaataccctaagtgatagagtagtgcccnnnnnnngcaagtggtacctcaatcataatttggaagatcatgaagaatccaacttgaagagaaggacattgagactcagatttggcgatactctgcaatagaaaggatacaagggttagnnnnnnnnnnnnnnnnnnnnatattattccgctgcaacaaatgtaaggtttcctaaacttt

SEQ ID NO: 160759 - DNA, 636 bp, Cannabis sativa
agtgttctttcgaacactcctagtccacggggccacgcctagagaatgaaatcaattaataaagtatcaacaattacaaagacaattgacttaaataagtctagctcattctaaattattgacgcactcctttgtaatgcactttatgaatctgacttctgaaacacctccaaagagcgaactcctttcgtctttgaagtgtgcatgcttacttcctcccgaagtaaggcttgaacaagtcttctcccgaagaccactctcttgttcagccaagtctttctaataaactctaagacagagtaagaactgatatgaaaaacactagaacctagatgaacaactaggttctcacaaaacaaaaactctcttctcacaaataagaaaaatgcaaaaaatgaatactagaagcgctgattcgaatgactgctctctaggttctatttatagaatataaaaaccctagagacagccataaggtcgaatctacagctttacaaaactttcctaagataaacttgatctgcagcatcaaaaatggattctgacgcagcaaatcaaaccagaaaaggaaacttgccataaacgagtctgatcttgtattgggtcttgattcctgccataaacagtctgtataat

SEQ ID NO: 160760 - DNA, 525 bp, Cannabis sativa
gttgctaaagctaggttttgaacaacaatgggtggataaattgatgaaatgtgtctactcagttcggtactcttttcaattaaatgggcaaatttatgggaaagtaataccgactaaaggcctaagacaaggagatccactttcgccatacctttttcttatatgtgcagaaggattttcagcgcttatccgacatgcagaggaaaagatggatattttgggtctcaaaatagctaggcatgccccaccaattagccacttatttttcgcagatgacagtttgctcatgtttaaagcttcagagagaactttagtatcagtacaaaaaaatttcagtctgtatgctgattgttctggacaggtataaattatttacaaaaatttattgagattacttttaaagctttagtaatatattataaaatattggtttaccgtttttgtagatgattatttacaacaaatcactgcttttattttctcccaatactcctgaaggaattagagtacaatatgtctcctctc

SEQ ID NO: 160761 - DNA, 537 bp, Cannabis sativa
ttttttattttgtattggttgtgaaattaataaattcttatgagaattgtatattttttatgtattttaacagatttttaaaaatgggaaacgttcatttcatagtcgttataatgctaaaaattttatgttaatgagtttgataggtttggtgttttgggaattactattgtttatatttaataattatttttttcgaaaatactcagtgtcggttaaatatcaacactcataccaattagtctcggttttaaaccgacactaaaggaaaaaaatatatatgtacattttaagtgtcggttttaaaacgacaccaaaactcattcgtctcggtttataaccgacacttaaattttgattttttgtcatcgtgaaataagtgtcggttctatgaactaacactaaaagtataagtgttagtttaaaagtgacactgaaaaatacaatttgtaatagtgagtgaaaaaaaaaaagtatacttgaaagtgtgatttcaaatatgtaatagtacactagtatttataatgaaaagtgtta

SEQ ID NO: 160762 - DNA, 508 bp, Cannabis sativa
  modified_base (34)..(43): a, c, t, g, unknown or other
gtgcttgcttatcactctaggtttttattgtatnnnnnnnnnnctagagtgattttgcttgtaatttcaaacacatattcatattatgattgaggtgagggtgacaccggtattgtaaacaacctggttataatgagattggcactacaacaatctgagaaagaggttaatagtcctcgggggtgcgaaactattgtaagaggtttggaaataccttggtgaaaatttcccgattgtaagggttagtcaagcccgttaacttggctcgatattggaattcaaagctaggtctatagctttgaagaccaaggacgtaggtggcttagttctattgaaccttgtaaaaatcgagagtttgcaatttctaacccttaaactctttactttacaagtttgattatttgttataatatattgcttgacatattatttgcctatatttgattaagtggttaattgcttaattttgtgttaaaagttttaatttactgaaattagtttaaatttc

SEQ ID NO: 160763 - DNA, 1030 bp, Cannabis sativa
tcaaaactaattggcaatgagtgacgtagtccatgttcttatatatgactcaattttctaccatttattttatgtgggacaatatccacaacagattaaatgttgaatatattaaatttttaaacaccttatcaaacaaccataattatatatctaattaaatcaatcaattgtcattaaaaattgaatcaatttatatatacctttaattacaggaacaccccaaaaattaaaaaatttacaataaaaaatatgcttagctatacgatgtgccacttcgttggccgacaaataataagctaatttgtctataaataataaatgcatgtcttagttcatatatatgaaaatagagagaagaagaattgataagtgatcaagtactcatgattaatattattttgcttttcttttttagatcatattattatgctttaactggttttttttatgcatttatagtttgagaactaataattaaacagatttataagcttgtttacttgacgtaagaattacatgaattacatgtagattaaaattatatacaaatacaatgatatattgtaatataattaagcatagcatagcatacaaggcagatcaatttataaatatattgatcattccttttctcttcaacaatgacgtgtaaactgtaaaattttcatgtttgattttgatggaattataagtaacatcattaacaagatataaattataaataatatcataaaaatgaagtaccactaataattaactttgcatgtgttattaattagactactaccactacaagaaaatcagcttttgccggcgcattgttgcgccggcaaaagtaccctgactgcgccggcaaaacttatctgggaaacttggtcggtaaaagactttttaccggcgcgtatagtaactgcgccggtaaaacttccttttgaagttttaccggcgaggaataacgccggtgaaaaataagcgccggtgttaaaaaatgcccttatccgccttgaacctgctatgattaggtttt

SEQ ID NO: 160764 - DNA, 506 bp, Cannabis sativa
  modified_base (139)..(146): a, c, t, g, unknown or other
accttacattggttgcagatgaattaaatgactccttctgctcagatctctaacccctgtatcctttctatagcaaagtatcaccaagatctaagcccaacgtactcctttagctatttggattcttcacagtcttacnnnnnnnnattgaggactaacttgctatgggtcggcatgcactcaatcactaaggctcaaattttgatagtgaagaagactaagaattttgaattagaagagagaaaaaaaaaagaagaagaagtctcaaaacactagttgtctgtcagaatgaaaactaggtttaaagctatagaagcattagtttggatagtgagaccttactcttctttttatactaattctcttagggttaggattgaattatttggaattaaaaaaattgataaaaatagagcaaaaatagggttaagcggccggccccttatgtgggttcatcactagttagatttttgctattttcccaaccatttatctatttttcacaa

SEQ ID NO: 160765 - DNA, 662 bp, Cannabis sativa
  modified_base (60)..(62): a, c, t, g, unknown or other
cttttaaactttatgaaaacatcaaaagcatggtttttttgagttaatggaaaaatccannngtacctactataatcatcaagaaaatgaacatagtatttgaaactatcttttgacacaacatgagagggaccccacaagtcagtgtgaatgagagctaaaggttgggtggccctactggtagataaagaaaatggcagtttatggctttttccttgatggcatgcattgcaaaattgtaatgcttttaaagatcctgtatgagagatatgaggtaaaagctttgccaatgtggaatcagcagggtgccccaattttaagtgccaactatttatatcattaaactttgagacagagaaaacttgtggagaaacatcaaaaacatcttgggtagttttattaatttcttgagaattacaagaatcgggttgtacattagaatgacaaaagcaagaacatgtacaacaagaattatctaccctagaacttgtggtaagatgacattgaatggcagaagtagatgactccccaagctagtataaaccatctttggccctctctttaagaagcacagtccctgttagcttgtcctttacaaaacaacaagatttatggaattcaagataaacatcattgtcagtggtgagttgagaaacactaac

SEQ ID NO: 160766 - DNA, 512 bp, Cannabis sativa
ttattccaccacgttgtgcaaaaacaagtattttataacttttatcaatgattttcctcgttatggctttacctacttgattcaagaaaatctaatgctcttgatgaagtcaaactctttcgaaatgttcttgagaaacaattagaaagagtcatcaaagttattctttcagatcgtggaggagaatattatgatcgttattcaaaatctggactacacatgaggccttttgctgaatattttccagaaaatggtgtagtttctcaatacactatgtcaggttcacctgagtaaaatggcgttgctgaaaggagaaatagcactctcatggatatggttaaaaacatgatgagtagaacaaatctttcagagttttgatggggtgaagcacttatgactgcaacttattttttttaaatcgtgttcccagtaaatctgttcccaaaaccccttttgagttgtggactgggcggaagcctagtctaaatcatcttcgtgtatggggttgtcca

SEQ ID NO: 160767 - DNA, 571 bp, Cannabis sativa
tgaagctatatgcaggaactttctttggaatgccaaagctgagtaccatgggccaggtgcaattgcttgggattttatttgccaaccaaaagcagctgggggaataggtttcaaggatataggtgcttggaataaggcggccatggggaagtacatttgggctattgctaacaaagaagatagtttatggatgaggtggattaatagtgtctatcttcataattgtgattggtgggcctatgaaacatcaagccaaaccagctggtattggagatgtttagtgaggctcaaggatcaatttaaaatgagtaaccagcccatgatgttgcagcagtataccatctcggcagggtataagttgttggtgcaaaatccacctaaacttcagttgacaaggcaggtttggagtcgtcttaatgctccaaaacattgcttcatattatggcttgcaatgcatcaacgactcaaaaccagagatcgtcttttcaaaatgaaaatcatcacagatacaacatgtattttctgctgtgatagatctgaaactgcagaacacttgttctttgcttgtccg

SEQ ID NO: 160768 - DNA, 612 bp, Cannabis sativa
gattacttagaaataaatttactaagtatgaaataatggtggaagctcataaaataagaataaccttgactttggatatagggacaacgttggattcttattttgatcaaataaaaggtcactagaatggtgtccattttagataagttgactactctattcaattaatgatatctttgactctcgtctaccgggacactgtatcagtttgttgaaaaccttataaattatttaagatgtgcttgttttgtattttcacatgtctttgttacttgataaatgtatgataatttttgaatctgtatgaatttatattgaatcatgttgttttctattattaatgttgtagtcgtaaattttgagtcttcattcttggtctaacttagcttattttttttaatgggacaaatcccaaaagattgtcatctgttagacaaacataatactgttagatctcgatagacaagtatttgtaaatgcaacgtctagttgtacattcaaagctgacaagttagactagtatatttacaataagaaacaaaaaagacattcataaaataagaatcactttgactctcgcctaccgggacatcattgaattcttattttaat

SEQ ID NO: 160769 - DNA, 637 bp, Cannabis sativa
  modified_base (344)..(344): a, c, t, g, unknown or other
ttagtatactatgtatattgaaatttctaatatttttattttttttattatgagggagaatttttttcaaaaatatcgtgtaagttttatactgtgtgtactgtgttaaattttcacggttgtttttttaattattccattgttgttttaattgttttgttttattgttttactgttgttttataaaaagatagtatttttgtaaaaaaattcgtgtgacagtaaaattgtaaacttttacccaaattttagtatttttgtaaaaaccccaattaaaattaatagattcatgtaaatttgaatgataatttcatacaacactttttaaaaaaaaaaaatatatnttttttatatatatttttacggtattttataaaaacaacatgaaaataataagaaaactacataaaagtaacaaaaaaataacatccaaacaatatcaaaatcacaacaaaaaatagcatacaagacctctaagcactaagggaactctagcaagaaaatagcatacaaaaaataacatccaaataaatttgctagaaaatagctttgggaattatcaagccttagaattttctagcaacgtatttttttgatagaaaacttacttcattccaaatgagcacccaagacctct

SEQ ID NO: 160770 - DNA, 576 bp, Cannabis sativa
gaataaataaaaaaactaagaacatagaacaataagttgaaaaacaatcagattgaaacccacaacataaaaagaacatagaaaaaactctaaacccaaaaaattaaagaaataaacaaacaaaataacagtcaaataaaaaaataatcaacaacatgaaaacagcagatcaacaagaaaaatatataaaaaaaaattaaaaatacctttctaggacgaacagaaacaaaatcatcatcattatcaatcatcttcctcttagctttcctagcatcaccagatgaaggctcaccaacagcaaccacaactttggatttctgcttaggggggttttgaagaagtttgagcaactgattttggtttagattctttaatagatttttttttggatttcttaggagaaggggataatgaactcgaacgagatcgagtaacaaccattactcaaaaacaaggaaaaatcgcagaaacaacaagtaaaaaaaaaggagtaagaactcgatgatcagaaagaagaagaagaggaagatgagaatgatatatgtaagtgtcatgttttgtgtggcaaattagata

SEQ ID NO: 160771 - DNA, 514 bp, Cannabis sativa
  modified_base (483)..(483): a, c, t, g, unknown or other
tcgtaagtatgatacttttccaaggaagctttttagttcttttgctgactgtggtgctcccatggctaatatagccttagttttgtcttcatctatgcttataccatttttgtggacaacaaaccctaagatttttcatgcgctcacaacaaaggtacatttgagaggattcattttaagtttgtatctttcacacctttgaaatgctctctcgatatcgcaaatgtgattaaatttattttgggatttgacgacgatatcatcaacatacacttctacgttctcatgtatcatatcatggaatattgccgtcattgctctttgatagttggctccagcatttttcagaccaaatggcatgacagtgtagtagaagtttctgaacggggttcgaaacgtcgttttctctgcatcttctagagacatctgaatttgattatatccgctaaacccatccatgaaagaaaacatctcacaatttgntgttgcatcaattaaagtatcaagatttggc

SEQ ID NO: 160772 - DNA, 579 bp, Cannabis sativa
gaccataatatcaacctatcaacctatacccaatatgccaatatgctaatatgctaatcatactccatactctagctctagccattagccatactgatgtgatagcatcgatcagtatttgagtctaacatacatctatcagtatccagtatcactctatgtatactgatactactatcaatgtactctaacaggcataaataacatgtacgctaaacatgtaaaaacatatgcataactttatactaatcttacctcatttcccaattcaggtgtgtcagccaacctgagtggaacagctgctcggcgaattataggcccctaaatcacatcattcgtaacacgcgtgagtgactcgctaaatcactttttggggacttaggttttaaaccaaaagttttcttattgaaagctaacatggcaataccctaaataatcaaggaatcaaccaactaaagctctgaaactaacatgaatcgataacacgaaaaatttgggaacccagctactaatctggttgaccaattttacaagacctataaaaccggttaaccgatttacaccaggtgacccaaaaaa

SEQ ID NO: 160773 - DNA, 516 bp, Cannabis sativa
gagcacaagaaagttcaatcccaatccaaatggcacatgtaacattatttacaatgcatgattgactacagaatgtgctacttgattagcatccttacaaataaaattcaaagcaatttcacaatcatgtgtaatattaattgattttaatatgaattaaaaaaatatttattaatttatttttgagtaatttatggcgtaaatacttaagtttaactctttattgtagataaatacctaagtttagttttttacggtaataatacctaagttatatttctataacttttctagttacctgtccattaagtgtcaagttattatacacgtgttattttttattggtatatttaaattaatttttaaataaaaaataaaatttaatgatctagactaattagggtctgtcatgtagccttaatacttaatggccaggtacttagggaagttccaaaattttaacttaggtacgtattattactgtcaaaaattaaacttaaaatatttatctgcaat

SEQ ID NO: 160774 - DNA, 567 bp, Cannabis sativa
  modified_base (31)..(49): a, c, t, g, unknown or other
  modified_base (257)..(284): a, c, t, g, unknown or other
ttctattataggtaaaaaaaaatgtaaccannnnnnnnnnnnnnnnnnntaaccattgaatagtcacccgtatatatatatattggtttaaattaggggagtaattaactatcagttatatttagtaagtaaatttcaatattaatacatgagttaccatatagatatattgagcattgctattaggcaccagtagcgcctagcaccttctcgacatgtcgcattgcgattagctagcgatactctctaaaagctannnnnnnnnnnnnnnnnnnnnnnnnnnnttagttggaccaataacgatattgacacataggaaggtgttaggcaccactggtgccctttagcatttctcttaaaatgtggcttaaggtatgaaaaataaaatttttgcaaatatcaataaatattacagaaatataataaatatataactgtaatagtctgcagcaacagaatgcaatcctgttaccgcagaaaacagttttgcagaaacaaaccagaaccagcaaaatataaaaataattacagaaaattaaattacttgacacaagagatttgtacgtg

SEQ ID NO: 160775 - DNA, 510 bp, Cannabis sativa
cattgggaactctaaaaatattcagccagctgctgccattcaaagtgatgatgtctcatgtttgttttgtggaggagggcatgtgtttaagaagtgtccctctagtccagagtccgtttgttacatgggaaatcagaattttaacagaaacaatggggcattctcaaaatcttacaatcaagcatggaagaatcatcctaatttgtcttgggggtggggggggtcaaggagcaagctcaagaaccgcaccagcccaaggaagacaagcatatccactaggtttttcacaacaactgcgacattcacaacatgctcaaaattcccaaccgagttctttggagagtctaatgcgggattatatggctaaaaatgatccggtgatacaaagtcaggctgcctctcttcgaaaccatgagttgcagcttggacatttggccaatgaattaaaagctaggccgcaaggttctttgcctagtgacactgaaaatccaaggagggatgggaaggaac

SEQ ID NO: 160776 - DNA, 521 bp, Cannabis sativa
aattcaaagaaataacctctttctctctttctctctttcggctgaagcaaaccaggggggatttgttgttgaaattggtaatttgagcaaggtttgaggaggattcaaacaaaggtaaaaccctagaacccttgagcatgtttttgaagctttttctttaggttgaatgtgggaattttgtgaaatgggggctgttagggttaggtttgtgtaaggtttgattttctaggttcatttgagttgaatatagcattgagcagctggttttgatttttggatttagttttgtgcaagtttaagctttgagttcaaagatttaatctctaatggcataatttgattcattgggttcaactgtgaaatactggttgggaaatattgtctatgcattgcttaggtactctagaaagtttggtggcatttggtggaaaattgagcaagaggtgaagcgtttgggagtgtactagtgcaaactggctagccgtggttgggtgtttccctaattccagagtttgtgtaac

SEQ ID NO: 160777 - DNA, 649 bp, Cannabis sativa
  modified_base (586)..(591): a, c, t, g, unknown or other
aattagacaagaaaaacttagctcgagaatgaatgaattatggatcttttattgattaggaatagtcaatagtatacaattgaataagcctaagattacatgctcaacacagtgaataattacaaagaaatagaaaatcacttctagagtgatactcctattacattcctttacgcacactcattatgatcttggactctctctctaaacttgactctgaatctcaagtatgagctttaaagattggagatcagaactcccttttagaatagagaaacacttatttatagttgttacatttaatcccaaaagattctctaagaaattaaatcatataattgattcaatcacgaaattaaaaaaaaattaattgttttagttattttgttttagtttagtctttttatttagttgttagtcgattaattaagctaaagatagttgtatgctgctgttgatggtaaagtgtctctgaaattgcaaaataattgtatgctcaattctgttaactctttgaattagtttggatgcttaaaaacttgtgtgtatatgcaattttgttaatctgtgaaaattgttataattnnnnnnctatggtttgtggtaagattgacagacaagatagcttagaacttgcatgttttattct

SEQ ID NO: 160778 - DNA, 526 bp, Cannabis sativa
  modified_base (193)..(196): a, c, t, g, unknown or other
gtcagaagaatttccttcgctagaaggagagttggcacaaagacgagggtggacttcgtgcagaagttgaagcagctcctggtctattccatgttggggctcccaagactcacttgggttcatctacaaaagacaatacacaagatgagtgttggacggagtatcaagcgaaaaacaagcaaatatgccgacnnnnagtacccaacagattaaagaacaaccatgttcgaaggaaattcaaaactcaagaagtccaaaagttttcttgggttagggcaaaaaagttcatgaagcttggaataagcaagatggaaaacagacgcaatgcagttcaaaaataagccctacggctgaaagctaacataaggacatggaaaagaagagtcccataagtttcaaactctatggtttcctaagcgttctttatacaacatagttacattcaaagcgtaagcatgcaaaggaaagaataaagggaattagaaacttactcaaagattcgaatgtccgggttcaggcaagccag

SEQ ID NO: 160779 - DNA, 506 bp, Cannabis sativa
  modified_base (66)..(69): a, c, t, g, unknown or other
  modified_base (279)..(279): a, c, t, g, unknown or other
taccctatgacccaaaattgaaacataaactggaagttgaccgtgactggaactaggacttggacnnnnaatcataactgaaatttgacctagatcctaaaccgtaattggaccaggaccccgactccaaatcagacctagacccgaattgggagccagaccgggatcccaacccaaacctagactcgggacccaaactcaaacctgaactcaaacccaaacatggaaccagacgagggacacagaactagggtcgcgacctagaaccgcaccccagtntcgatcccgaacccaaactcaaacatgggacatgggacctgaaccagaaccagaccgagacccgtgaaagttatcaagatcttgactcgtgattcgggtaacggggactggaacagacaactagtcggtgtctagatttgggactcaaacaaggccctgaacccagacgaagaatcaaacctaaacccaaacctagactaaggacccaaaattagaacctgaacaag

SEQ ID NO: 160780 - DNA, 531 bp, Cannabis sativa
  modified_base (128)..(130): a, c, t, g, unknown or other
tgtaccttgagaaccactgagtgatataccacagacaccctgtactttcccgtacttatgccggtatcactgtaatgtactcttaaacaatattcactattcgaatgcactctgtaccataactgtannngtgttggtagtgcaactaacacataagcatgcatatatacttaacatatatatacactcagatattaatattacatactatacacagttcttaccttctttccagattcaagtgtgctggccgacctgaatggaaagtcttgtgctagatggatgccctaatcacataacgaaatcaggtaaatcacatgatcaaaaaccctaatccgggaagttcgaacctataactctaggctctgctataatcactatggatcacactaactcaagaaatagggaaacatccaactacatcactgaaatggacgagaattgagaaaataggatattcagggtgttgggttttatgccctaaataaaactccaattcaatgtaatctattttattcaacatcaataaag

SEQ ID NO: 160781 - DNA, 507 bp, Cannabis sativa
  modified_base (311)..(320): a, c, t, g, unknown or other
ggtgcggtttttgaccatttttttcaaaccaatccgcacatgcggtttttccaatttctcaaaccgcacccgcaccgcgaaactaaaaaaccgcaaaaactccatcgcaaaaaatggtgcggtgcggtgcgattttgcagtttctgcggtttagactatcaccaacaattaaactatcacaaatacaacaaaacttgagcaacacatgtaaaaaaaaccataagacttaacttaaatatatatataaaaaattaagtttcaataatataataattagtataatttgggttgaacattcacatattggaccnnnnnnnnnntaaaaatttgtatttttataatgtgcggtgcggtgcggtttgaaccgcatattaacaattcaaaaccgcaaaccacaccacaccgcacggtttaggaaaaattcaaaccgcgacctcaccgcaaagaatttcaaaccgcatttttttgtggtgcggcgtggtgcgagcggtttgatgaacaccccta

SEQ ID NO: 160782 - DNA, 613 bp, Cannabis sativa
aactttaaattcacaatctgcgaaaaaacttgaaatgtatttgtttggatttatgaattttagagtttggggaagaaactgagtttaggaagatagattttgggggcttttttgattttgtgcgacattgtgcgatgtgtatgcgatatgtgtgcgattagtgatacaatttaaggtctgtttcgttgtgggattgtgtgtgcgatttctgtgcgattatgtgcgataaatgactactgtatctgcaattgttgaatttgtgcgattttgcttgatgtcttgtgcgagtttgtgcgatttatgactactgtgtctgcaattgttaaatttgtgcgattttggtcgatgtcttgtgcgattttgtgcgatttatattcaaatatgttgccaaccagcaaacagaattaaattatttctggtagtgcgattaatgtgcgatttatgtgcgagtttgtgcgatatagtatgttattcagtggttgttatgtgatttatgtgcgatttctatatatgcgatttataatctttctgtttgtatttgcagatggctccagaactcattctccccttggctgagcattttcctgggcgtatcacttaccgaggaaatggg

SEQ ID NO: 160783 - DNA, 628 bp, Cannabis sativa
  modified_base (135)..(138): a, c, t, g, unknown or other
gactaagatataatgtcacaacaatagatccctaagaaccaatagtaaagaggtcaagtgtacacttttgtattactttaaccaaactcctattgttgagtggagccatctaagatgtaatcaaacaaggaacannnngagacaatcaagaaagatttatgaaagtgacctatatgttagatgatagaggtgtatatcagaatccttttatctacaccaactcaaaatattagagatggtggtaactctgggggtggaggaatttttctagaaggatgtaaaaacccatctgtaataatttagttccaccagagaagctaaataacttagttgttttcaaaagcactagaaaagttattcaaactaaagaaagttcttaactgtctttagtctctattcctttttggatagaattagagatatgtcttctgtttattcaaatgcacttaataaacaatatagaatttaatatccctagaggagtaatgcatattaaaaaataatattgcataaatattttatgaacacataggaagtaatggtagagaaagcagttgcttaccacagacttacagttcctataatttgggtttagtcaaatacgctacatttgatctggatatcaaga

SEQ ID NO: 160784 - DNA, 531 bp, Cannabis sativa
gtttacgtggtgagaaaaattttgttatatggtgataaaaaaaagttaaaattgatattgtgtcataatttaaataatatttattttaaattttatgaaagaaaatcctcattttaaatttctccctacgcctctcaataccttgagacggccctgctttgttggattgagcgtagctcttcttacttactttgtaagtgaatagttgggttgagcgtagctcctattacttactttgttgggtttagcgtagctcctattacttattttgtaagtgaatagttgggttgagcgtaactcctattacttactttgtaagtgaatagtttgattgagcgtagctcatatcacttatttcataagtgaatagttgggttgagcgtagctcctattaattactttgtaagtgaatagttgagttgagtgtagctcctattatttacttttttgggttgagcgtagctcctattacttattttgtaagtgaatagttgggttgagcatagctcttattacttactttgttgcagg

SEQ ID NO: 160785 - DNA, 510 bp, Cannabis sativa
ttattttgtgattaaaaaattagaaaataaaagtgttatcaaacgacaccttagtttattgttaggtgtttagatgttttatttattttttttattttttgtgttttattattgaagacttgaagtggtgaaattaatgttggcgccaaatgatgctgaaatgttgatgtttgctcaaatgctaaattagaactgtaagccctaatagctgcaacccttcctattagggttgcgcagtgccaggtggtctagcaagtgtttagataaggagctacccaagagctccagcgcaaatgaagaagaactagggcggcaacacctatcaatctagatatatatgttttttgtcaattgcgccaactttagaggttacagtaggggtgtacgtcggccggtttagttgggttataacatatttttagggaaacttacaaaaatactggaattttgtgtaacttttacaaaaatattgtcacacgaaaaagtttacaaaaatactgtgtttttata

SEQ ID NO: 160786 - DNA, 535 bp, Cannabis sativa
  modified_base (37)..(37): a, c, t, g, unknown or other
acattagactcccaactgctgaagcataaggaacccntctcatgtcctctatctcttaaggatcagtgggacattgttccttagataggcgaataccaaatctagaaggcgtttgtgcctttttggcatttgtcattaagaatctctctaacactttatcaatgtaagttgtttgagagagagagagagagagagagagcaagggatctgttcttccagtttttgataatctgaataccaagaacataagcagcttcacccaaatctttcatttggaattgagtgtcaagccattccttgatgtcagtcattttcttgaaattgttaccaataaccaaaatgtcatcaacataaaggactaggaatactaccacttgattatccttgagttggtaaacacaaggttcatctttattttgttgaaagccataggtcttggttatttcatcaaaccttttgttccaagagcgagaagcttgcttaagtccataaatggacctattgagtttgaaaactttcttttcttgccctggaa

SEQ ID NO: 160787 - DNA, 518 bp, Cannabis sativa
gtcacaaataatatcactatctttctatatatttttaaaatagcaaattacatttctaattttaatactattattttgtttataatagacatacatcaaaatattatcttttagattatatataactcaataagtataaaaagaaaatataaggatattacaaaagttgagcaacaccgcgcgaagcggggctttgttccctagttaagagaatacaatggaaatgaaaacattcagcttagctccattccaagtagttgatctactaatgtaaatataagtcattgacatcaatacaatatctttagtgagtaaaaaacttcacttctacttcacctaaagaatgtttcaaatattcttgcagctgtcaaaataaaaaagaaaaaattcagcttatctatgatataagaatatttttatatcaggaaataaatttctatttaaggaaataaaataaataattgattttgtgataaatgaatattttatgtattcattgaatctggacaaaattaatt

SEQ ID NO: 160788 - DNA, 703 bp, Cannabis sativa
tatgtggaggtcctcatcacttttctgagtgtcaggaagatgtgaataatttgccaatggatgaagcaaaagccattggaaattactatcaaaataacaactttgggttcaaccaaggaggaattcgaaggaatagtgggttctatcaacagagaaattagaaccatacacagaaccaataacagactcagcaacaaagctctagtgaaaattctggtcttcagacagatttattattgcaattcatgacagaaactagatcttccattaaaggcttacagactcaaatggggcaactggcaactcaggtagcaacccgtcctcagggaaacttgcctagtacaactgaagttaatcctaaagaaaactgcaaggcaattaccctgaggagtggaaagaattatgatgggcctgatgtggtacaaccattgaatgaagaagttaaagatcaaccggcaccaactccaacatcaacagagaagaagactactgatagtcatgcaccacaacaacagtctccgccaatcagtatagatcatcatgtaaagataccgtatccacagagactccgtaagaccaatttagataagcagttctcaaaatttcatgaggtctttaaaagattacacatcaacattccatttgcggaagccttggagcaaattccaacttaccttaagttcatgaaagaaattttggctaa

SEQ ID NO: 160789 - DNA, 566 bp, Cannabis sativa
ttttaaaataataaatatataaaatactggccaattggttgaactattacatttttattttctcttaaaacatttattgcgattttatatatacaagtgttggggatatggagcaacaaatattcttttaatactacaaccaacatagagtgccaccaaacaatctatttttctgtggtaaggaaaatatctaaggtattcatgtcatttgttcaacctagaagctaaaaatgttattgaaggaatcattgtaatcatgatttgatggatgataaaatgtgctttatagtgaaacattaaactattatcgatcatgaatgagtgcttaatagtcacaaagttttcaactcgtggctttatttcttccatctttatttattttttttcataataattttattctttagtaattttaaattttttcgttgtattaatttttttttttatattgtgggtggataactttcattaattaattaattatgaatttattactatttaatatttctttgttctattattaatctttattcaacctataagttttattttatgtttttaatttt

SEQ ID NO: 160790 - DNA, 574 bp, Cannabis sativa
aaagttccaggaacttttcaatgctaagtattacaatgaagcagtcagaagtgctaagagaaaaaaattcactcatttgacttataaagaaaatatgagtgttactgagtacacaacgcaatttgaccgattggcgaggttggcctcgggaattgtgccaaccaactttagtaagaaaaaaaatatctggatgggttaaatgtgaagattagacatgatttgatgattactactaacgacagaaccacctatgctgaaatggttgataagacgctgcgagctgagggcgcagtgggatgtatggtagagtctggtgggactccggtggttggcggggctcctacccgtccagcttcaggttttagcaagggaggtagtggttcggccatagatcagaaaagaaaggcatccactgcaactagtggctcaggtcagaacaagaggttccgggggaaccagtgtcgaggcaatcactagagtggcaccgaaacccgatacacttaccaagagtgccccagttgtaaaaagcaccacctgggggagtgtaaaaggcaagggtgctttcagtgtggca

SEQ ID NO: 160791 - DNA, 539 bp, Cannabis sativa
  modified_base (398)..(399): a, c, t, g, unknown or other
ccgactacacatagcttgagaaaggctctggctacatgtgtagagagagccttgacctctctctgccacagacctcattcccctcatcatcagaagatcctatttcttgaagctgagatctatttcccagcctcaaaaaattcctcgataccagaaagaggttggcgcaaaggttttctagcgcaagtttgggtcttgggttggctggattctctaatagaaactacgccaacttccttcccagattcatctaaaaacacgccaacttttctctggaattctttatcagcctgaggaagacctttaagatcgctcacaagatctatgccttcaaggatcacttgtgaggatcgcccatgacgggttatggggttcccctagtttggattggtcggaanntcctcagccttggaatccatcatttccggctccaattgaggcttgaagtccttgggaacaaatggaaaaaggttggtgcatcttggtgttatgagtttgggaggatgaacttccgaactcagaagggacattctagcaag

SEQ ID NO: 160792 - DNA, 805 bp, Cannabis sativa
tactgtctagaaaaagaaaaaaaaaaaaaaaagctagcatgtaggcagagtttaagagagagaagcaataaatatacattggtatatctataaaaaagaaatgcttaaattgtgagtattaaaatagataagggtaaattcttaaataatttaataataatagttattggtgcaaatatttctaaagcaaatgtccttttttttactttttaatacctaaaataccctttattatataaaagatattatatgttttattcctttaatagaaattataaaaaacaataaattaaaacctgtctactgaatttttgtcaactatttttttattatataaaaggtattgtatgttttattcttttagattttgctgttgttgtagctgtctaatatgttatttaagtatataattagtttttttattaatatatcgtatgatatacaaacaatatacctaaaccaatatacatataccacaaacttaaacaaatatactattaaatgaattgttttccacaatatacagtagcatacaaaaacttataccacaatcataactcataagcagatataccatagtcaaaaattaatataccaccagtatagtgaaagaaaaatatacaaaaaacttaatttaatattccataagttttttttttttcttgttcattccttcatgaaatactaatgagcataaaatcaatatacctcggtcaaatataactatacctcatacttgaattaatatttaatagttttttttcctttctatccttcacggtatacatatcacatacaaacgata

SEQ ID NO: 160793 - DNA, 564 bp, Cannabis sativa
  modified_base (194)..(201): a, c, t, g, unknown or other
ttagcctaccacttagtaatgatagtatgtggaaacaattttcacataaatgtgcgctatatttatgtgtgcattgccgctaaattttattacatagacatagacatgaagacaattcaactctcacttaaattttactactggtgaaatttaaatttaacattacccctcacttaggtggcgtttggtaacannnnnnnnttttaattttaaaaacagaaaaataaaagtaaattttttgtttttaaaatacaaaaatgtgttctataactacttttgttttataattttaaaaacagaaaacaaaagtatgttttgtaaccatttttatttttcaattttaaaataaaaaaacataaattttgatttttttttctttttttaaattaaaaaatatgaatatcatttattttttatttttaaacaaatatataaaaatcataaaaaatcaaataaaaaattactcattaacagcttaaaaaaattcaagtaatttaaaatcacgaaacttattatctataacacaaaaaacgacaaagtcataataaaatatgaactaataat

SEQ ID NO: 160794 - DNA, 547 bp, Cannabis sativa
  modified_base (147)..(152): a, c, t, g, unknown or other
  modified_base (513)..(522): a, c, t, g, unknown or other
tgtcttggaagttgtttttgattgcgtagtagctgtaaactttcttcagtgtttccttgtctttgtatgcctgaccttttttgtaatgaccgcttaagtaacttggattagtaaagacaattagcactaatttctgttattttgatnnnnnnttatgaaattaattatttgtggaccccaatattagaaatgagtgttagagttataatttctcaattttagagattttattaaactctaggggtattatttgtcttatatgtgaattattcaatttttgtaatttttgcttggcgacaacggaaaatacgatggatggctagtttgatcacatgggtaagtttagagccttatttcttagtgggaattattttagagaaaataatacatcggggttaagcggggttatagaatttgaccattttacccctagtcttgggaaatacctaagttttgacttaaagggcattttaatctttttaattaagggattagtgttgggttttatgcccnnnnnnnnnntccatttcaatgtaatccattttat

SEQ ID NO: 160795 - DNA, 530 bp, Cannabis sativa
ttctaattttgggtccaagctctaggtctgggctcgggtttggttcttcgtctaggttctggtcttagtctgattcccagatctagacactgactactggtctgtttcaggccaagttattcgaatcctgagtcaagatctagatcactgtcacaggtctcggtcttgttctagttcaggtcctaggtcccatttcttagtttgggttcgggattgagactggggtgcggttctacgtcctggccctagttctgtgtccttagtctggttccatgtttgggtgtaagttcaggttcgggttcgggttccgattccttgattgggtttggatccgggtgcggctcctaattcgggtctagctctgatttggagtccaggtcctggtccggttacagttctagatctaggtccaatttcaattatgattccaagtccaagtcctagttccagtcctggtcaacttccggtaatggttccaatttcgggtcacggggtacgagttcgggtccacttttgggtttgggactggg

SEQ ID NO: 160796 - DNA, 534 bp, Cannabis sativa
tccatgaactaaactttccaagagccaacttgaaataccattgctgagcggcttccgacagagtagcagggaagattctgcagcatacattctcctcgtaccccttgcaaatccgtttgcatttccaagtacttgagatgggaaaggggatcttctctcccagtgtacatcttccacgtcagcattttaaacttatggggcaacggtaggagattgatctcaggtgagaaaggagttccgtgtgctcggtctagctaaagatcattgtttctttgtccagccatgccgtgaaacatacttttcagttcgtctagctgagcctgtacggctgggctaacctgctcggcattctggtcaatttgaattacatcagcatctttctgaacgggaatttaagtacgagttttgggctgcgagattgtcgtgacattctgatcgtctactcccctccttctgttcagatcattccttaggtcatgggtcgctcccaacctttcgaatacagaggttcctagctgcctcagcgattgattc

SEQ ID NO: 160797 - DNA, 772 bp, Cannabis sativa
  modified_base (708)..(720): a, c, t, g, unknown or other
tctatttataaaatattttttaaaaaaataatctagtttaaatttaaaaatttgctaaccatatcatctttttcaaaatttgttattcttgatatatattttattaaattaaaattataagatttgaaaaatattagttttaacattttatcttattggatattttttttaattaaaattaatttttgcaaaaataacatgaacttttgaaaatttgttagtttaggtttgaataaaaattttaaggtttctaaccataaaattttcaaacttatttttttttaataaaattcaaatatcctaaccataaaatatcttttttttttttcaaattgtttatttttgtaatatttaatttaataaattataagattaagaatataatattaggaatatctaaattgtcaaattcaagatattatattatattatctttttagaaatttaactaatttaaattttaaataaacttgaaatttgaaaattggttagatatttaaatttaagttagaattttggatatttaggagatttgttaggtttttgaatttttttgaaatattctctaacaacctaaattttaaattcgagttaagatatattttaaattttaaaatagagatatctttacctactttttagttatctgttacttgttgggtttgtaatgttttgattatttctttatttatttattcaatttttttnnnnnnnnnnnnnatttatttgatctaaatttctataattcacttgttgaaagattcaatgatct

SEQ ID NO: 160798 - DNA, 546 bp, Cannabis sativa
aacttgtctcaagggttgatcagttaacacttttatgggtgtgcttggaagtaaggtcgtagcttgcgagacgcatggattaggcataaagcgagtttttcaagtcggggatacctcgactctgcccccagtaaccttttacttacatagtaaataggttgctggtgcttaccctcttctcgcactatagtcgtactaatcgcatcttctgagatggctagatagaggagtaaagtttctccagttattggtttttccaaaattggaggtgtcgctaaatgcgtttaatgttctgaaaggcctattcacactcttctgtccactagaatttcttattacctcgcaatacattgaaaaatggcaaacacttatcagttgacttcaaaatgaatctgttaagtgcagccatccttcctattagggcttgtacttctttaagatttgttggtgatgtcatatttatcaaagccttgattttttcagggtttgcttcaatacccctcgcgttgactttgaatccctgaaattttcctgaggaaactccaa

SEQ ID NO: 160799 - DNA, 755 bp, Cannabis sativa
  modified_base (460)..(474): a, c, t, g, unknown or other
tatcttagtaaaaaattcattagtaaaaaattcataaacaaactagatatagtctaattttagaattataattgattagttaaaatcaattaactgtgtagggactaattgtctcaactagtatgagtaccatgagtctatataatagagcttccaataagcagatttagaatttaccaagtaaattttctaacttattaattcctccttgtaccactattaatttagaattgcactctcaattatatagaacactctaaatgttcaacgatatagatacgctatgagattatccatttattattatcctcataatcaatgatcctctgtagatgatctacactgagtagggactaatttaccgttacacccttcaatgcatatccttaaaacacttagctacctacaaataatattccagtgaactaatataatcactaaaatgagtactcaaccattnnnnnnnnnnnnnnnaagctcgaaggaaattatcatttgacttctatatccggatagaagctatagatttcgtatctatgattagcgctctcactcaattgaactaccatgttcttaacctatatgtcacaagaagaaccatttggtcgactttaatgaacagatttaagaacacaaataatgcatctgaactagagcctaaccatctcaagattgagattatttgatctacgattttctaggtgatattgaattgaatagatattagggtaagtttatcatatctgattcaagtt

SEQ ID NO: 160800 - DNA, 537 bp, Cannabis sativa
ttagatctatagttatacacttataattatatgtaatatgtttatctatagaattgaattttgttgttgcatattttatgagtgatatagaatctaacgtttggatcctcgggctgcaaagttattttgtgaacgatgtattaaactttaaaggaaaacacatgaaaaacaaattattcataagtgttcacaaaatatcatatctaatctatacatattcatacatgtatattttaaaaaaatagttgtacaaagtttctacaatgcaccccataaaaagaatacaccaatatattttttatttgtttcgttattcaaaagaattttttaatttaatttttttttatattcatgtatgttatagttatttaaaatatcttacaaaatttttgagaaatttggaataatttacaatatagaaagcagtgttcaaaacatttattttacatgcgtacaaaataaaatagtcacgcgtgcaacacactgtttgaacatagttttcggggtgttaaactttttcaaatttcttaaaatttt

SEQ ID NO: 160801 - DNA, 698 bp, Cannabis sativa
ttaatttatcattaaaatagtaaatcactatcttaaattacggtaaacatgtcattttaggtaaacttaattccttaaataaaataatctaaaacataatttatcattaaaatggtaaacctccatcctaaactgtatttttttggactcattattatctttttcaatgatattggtgttcatatctatattagttaacatttatttctattcccaatctaatattttattatgatttttgttctttattagtgttgttacataattaatacattataataatataatttttttcacttcttctactattttgattaaatataagaaaaagtttatgcatgatttgatgataagcttagactttgttaagacttaaagtgtaggtaaaatatctctctttcggtcatttatgttacaacgacaaaatatttttaaatttaattttatttatacttacaaattcatattttaaaaataataatattacttaaaaattcaataaaaatataaaattaaatttaaatttattttagaaaattaaactgaaaaaatattttatttttttcaatcaacttaaatttttattatttactatttattatatatgttgaaaaaaaaaagaaattaaaaagagatagaatcccaataatatatataaattttttctagtcttctatttttttttggacaacaaatgt

SEQ ID NO: 160802 - DNA, 611 bp, Cannabis sativa
aataagagtagaatgagaagaaaagaactagaatgaagaacacttcgaagccgatctccgtctcttccttgctctatctctctgagtttctctctctaatttgtagttttttagaattcttttaatttgtagtctaggaggttttatttatagtgcttcaagatagatgaatcctattagaattaagattctatttatagtggatagataaattcccttagaattaggattctatttataatagtattaggaaatatctcacttaaagaaaagagaactcatcttttaaacaaaagataaaaaaaaaaaaatcgcaactctacttgaaaatctatctttcttttttttttttcgctatcttttttttttaagaaatttcttgctgcgatgactgatagtatttttgccataactctgtcgatattactcaaaaatggacgactcaagatgttctggaaagctaagaacaagatctaaaactttcatgttgagctccaagtctaattttgccttgaaggttgtctgaatttgtaattaagttccaccttgtacaatcgagctcgctggcttctactattttccaccaaaatatgctaaaatccctccaaaag

SEQ ID NO: 160803 - DNA, 505 bp, Cannabis sativa
  modified_base (249)..(252): a, c, t, g, unknown or other
atcatagcctacatgacctaattgcaaatgccatagatatgtttcattattattattaatctctttccttttatggtttctaggtttagcaatattaaaaagttcgttattaagcgctatttgtatatctagtcataaaacataaagcacttgttctatgtaagcaacacatattgaaatcctttacgagaaatagtgcaaatagaactcaaaaaattcaattgttaaaattgtgtttgtaaacatgannnnctaatcaagtttctactaaaaatttaaaatttcttctgaaacttgaggttcaaatcccaataagagtacttttctttaaaaaaataacttttaccccttctaaaactaaaaattaaatttttgcaattaccctcttcctttttcgcatgtcagcaaaactggagagaggcctccttgcagacaaagtccattcctaagcacgcaattctgtgtccaacttgtctacgtcggatgagttaaaattattgatcat

SEQ ID NO: 160804 - DNA, 578 bp, Cannabis sativa
tgtcatgtggtttagttgacccagatatttactattacaaacttctttcaaaaaattcataattttaaaaattatcataatttttataacacaatagtatattttatatgacactcattcggtataaaaagaataatgaatattatattgcactcattcggtacatgtcaaatattaaaaattaaaaaaaataatcctttaagttttttaacaaataaaaaatagattctttttattttaaattattaattttaattcaatatatataatactattacatatataaaatattaaaaaattattctatttttcatttagaaataattgaataatagcaaaagaataatttataatattttatttatttaataaaaatattaacaattacttaatatatagatttctaaaataataaaataatcataaattaaattttatttttcaataattataacaatcgcatgagacacatgtatgtttataactatctcgcgagtgctcaactaatttcatacgatacttataaaattttagttactacaaaagagtatgataaataaattatagaaataattagt

SEQ ID NO: 160805 - DNA, 569 bp, Cannabis sativa
  modified_base (500)..(501): a, c, t, g, unknown or other
actgaaataatttgaggcgagactcctaaaccaccacgtttgaggcaagactcttgaacttgtaattgccaagggctaagcaccagtccatgttaagtggcgatcatggatgttgaaatgacttaaacatcactgagaataacaagttgagtgctaagatgtggtgatcgaaaaccaccttgggcattaggacatatagaatcaccactagggctgggcattaggtccaacatagtggtgattcctgttgggaatattttacacggtatagaacttttcataggctaaataagtatctttcttgcaactttagcattcagtctcactggtagagttagagattctggatcaatttttatacttctccaaaatcactggtccacccccagagtaatcaccatcttatcagtagattttctagcatcaacgcaagtctagaaacctgatttggtgtggcctaagagtatgaaatactactcttatcaactaacatatagttnntcttcttgatcttaagattcatttgattatcttccaatgttccctttctggattaatctgataccaac

SEQ ID NO: 160806 - DNA, 576 bp, Cannabis sativa
aaagattatgagcagcgatatctgactcatgacgtaaaattggtcgcagtagtatttgctttgaaaatttggcagcattatctttatggagaaaaatgtgaactttataccgaccataaaagcctcaaatatttctttactcaaaaagatttgaacataagacaaaggcgttggttggagttagtcaaggattacgattgtgagatcctttatcatcctgggaaggccaatgtagtggtcgacgccctgagcaggaagggtcccgggcagatagctagtatgatttggatttcacctcagttaacagaagacatggtaagatctagcattgagtttgtagtaggcaaacttcacaactttacgctgcaatctgatctgttagaacgaattaaagtcactcagaggacttatctagagttagtaaagatcagagaagaggttttagctagtcaagccagagattttacagtgtcagagagtaggatgttattgtttaaagctagggtttgtgttccaaatagtgtggaacttagaaacaaaattcttgaggaggctcatgttggaaattattttacc

SEQ ID NO: 160807 - DNA, 676 bp, Cannabis sativa
  modified_base (565)..(579): a, c, t, g, unknown or other
aaaacctcatcaccaagactgaggagggatggcactatgtgctttggcttcaatctcaagtttcttcttgctttcttcaattaatttcatggtttcatcataaattgcctcatagatcccttggtgaactagaaaggccttcaatttgattctccataggctgaaatcattcgaaccatttaacttttccacctcaaaccttactgaagccattaaaaccagttcttgattgcttgaatctgattcttgaaagttcgagtttgattcttcaaatgatgaagatgagtcttgattggttgaatgtgattcttgaactctaaatcctgagctctgataccatttgtggtgaatcctcaccctcaaaacaagttgttacagtagtaacaatgtccaagaacacaaatcaaaactaaaaccaatcacaaaactaaaacttgaacttaattgaaatacgacaaagaaaacttaacttgataatgaatgaatgatggatctttattgaataggaatagccagtagcacatagtagaatgagtccacgattacaactcaacacagtaagtannnnnnnnnnnnnnnctcacaatgagggaaatcacttcaagaatgatactcccttttacatccctccacacacactcactatgatcttggactttctctctctctctctctc

SEQ ID NO: 160808 - DNA, 716 bp, Cannabis sativa
  modified_base (173)..(173): a, c, t, g, unknown or other
  modified_base (233)..(244): a, c, t, g, unknown or other
agatcgtgaagaatccaaattgaagagaaggacattcggactcagatcttggtgatacactgcgatagaaaggatacaagggttacagatctgagttgaaggagaggtattatttcgctgcaaccaatgtaaggtttcctaaactttatgtgtgtttattatcgttttagaanttcatatttaggatgttaaacaacgtacttgtttgtgaatctaagatcctggtaaaatannnnnnnnnnnntggcctcagagccatggtaactgatttactttcaagaaatttgcacttaaaacaatttgtgtgtgatttggattgtttcatgttgatctgtgtgttatttgatgactgattgatgtttgtaaaatttgatgaaaaataattgaattttcgttttgggaattattttttttttggatagtttggaaacaattaagaaattcacttttttacagaacttaatttcgattttatttgaattagttaataatttttgaaaatcagaaaaatcagggtgtcatcacccctgcacgtgggcttcagacagtctgctgtctgagttttctcagtcaggacacgggcgcatgtctcaaatcgacattgggctcgcgtggaaaggctgcattcagcctcctgcgccgtgctccctcggtcagaatgccctctatgtgcgtgcagatggtatgcactctgcatactgtctgtaccacatgca

SEQ ID NO: 160809 - DNA, 537 bp, Cannabis sativa
caaggcaggcagttaaggaaaagttcgagcattagtagaatgctaataataaagctcgataatttatgttgtctagcatgctagataccttaaaacaaggtttgtaaacactctcatgactgcagaaatcatgaaccaattaactgaactgtttaggatggcgttagattaggctcgttttaaggcgactaagaactttatcaatgcacggatgaaacctcatcagaatatgcatgatcacctactccaaatggctagttacttccaggaagctgaaaatcatggagctattatagatcaagaaactcaagtgagtttaatcgtaaatagtataactccaacttttttgccctttacttcaaattatgtcatgaacaagttgacattcgactttcacgagttgatcaacaacctccagacatttaacaattttctgcacaaaggaggaaacaaagctcctagttctagtaatgctacggctggtacaacaagcctgaggcaaacattgcctccacttcaaaacccgcaaagaagaag

SEQ ID NO: 160810 - DNA, 542 bp, Cannabis sativa
tagggtctatgccctgaaaaacctgaaaagacatttacgattataaataagagttgaatattttgatatatgcatgaatgttaaattattaatatttaattttgaataatttatatgtatcagaaaattcctaattcaaacatgatgatgtgacttgtagttgcacaaagaactaagatcacttaaccataaataaaataatcatcaacatattaaagttttggaatctttaatcaatggttgctagtgtggttcattgatgtccgttatttggtacaagtaatctcgattcgaattactgatgtagtgtgacatctaagtgaatgtgttgtatataataaagattatgtatgacaatgatcgatatgaataaagctatctttattaaacttaccattgcatctaaaagagatagcttttttagttggaaaaaataaaagttcaaacgatcctgaaaaattcacttggctagagcttgaaagaacttaagaaactgtagatgggacatgaaatgcctcatagaaaaaataatagcaatcaag

SEQ ID NO: 160811 - DNA, 560 bp, Cannabis sativa
  modified_base (285)..(293): a, c, t, g, unknown or other
  modified_base (340)..(347): a, c, t, g, unknown or other
agtaatgcatatagaaaatgatgttgcataatgttttatgaacacagaggaagtaatggtggagaaagcagtagcttaccacagacttacagttcctgtgatttgggtttagtgtacactaaacttgagctggatatcaagacaatgaatagattgaaatgcactacttgttttatgttagtgcaagtgagagtttgttgggattttatgccttaaataaaacctatttcaatgcaatctgatttgctatcaatagaatattaaaagtcatttatgtttacatgnnnnnnnnntgtttatggtttaatgtgtacaatttctgttaaatccagaacatatnnnnnnnnacaattatagtgatgtcaacacaatggaaggtaattgtggttatatgcttcaaaagataatgtccattgattcatcaatgcactggatttacacttctgtgatagtcagcgataaagctttcttacaccttggataagtgttattttctttccagaacattggcaaagtatgctagtatcaaatgtatagagtatacattggtctgggaccga

SEQ ID NO: 160812 - DNA, 504 bp, Cannabis sativa
agtcacaacataagaatgatgattgatattagtcacaacttttttacttttaatcacaaattttgttatgattaaaaataagattttttgtagtgaccgttagcagaacgcttaacgaaacataaagaagcacacgataatttaatttgtaagcaaaacatgacaatcatatgcacaatcatacaaaattcattcatagcttgcactccgatcaagcaatctgatttagggccagtttagcatatcttttgaaaaagtttaaaattgcttttcaaaagaactgtgacaaaaaagtgtttggtaagcagttaaaaaacaacttattgaagaatttatggaaaaactacagctaaaagctaaagctgttacaacccaacttttaaaaagaaactgtctggattaaaagactataataaattgatttttactacaaatttatttaattatttattacatattacaaaaaaaaatattttttttgaaggaaaaaatatttaaaataaa

SEQ ID NO: 160813 - DNA, 641 bp, Cannabis sativa
gctggccggcctgaacgagctcataaggaggatgagctccttcaacttaagcatgaagctaagttgaagggaggtgtcagggctaagtagtatgctcatgagcctttggatgctgaggatgaagctgaggctgagcagatgaccccattgaagaggaagaagaaactctcggccacacctaggcctgttgaacatgcaattcgcataagggagcccacttcacctgttcggccatctcccccctttgctggaaaagggaaggttgtcatgtttgagacaagatcaatgttaggtgatgatggacttctgagtctctgtgcgggcggtcaccttgcattttacttctcttttgagcttcttgactttcatgccttgtgttttctgatggctattttctaaccatactatttttgttctatgtagacatgtctcggcagatgatcgatgctctgaggaagagaatgggctgaagctctagtgcctctcctccggccaagaagtcaaagggcggtgaggggtcctcggagaagagaccttttggagaggtgattaaacttttcgaggagctgactgctgcaaacccttctacccccaaatctgccaagtccaaggagtctggaccaccaacggctgggtctaaa

SEQ ID NO: 160814 - DNA, 610 bp, Cannabis sativa
ggaaacagaactaggatcgggaacaagtacccgacccaaacacaaacttgaacctaggacccagctcgtgacttgccacaagaaatggatacagactgggacccgagattgggatccatatctggacccagcgcttggacaaaacccgtagtcggtgtctgggtttgggaccaagcccttgacccgaaccctgacaaggacctgaacccacacccgtacttgaacccagtcccaaacccaaaagttgacccgaacccgtacccattgacccaaaattggaaccgaaaccgaaagttgttcgggactggaactaggacatggacttggtttcataactgaaattggacctagatccagaaccgtaacctgaccaggacccgaactcaaaatcagacctagcccgaattgcgagccggaccaaaatcccaacccaaaccaagactcgggacccaaactcgaacctgaactcagacccaaacatggaaccaaattagggacacagaaccacggtcagagctagaatcgcacccaagtctcgatcccgaacccaaactctgaaatgggacctgggacctgaaccagaaccacactgagacccgtgacagtgatc

SEQ ID NO: 160815 - DNA, 538 bp, Cannabis sativa
ttgagagaaaatgaattttattttctggtattctctctctctcaccgaaccctctccctctctttcacccctttccattttcaagcttaattttgtgaagagctagttgatttaaaatttcttggttgaaggaaaggtgttgggaggcttgaggcttattgtgcaagtgtttgaggtagttttcttggttttaatttatgtttcctttgctgaatattgtggtagaaacatgcttagattattttgatttttgggtcttgcatgtgtggtgaaaagattgcttaatcttgttagtttgtatgttaatcttgtgaaattgagcttctattgttgtgtgttttgtggttgagcttgggtagtgatttcatggtgtttctagattggaatttcaggtttaaaaggttgctatgctgctgatttgtaataattttgagttgggttgagttcatgctcttgagtttaagattttgatgagtttgaagcatgttttggtgtagcatgaaatctgaaattattgattaagtatggggattttgat

SEQ ID NO: 160816 - DNA, 651 bp, Cannabis sativa
  modified_base (519)..(519): a, c, t, g, unknown or other
tcggggttgctttctggtatgcttactttattgcctgtgcattctaccacaaagtctgctaaggctttgcctttgattactgttcaggtttggaaagtgatttcatactggcccaactctactgcccacttgagtagccgtccggaagcatctggcttttgcagtatttggcgtagtggctggtcagtgtatattcgaacaggatgagcttgaaaataaggcctcaacttccttattgctagaataaggcagtaagtgagtttctctatcaatcggtatcggccctcgacctcaatgagtcttttactgatgtaataaactgggtgttctacggtgttctcttctctgattagcacggcactcacggcatgttccgtgacaactaagtatattccaagttcttctctgtccagaggttttgagagtacgggaggttttgcaagttctgcttttagctcttggaaagctttttcacactcctccatccactcgagttgcttgtttcctcgcaggatgttnaagaatgggacacacttatctgttgatttgaaacaaatctgcttagctcggctatccaacgagtcaagctttgcacttctttggcttttgttggcgagttcatatcttggaaggcttgaatcttctctggat

SEQ ID NO: 160817 - DNA, 529 bp, Cannabis sativa
taatcccgagaaacccgaacctacaatcctaggttctattatactctctataggttacacaaattttggaattagggaaacacccaaccacggcactaaaatggacgaaaatcaaggaaatgaagtgtttgggggatcctgccctagccgattttagaggtctggcaaaaccgcctagccggtttgcaccagttcaccccaaacccttcacctcttgctcaattttccaccaaatgccaccaaactttctaaagtacctaaacaatgcgtagacaatattttccaaccagtattttacagaaaaacccaatgaatcaaattatgccattagagattaaagctttgaactcaaagcttaaacttgcacaaaactaactccaaacatcaaaaccaggttctcaatgccatattcaacttaaatgaacttagaaaatcaaaccttaaataaacgtaaccctaacagcccccatttcacaaaattcacacattcaacctaaagaaaaagcttcaaaaacatgctcaagggttc

SEQ ID NO: 160818 - DNA, 518 bp, Cannabis sativa
acattgagtaactctaaaagtgtatagtgacacttcaacgcgcatcactaatgagggtgactggaaagacaatttttagtgacacttcacacttgtcactgaagctttttgcatttattttctgcgtgtcactataggcatatagagtcaggttttgtcagactgaaaaagtaacaaccacacacatgaagtgtcactatatctttttttctttttttttcttttttattaatattttcagagatatagtgacacacaaaaagtgtcactatattaaatatttttctaaaaaaaaataatatttaatttgatttaatttaaattttatatattataaataataatttattaattatatacaaatacaattaaatataataataataattttaattaattaaatgtaaaatataatcatatttaatttaaaaggaatatctaatttttattttttaataaaacaataaacttcaataaaaaaaaaatatattagtaacaaaaaaaatcaaaataatata

SEQ ID NO: 160819 - DNA, 628 bp, Cannabis sativa
tcttaacaacaacttatccacttcctgttttagttctcattgtctctcggaatctaagggtcttctttttctgtctctttactgggtaggttggatcaatacttaaatggtggcagataatgttagggtcgatctctatcatatctccatggctccaggcgaattgatcctggttcgcctttaagaaatttattagctgctatttgagttgttcgtccaggttcttccaaatgtatacacactttgtgggatttcctgggttgagaataacctattccaattcttcaattggttttaataagtttctttcttcttgaacttgggggtcaagatctttgtcttttttttcattttcttcttccaagatcgtcattaattggtgaccgactttcctgtgctagaactctatgcgatagcaatcacgagccatcatctggtcgccttgcaccactcccacaccctctggtgtttggaacttcaaagataggtgttcaatcgtactgactgtcgttagtttgatcaatgctagatgacccaacaatatgttgtaagccgatggcaagtcaaaaactaggaaatcttgcgtaacagtggcggatagggatgcctcgcccaaggtcaatgcgag

SEQ ID NO: 160820 - DNA, 507 bp, Cannabis sativa
  modified_base (28)..(55): a, c, t, g, unknown or other
attgcataaaatacaattcaatataatnnnnnnnnnnnnnnnnnnnnnnnnnnnngcgttccaaacgagccctaaatctctattataacccctaaaactccactattgaaacataaagattctatttaaccttgcaaaaacaaatgttgatgacacaaagaatcataaaaaaggtatttcataaaatttaaaaattatgttactaattactattcctcctcgtaacataaaattttacagggcagagcgtttttttcataattttaaacaatttagagcacgagtgaaaattcttgacttttaaataggggtgagcaaaaaatctaagaaaccgaccaaaccgagtaaaccgaccgtccgaacaccaaaaaaaccgacaccgaaaaaaccgaaaaccgaaaaacccgcctttggttaaaaccgtcttaacatggtcggttttagtgtcaatggcaaacagaccgattaaacctagaaccgaccgaacatatatattatatataatat

SEQ ID NO: 160821 - DNA, 514 bp, Cannabis sativa
aaatcaaaattttaaaactaattatgcaatataaaaaattatttatttatttagaatttaaatattaaaaaatatattaaaaatttaatttgtaaaatatattgaaaaataaagtttacagaaacaaacttaaatatattttatttttatcagaaaatgtaaatttgttttagaaaacataacatttttttagtttaatttataactttttttcaaaataaatttatatttttaattgaattttgtaattagttttctttatttgttaaggtatgagtttataaatataaataagtttgattttttttcaaaaaatcttacttcatttaaattatttattagattctcaataattttggtttgattttttaagataagtgttgataaataaaataaagtttgaaagtattttttaaagtaaaattaatattttttagattaatttaatttttatccaattttttttatatattttttaaattaatagaatattataatttctttaaaaaagata

SEQ ID NO: 160822 - DNA, 752 bp, Cannabis sativa
tataattgtttgatccctttctcatccaaaaaaggtttgatcaggaagttataacaatttgacccctctctcgtaaaaaagatttggtcaagaagttataacagttcgacccctttctcgtcaaaaaggtttggtcgagaaccttttaaaaaaaatttaaaaagttttatttttaaagtggtgggttaatcatacatatatgcccctaaagtaattttaaagggtcatgctttataattacttgtcaaaagaaatgattactttattcacgattgaagttcaaaatattacattagtgatgcggttttgtaaagaccgcttatgattaacattttggatcaatgaataattacggtttattcatgagatttaaatattacttataatatgcatattgtggaaatttatttaatttaatatatgtttattatgctatatgtgaatttcttgttttttgtgattgtgttcggaagctgtggaaagcgacgtcgggccttttgagagtcgcattttatatgttttagaatattatttttggggtatcattgttgcgaattggaggtgttggaatttttggggtttggaaaatggctaatttacccctggagtttgtagccactttaataagttagaggggcagaaatgtctttagacaaagactctatttgtcttatttggtctcttttagtgctgaatataagtctaattacttaagaaattcaattatcttaagtgtaaaggaatcaaagaaa

SEQ ID NO: 160823 - DNA, 534 bp, Cannabis sativa
agattagaaactgttagacctccctgtcattacaaaatataatttcaggcaaagaggaaatcggcacaaaaatctacagtggttcaagtatatattcaccttaaaaatgattatgaatttaccttttgtaaagtcataagtcataatagagaattagatattgttacaaattggtcgataaattataatgattatacttaattattgagagaaatcaaccattgtacttaattaattactaaaggcaattagcatgttgcatatattgtcctcaaattactttaaaagcaatactgatttaaggaatataatatctatgttatatttcttgaacttacgttaaataaaaaaaaatacattttaaaaaatatacatagattttttaataatttttaaaaatatcatttatttttataataagggcctaaatttttattttgactcacatgataggcgtttggttggaaagaatgaaaatataggaataggaataagaatgtgaataggaatagaaatggaatggaataaaattta

SEQ ID NO: 160824 - DNA, 672 bp, Cannabis sativa
ttttgtagtgtttgtgtatatgtgtcgtatttgttgaaactagtattttttggtttgaaatggtagatatctggcagatctagttttctttcgaaatctgggttttccagaagttatcgacagtttatcgatagaatatcgatgctatgtcgatatcatgctaagaaaggtcagggatgaccattatcgacatgttgtcgacagtttgtcgacagtttgtcgatatcatgtcgattaaaaagcaaattaacatacataatttatttgagaatttgtcgacacaaaattgttgacacactatcgacatgatgtcgacaatcaatcgatatcacacttagcaatcacagaaagcaattacatcacattgtcgccaacatatcgacatactgtcgacatgctatcgatattccaagtatgatcacgcctatttagcaaacaaaattgtcgacacaatgtcgacatcatgtcgacatgaggtcgatattatcacacagaaaacaattaaatcacattgtcgataaaatatcgatataccgtcaacaaattatagacattttaggtcaaaatgtttttattctcattgtgtcgacatcctatcgatacacctacgacatcccatcgatatacattaacaacacagacaattttattggtcaaactactttcaatttt

SEQ ID NO: 160825 - DNA, 550 bp, Cannabis sativa
caataaaatataaattatatatactttaatactatctggaactccaatctccaaatcgtcactatcatattcaacatcgtcttcttcaaccacctgcttcatctttttcaacagacgatctgcaaatttccccttcttagacccaacattgttcctcttcctcttcgaagaaagatcagactctccactatcactaccctcagacattgtttcttttgatttgttcttcagattcatcgccttggaggacgcggatagagaagtagacgaacgtgttttcaccattactaaacatttagagagaagaaatgaaatttggaaaaaaaaaataaaataacacttatattgatagaaatagaggcggtttgggaggtttacaacccactttttgggtaaaagtttaaaaaaattcaaaaactgaacaacgtgcccgcgcgcccactttgacatgacctcctcatccactaagcgtgctcaagaagccaaaacataaagaaatggcataaaatgaaaaacggtaaaactaacggtatattcaataatttaaaaa

SEQ ID NO: 160826 - DNA, 594 bp, Cannabis sativa
  modified_base (46)..(70): a, c, t, g, unknown or other
aaaaacacagtatttttgaaaagatttctgtgtgacagtatttttnnnnnnnnnnnnnnnnnnnnnnnnntttttgtaagtttcccttatataaataactagtagaaaagtataacataataataatttccttaataagaaatatgtatgaatacaaattcactcaacaaagtagttggttttggtgccaaataaagcaagtgaaagaaaaattcaaaggcaacattaacattcaatattttatggtatattttatggtgagcaagtattcaagtcggcaaggatataagtgattggttcttgcacaacaggtgagtattagtatagaaaggttttggataggttaattacccttaaacacaaggtaataatatggatggcagtgatgaatacaccacaagaaatgtcacttttgccagcatattttgtgttggcaaaagtttggtattgcgctgataaaatgaaatttatttttgatgtgttggcaaaagggattagcaaattaaagttggtattataacttttgccagcacaaaataaaaagtgatggcaaaaatgactttttccagcgcgtaaatgcgttggtaaaagtta

SEQ ID NO: 160827 - DNA, 748 bp, Cannabis sativa
tgacaactgctcaaaaatcaaaaagtttggtagataactaatacataaacaggaagattacgagcaatggaaaaactcaaaagtactttacatttaatcaaaatatatttgtttacattgtgaatataaacgcaagcgaacacaattatattaagttcgaatgaaaagagtacgaggcatttaagataagagaaaacccaagttggtttacaaacttatctttacaaaaatgccactaggggcaaaccattaaatcatcttcctaaacaaagaatacaaggggggttaataaactcgagaaagaccatatacacatagcttggagaaagattggctacacatagcttgagaaagaccgtctacctatagaaggtctcgtagacctcattctccacatcaaaagatctcatttcctgcagctgagacctcattcccagcctcaagaaatttctcgataacagagagaggttggcacaaaggtcttcttgtgcaagcttgggtctttggctggttgggttctttagcacaatccgagaccacgccaaccaggactactttcttcttggattccttgtcagcctgaggaggacctctaagatcgctcgcaaaatctatgtctatttcggtggagacagagataaaatgtcaatggagcaacaaaaaataataacatgtataatccagatcaaaccaccatttacaagggataatacttaccctcgaaaatcacttgtgaggatcgcccata

SEQ ID NO: 160828 - DNA, 544 bp, Cannabis sativa
ggcataaaacccaacagccttatccacttttcagcataggtggttgtatcgtcagcagtaatcatcaggtcatgtctgatctttgcatttaatccatccagatatttttctttcttgctgaagtcagttggcacaattccccaggccaacctcgctaatcggtcaaattgcgttgtatattcagtagcactcatattttctttctgagtcagatgagtgaattcctttctcttggcactcctaactgcttcattgtaatattttgcattaaaaagttcctggaacttttcccaggtcattgtcgtgacatcatgtatcatagacaccatgtcccaccagaccagtgcatcttcttgaaactagaaagtggcacagaccaccctgtcattttcggtgacgcccataaagttcaggattctagtaatcactgatagccattgctcggttttcatgacatcaggaccttccagaaaaaatggaggagcttgcttgcagaacctttcatacaggggttccatccgattcattgccaccactggttcgg

SEQ ID NO: 160829 - DNA, 575 bp, Cannabis sativa
gtaatgggttttatttagggcacaaaatccaacagggacttcttaaggcggggatgaagatgtggatcctcaacttggggacccaagcagcaatgttggacctgtagaagaattagaggagatcgagatcgatccagatatcccgaccagaaagatgaagattggaaaaggtgtgttgctccaagtaaaatcagaattgataaaatttctgagagcaaacctagacgtttttgcctggtcacattcggatatggttggaattgatccttctattatttcacgcgttctgaatatcgatcccaacttccagccagttcaacaaaaacgaaggttgctggacaaagaacgagcagtagccctaaaggaagaagttgaaaagctacgcaacaacaactttataattgaagctttctacccggcttgggttgcaaatcctgtattagtgcccaaccgaacaagaattggcgagtctgtattgatttcacagacatcaacaaagcatgccccaaagactgttttccacttccaaggattgatcagctcgtagatgtaatagcagggcatgaaatattaag

SEQ ID NO: 160830 - DNA, 627 bp, Cannabis sativa
agttagttagggtgttacatgttgtgtgaagaattcgagatgaaggatctggggacaacaaagaggatattgggtatcgacataagaagagaaagacctcacaagatcatgctatcttaaagcaactacctcaagaaggttcttgataagtttggaatgttcaagtccaaagctgtatcaacaccattagcacaacacttcaagctatctgctactcaagctcctacaattgatgctgaaagaaaacacatgagcaatataccctatgccagttgtgtaggaagcctaatgtactcaatggtgtgtacaagacctgacattgctcatgcaatgagtgttacaagcagatatttggcaaatcctggtatgaaacattggtctgcactcaagtggacaatgagatacattaaaggtactctgaacactggattggtatttgatagcagaaatcaaatacatggtgatgtaactggctatgtagattctgattatgcagggaacatagatactagaaggtccttaacaggctatgtgttcactgtctatggagggtgtgttagctagaaatcgaatttgcaaaaagtggttgctttgtcatccactgaagctgaatatatggctgctaca

SEQ ID NO: 160831 - DNA, 580 bp, Cannabis sativa
agacatacacagggatcgaaatgttggacctagatctggaccgagatcctgacccagacccaaacttggacatgcactcgacacccaaacttggacctagaactagatcggggtccagatgtggacacaaacctggacacagactcagatccgaactcaaacacccacacatagaatcagacccaaagctagacccggacccggacccaaactcgaacacagaccaggatcagaaccaaggagttagacccagaactgaatccagacttagatcggtattggaactagcgactcggacccaacctagaccaagacccagattgggatcgaaatgctagacttagatctggaccgagatcttgacccagacccaaacttggacccgtactcgggaccagaacttggaccttgacccgaacgtacacccagatcggggtccagacttggacacaaacccagacacacactcggacctgaactcaaactcgaatccagacaatgatcagattcaaggacttagaattagaactgaatccagactcagatcgggattggaacttgggactcggacccaacctag

SEQ ID NO: 160832 - DNA, 657 bp, Cannabis sativa
  modified_base (28)..(35): a, c, t, g, unknown or other
  modified_base (66)..(73): a, c, t, g, unknown or other
ccttaaaaaacttagctacctataaatnnnnnnnntaaaaaacttagctacctataaataatattnnnnnnnnctaatataattactaaaataagtaatcatctatttatctctacaaagccaagctcgaaggaaatcatcatttcacttctatgtctagagagaagctatagatttaatatctatgattagcgctcccactcaattaaactaccatgtccttaatttatatgtcacgagaagatccattggtggactttaacgaacaaattgaagaacataaataatacaaccaaactagaacctaaccatctcaggattgagatcatttgatctaagaacaactaggtgatattgaattagatagatattgcgataagtttattatatcttatccaagtttaatatcggtcccttcccatgcatactccatacatccaatctaagcttactttaaccaataccctagaaaggacatagcacttatccaaggtacaagcaaaatacattgtagattatcatatcaattaaatcctatgtatagataaatcataagaattcatttaatcagataatattggttacttccactgtgttgacatcacaataaacaagaatatcaatgtgataagaatttggatgaatttataaataaaa

SEQ ID NO: 160833 - DNA, 667 bp, Cannabis sativa
ttgaaatccctagacagctgctcccaggaagttagtgaatgatgagtaaacttgttaaaccagctactcgctgctcgaacatgcgaggtggggaacaaaatacagcgtaaattgttcgttacattactcgctcgcattattgtgttaaatttattcaaatgcgagaccggatctgtggtttcgtcataagacgagacatgcaggtttttgaatcttgaaggaaaaggggtattcataatatcagggtgatacggcttaagctccttgtcagagtcgtatcaagatagtttacctaattcccccacttgatatctcttgaacttgtcctccagcttgtttatccgcaattggattggatccccttgctttggaccaagctgttggcgaaggtcaggttttttccaattgaagtgctctcgcagatccaggtgggagtaattgttggcagatcttgtcttactcatagatcgcgtcttactcattgactttgtctttgagtggctcgcagatttactggttcccatactttctcgatcattagcttgttgcgtactttctcctcgactatgggttttggatcgcctcaaagtcacacttgcttcttcacgctctgttctttccttccgagagcggtttgtcgtaattcccctatcagggtacgtacgag

SEQ ID NO: 160834 - DNA, 728 bp, Cannabis sativa
  modified_base (131)..(135): a, c, t, g, unknown or other
  modified_base (267)..(271): a, c, t, g, unknown or other
  modified_base (330)..(347): a, c, t, g, unknown or other
agtaagatcataatcttacttcgtttccaaaataattacatatttaataaaatatgtctatttaaatattatttattttttgggatattacacagatcttgggctaacactaagtgttttaaggataaaannnnntgaggggtgaaatggtaaatttatccccacttggtgtaaatcatctatagaggatctttaattattgggattagaacggtggttaaatttttacagtgtatttatatcatagaacatatagagtgttctatnnnnntgagagtgcaattccaaatctatagtggtgcaagaaagaattaataagttagggaattnnnnnnnnnnnnnnnnnntctgcttattgaaagctcgattatataggcccatggttcccattatagttgagacaatactgcttgtaagactcggttagttgattttaattaatccattataattctaatattagacaatgtcttatttatgaattttcactaagctagggctaaattgtgaagattagagattctagggtttatttgttaattaagtgactttaataagcctaattaataaatatgttaaatgccaattttatttgataattaaatttaattattaaataaatattttttgcatttaagcagttgaattggaaaatatggcatttgtgaaagaataggataaatagttgaaaaatagcaaaattacaagtggtgggcccatatcctatg

SEQ ID NO: 160835 - DNA, 565 bp, Cannabis sativa
aaaaaaaaaattacaacttgtaaataggtacaaaattataaaattgttatataattgattatttgattattttttaaaaaatatagtaaaaaaattagaatagatctatattattaaaaaaaatacttataattaaaatattttttaacattaattatataaatataaatatatatatataaatgctttttatgtatataaaaaataaaaaaaaaaatatttgatgtaaatgattaaataagattttaaaatctaaattataatttttttaataataaaaatttaagttacgaattttttttttataaaataaacacttaataattaaatataaaaaaattaattaaataataaaattttaacgtttaaataattaaaagatgaatattaataataataattattttttaaaataaaaaaaattaataaatgaaaaaattattgtattatttactttaaaatcaaaaaaaaaattattttgatgtaaagaattaaataattttttcagaatttaattataatttttttaaaataaaaatttaatataggaaaatatttttaaata

SEQ ID NO: 160836 - DNA, 537 bp, Cannabis sativa
  modified_base (84)..(89): a, c, t, g, unknown or other
atgccggtcatgtcctcttggcgccatgcaaaaatttcgatggcgcccttcagtgtttctattattttttctttttcctccggnnnnnngctctttcccagccagagtactttagaggagtcgaggtcgcacactgatatctcctcgacatcctccattggttctacaattttttcagaccccactcggggatccaactcatcttctgcagccatttctggctcaatggtttcccggaccatcagtacgggcaggtgggttgcaacgttgtaacattgccttgcctccccctaatttcctctcaccgtccctattccagcttcctgggtagggaactttaagcacaagtgtcgtatggacgtgactgcaccgaaatctaccagggccggtcggccgaggatcgcgttgtaagcggtcgggcagtccaccaccacgaaagtacagtatttgaatgtgcttaggggggtgtctgggcataaggtgacaggaagtcttactttccccattgggatgagcgtcgttccgttaaaccctgtg

SEQ ID NO: 160837 - DNA, 511 bp, Cannabis sativa
atgtctaaagaaaagtcagaactcaagaagtcaaaaagttttcttgagttagggcacaaaatttcatgaagcttagaataagcaagatgaaaggcagatgcaatgtggttcagatacaagctctatggctgtaaacccacatgaagacatgataaagaagagttgcagaaatttctaaaccctagggtttcctaagcgtttttttctacagcatagttgcattcaaagtgtaaacatgcaaagaaaagcataaaggaaatcaaaaacttactcaaagattcgaatatctgggttcaagcaacgtcaagcaagctagcagttgtatgaaggcactacgacaactttgaagccagaaaactctcttttcgctctgaagtttacttaacaacgaagggtgataaaatgggttatgtgccagtactatgggtatttataggcaatgaggtaattgcatcaaaaggaacctcagatgcctcagcttcccgcctcaaaagcgaatatgggaaatcaa

SEQ ID NO: 160838 - DNA, 593 bp, Cannabis sativa
  modified_base (49)..(60): a, c, t, g, unknown or other
aatttataaattacggagatttatatagaatgtgtgaatgtaatatgannnnnnnnnnnnataaaaatattttcaggttcggtgaccctgaagaactgattaggggataaataagtgtaatttgttaattacggagatttatttgaaatacatggatataatatgaggtatttgtgaaatagaaatattttcaggttcggcgaccctggagacccgattggaggccaaaaatgtcaaaacagttttagttagaaatattgatgggattattgggataagttgattttagaaatattggggtattttaggatactcgaagttggccaaatactctaaaaatagagatttcttagtggctaaaaaatgataagataactattaataataaagtttttattaatattattatattattatattattattaatattatattattattgtatatatacataaaacgaaacggtaagtttcgttagtttttatatatatatatattaagttttaagatataacagagaagaacgaagaacgaaatcctcgttcttcctccttccacaaaatcttttcctcctatattcattttcttcga

SEQ ID NO: 160839 - DNA, 861 bp, Cannabis sativa
aatgatatttaattaagaagcacaatatatcaacatattgcaaagagaaggaagattacaagaatttctaccattaattaagaagcacaatatatcaatgtgataaaaccaataacaaacacaacaaggatgaagcatactctatcacaaccacaacaacatcaagtgccgcaaaccaatgataatgcatataatagtctaaatgaattagtataagaatgggaaaaaagtattggcattactctagatgatgatgattaaaatgcagctacactaactgaacaagactatgcatgtattcctagtagtggcggcgtagcttgctatataccaagccttcctctatcacaattacaacaacaacaacaagtgccgcaaaccaatgataatacatatagtagtgaaattaaatcagtagaagaatgagaaaaaagtatggacattactgtttagaggcatattgtactctaaacagtgaaattatgtattctgtacacaataaaaggctaaaggccggaggaaatatgattttccaccaataaatgtaccactttaactcttgtacaatgtaagaataccactgtctgcaccaatatatacattacatataaataaatacaatgtgtaatgtagtgaagatatagtgatcacatatattaaattcatatgggcttaaaaattaaaatacatgcgactggtttgaccctactcagtcaccaaacagttcaatacccaatgcaatgtaaacaagaatgaaattacaccactccaatacaaataaataaacggtcgggctccaccatgactttagtctatgttatttcaatatttaacgaaaaaaaaaagttgaaaagcatgatt

SEQ ID NO: 160840 - DNA, 657 bp, Cannabis sativa
tgatcatgacttgtatcaggacgcctagattctctcttatgcttaatggctcatgctatggtttctttgaatcaaagagaggtttaagacaaggagaccccatgtcccctttgctctttgtccttgggatggagtatctatctagaatcctgaagaagattgggtctttagaagattttcagtttcatgatagatgtggagaaattaagcttaatcacttaagctttgctgttgatgtactattattttgtaaaggtgatttcaaaagtgtatattatctcctcaaagggttgaaactcttctcatgtacctctggtcttcatcctaacccaacaaaatcagcagtttattgcagtggaatgcaggagagtgaaatacaacgtattcttgatgtatcgggtttctcaaagcaagaagttccttttagatacttgggagtaccaatttgtgccaagagaatttcagcaaaggattgtaaaattctagctgagaaaatgacagccaaagttaagacttggagctcacgaaacttgtcttttgctggaagagcagtgctagttaactctgtgctgatggccatccactcctattggagccaaataatgatcctccctaagaaaatcatccaggaaattgaagcaatttgtagagcctact

SEQ ID NO: 160841 - DNA, 572 bp, Cannabis sativa
  modified_base (147)..(156): a, c, t, g, unknown or other
agattaactagtagttgcctaagtccttcctagggatttacccttagagataggaaaatttcagaatgatgaaatggttgtgtacttagtgtaaaccattactagattgatgaatgtcctgattgtgaccttaagaaaagctagaannnnnnnnnnaggtttgcatgtttgatagctattgtaagtgattaggggtggaccatcccatggtcattaagataagaaagtgtttatttcaacaaatactacttttctaagaaaatgactaagtttgaaaacaaagtagcatagtagaggagatatttttttttatcttgattccaaattattctatcatcttatttgatataagatggtcccactgcctctgttgtcttgacacatcgaagaggataataccatttagattcttagacgtagtcacagtaccttgtcgtagtgggagggtttcaaggaactcaccatattatgacttggtaggcacttgtgattaaaattcattgttagtttaaacaagtcagaataaggaactaagaagcaaagctaagagagctatggttaaaaccattcat

SEQ ID NO: 160842 - DNA, 536 bp, Cannabis sativa
atttttcatattaaataaaaaaatacagtatgaaatctacttcatttaacatccaaaacaaatgtcaatttccaggttaataaactggcaaaaaaaaaaaatacacatattatataaaaatacctctaatacttctatatattttttttctttaattgacactgaacatgaaccttcatgttggctttccgactatctgtctcaatccacttaattctcgccacatacaaaagctttcaagtacccaaaaggtcacgcaatccccatctacaaaataaataaaaataaaaacaaaggataattcaaatattgaccaataaaaaaagaattagaagagaaaataaacacactcgaaagtaaaagagaaataatcataaatttatgaaaacaaaagaaataactaagattgtaattcacaattttgtatatacaatcaaatagatcaatttgcataaaaataaaataaaaaaaaatagtaaaagatgagagagcggctgcaagagagatatgtatacacaatcaaatagattaatttg

SEQ ID NO: 160843 - DNA, 647 bp, Cannabis sativa
tgagttgattcaactgaagcgagaggctaagttgaagggaggtgtcagggccaagcagtacgctcatgagcctttggatcctgaggatgagactgaggctgagactgagtagctgaccccattgaagaggaagaagaaactcccggccacgcgcaggcctgttgaacatgaaattcgcataagggagccaatttcacctgttcggccatctcacccctttgctagaaaaggaaaggttgtcatgtctgaaataaaattgatgtcaggtgatgatggacttctgattctctctgcgggcggtcaccttgcatttttctttacttttgagcttcttgactttcataccttgtgttttctgatggctgttttctaaccacactgtttttgttctgtgcagatatgtctcggcagatgctcgatgctctaaggaagagaatgggcgaaagctctagcgcctctcctccggcccagaagtctaagggcggtgaggggtcctcggagaagagaccttctagagaggtcattgactcctccgaggagctgactgttgcaaacccttctacccccaaatctgccaagtccaaggagtctggaccaccaacggatgggtctgaactggtcaggagtgttcttgagcgggtgcaggc

SEQ ID NO: 160844 - DNA, 513 bp, Cannabis sativa
  modified_base (447)..(455): a, c, t, g, unknown or other
ctgagttacaaaatctctgtgacattcttggactcatgtagggtcataacaataccctacatcatgatcatgaagatctccgcgctgcgataaatctcgcgttcgaagaacaaaggcgcatgtttaccgagtggagagatagagagatggaagcgctaagggctcatcatacagagattgaaaatcgtagtcggcaagttaccgtgttgatacgaaaagcctatcaaactataggtcaacaacctctgaatgtcatccccctgggtgagacggacaaagatccagcgatgaatacttcccagactacaaatcgtcagccgcctaatccccggtcatgagttccacttgtgggccaagcggtaggcgggcagaccttgtctagtaattcatcaggatagatcgtacctaatggttccaacaagattaacggtgccattccacctgtcnnnnnnnnnaatcaatcgctaaggcagccaggcgcttctgtattcaaaaggttggggacaactcatg

SEQ ID NO: 160845 - DNA, 593 bp, Cannabis sativa
  modified_base (364)..(366): a, c, t, g, unknown or other
ggtagtaaaatgtatcaagttgtttgcaagctgaagctttttaaagagaaattgaggaagttaaacaaggaagcatattgtgatttgcatcagcaggtgcttgaggctaagtcttctctcgatagtattcaaagtcaactacaacagcagcctcttgaggaaagtttacatcagcaggaaagactagcccgtgagtatttgaaccaaaagcagcaggattactctatgtttttaaaacagaaagctaaagtggaatggattcaagatggagactcaaactctgccttatttcatgcttgcattaagcatagaataaggcaaaaccgaatcctctccattgagaatcaagagggcagcagagttnnngatcctgaacttattacagcagcattcctagatttttataaaagtttacttggaacaaaaagagagcagaggaaggtagtagacaacaatattctcagtaatggcccgattctttcttcaagtcaggctgagtttctaatacaggatttcacaaaggatgagataaaaaaggcagttttcagcatacctgcaaataaatctccggggccagatggattttctagtgg

SEQ ID NO: 160846 - DNA, 522 bp, Cannabis sativa
aatattaacgcatgtcgcaaatggctgggtgtatcacagtatctcaaggggcatataaccgcgtatatgaccattagaatcccgtgacacacccaccatttggaaactcggttaatgctctcgcgacttaattcacagcatataaaatcctaaaggatctagccaataatcagaagtaagtaaattttgtcaatgtgcgagtattcgaagtgttcgtccgaatacccgcgagtattcaaagcatgaaacagtgcctattcaagtatttcttatacagtatgcggttatgccaatttacaggtcattttttatgaaattacccaattttttacctaaaaaacgtagcctcatacgtaccccttacaaacgttcattcttaaaccccctcatgcatattagaaacccagaaaatagtgttcccactcaaaccaaaaacgaaacacagaggagattcgaaaactgaccttttgcttctgacgaaattgttcccacgattcgcccttgacagcactgtagaatcaa

SEQ ID NO: 160847 - DNA, 546 bp, Cannabis sativa
tcataaaattagaaaaatagaaagaaaaagagataagatgccacataaaaaatataaaaatatttttttattttcctttgttaagttaaagaaagaaaatttcatatttttatctccgatttgaccatttaaataatttaaactaaacttacaaaaaaaaaaaataataccaaaaatactaaaataaaaaaatcaatttgtataaatacatgacattgacaatcgctttttaaaaataaaataaaaaataaaattttaacttttgaacaaataaaaattaaaaatatatatattttagttgtaaaaaattattttaactatataagaatattaaatagtacaaattaagttcttaaaataaaattatttatatatatattgatatgaaactctcacaaaatttaaaaaatagaaaaaaaaaaatataaaacacttttattttcctttattgaggtaaaaataggtacctatttctatctctaatttgatcacttaaataattaaacttacaaaaaaaataacagtaaaaatgctaaaataaaaaaa

SEQ ID NO: 160848 - DNA, 613 bp, Cannabis sativa
cccaagaaccacaactggccattcaccattttcaatggcgtacggttgtgaggccatggtcccggtggaaacactgttcccatcccataggaggacgacttacaatctgacaacaaacaaggctttataacaagaggcactggatcaaatcgacgaactccaggatgagtctcaaatacaaatggcagcttatcaaaagaaggtggctaaacacttcaactcaaaagtgagaaacaggaaattcactattgttgatctagtcctaagaagggtcttcctagctacttaggaacccagagtgggggtacttgggccaaattgggaaggactgtacgaaattgaggacaaaatcggttctgggacctacaacctaaaaagatggacggaaccatggtgcctagagcctggaatgccgatcacctccggaagtattaccaatagttgaaaaataaagtttatgttctgtaaaaaaaatttgtaccgaacaaatatatacaacctttaacttatttttgtaaaactgagcgacctaaaaattgattttcatgtcacttaggggggtagtaaggcatatcacgcggacaagtgtagacagaccaaaattagcaaagta

SEQ ID NO: 160849 - DNA, 509 bp, Cannabis sativa
taaagcccagtaggaaaacaactaatatcaaaagacccttggtttaataaaattcctgcatggttagctttgtaaaaataaaataacttatcacaaatataaaaatgtataaacaaaatagagagaccacaaagaatcacaaaatcaagcatcaaatgcatatcacaccgtccactagacccttagctctgaataccaatcatagaaacgacatccaaaacctggtagtcgcatttgacatccaccataataccggggctcagatttaattcactccctatacagattctaggtctttcacctacaagtgagtgcacacctaatctacctatgatgacacaaaaattagtccatgaaacaacaatatgcaccgaacatgatcaacatggctctcataagtataaccaaagcagaaaaataataagcataacaaatgaacatattcctttttattttctagaaaattcggcagcataacagttgtattttgaataaatccaaaaatcata

SEQ ID NO: 160850 - DNA, 634 bp, Cannabis sativa
cggactacactatgtcgaagcacgccgttttggggctggtgaggtcagcgagtcttcagctgggggcgcgtggaattcgcgtgaacgcggtttcgccggggccgttgaggacgcctttgctgaaagcgtttatagataggagtgaggaggagcaggataagatgattgaggcttcgttatcgctgaagaatggaaggactccgtcggtggagaacgtggctgatgcggtgtcgtttttggcttcagatgagtctgagtttatcactggccataatcttgccgtcgacggtggttatattcatcatccaccctaagattattctattactgctagtttagtaagtaaataaataaaaatgtgtgtgtttattgtcttcagtttcaattcatatttggcattgcagattttaataatttttttgacttctcaattagttaaattattttgagataattgcggcaaaagttcaaaaaatttgagtatgatgccgattaatcctcaacctcaaaaattggcagtgaaaatacttaaggtgcccatttttgtttttccgttggtcctttttctaatcaattttttattagtccaaataataattttaattaaaaaaatttaaaataaaataaaaaacta

SEQ ID NO: 160851 - DNA, 532 bp, Cannabis sativa
tgtgtcaaaatttaattaaaatttattttaatttttattaaaagaaaaggccttgtttcaaatttcgccctaggcctctcatcaccttgagacggccctgtactattctacaattaactacaatacacccttaatttaatactcaaatttcacctggcaaacatttatactaaatttgaattaattaatgtgaaaatcaaattaaattccataactggccacggtcaaaacatagttaatttaattctaataaaccatcaaaactccacaaatctgaattaattaatatgaaaatcaaagttagccttagagatggaaatttatactgcggggatgggtaaccgtggggacccgcccttaatggggtggggattccccatcttggtggttaatggggcagtggtgggggacaatttcaatacccgaaacggggatggggagggggcggggataatactatccacaccatatccgactctgatatagatatatatatataattttttttgttttttttttcaaactttgagac

SEQ ID NO: 160852 - DNA, 594 bp, Cannabis sativa
atggttctgcagcgacttcgggaacataagttgtatgccaaattcaagaagtgcgagttttgactgtctcaggtgtcttttcttagacacattgttagtcaagataggatcaaagtggatttaggaaaaatagaattcgacagggattggctaagaccgaaaatagtgacagaagttagaagtttcttgggtctagttggttattattgtcagtttgtagaagggttctctaaaatttcaacacccttaaccgagctcacaaaaaagaatcaacgttttgtatagacggataagtgtgaatcaagttttcaagagctaaagcagaggttaattacaactccagtgttatctctgccttctgacaaagagaagtttgtggtttattgtgatgcatccagacaaggtctggggtgtgttctgatgcaagccaatcaggttattgcctatgcctcccgtcagttgaaagattacgaacagcgatacccgactcatgacctagaacatgccgtagtagtatttgctttaaagagttgtcggcattatctctatggggagagaggtgaaatttacactgaccataaaagtctcaaatat

SEQ ID NO: 160853 - DNA, 641 bp, Cannabis sativa
  modified_base (587)..(601): a, c, t, g, unknown or other
ttcttcaataagctattttttaactgcttaccaaacacctttttgtcacagcttttttgaaaagcagcttttagcttttccaaacgctgtgccaaacggacccttagtataactaatcaacaaagttgtacaactcactattagctgaaccttcctttatgtaaacccttatatcatactttgtaaacaatcattcgaggctaataggatagactaaaagagttttcttctccctcaattcttgtctcgctcataataatcatatttatttttgtaaacaaagctgatatttatattatcatacatcatatataaataatatattcatgcccccaaacataaatcattacttggcccgactattattatatactggttctgtcactacacactccctaagtccctctctctccccattatttctcattctattatggaaacatgctagcttgaaatggagccttttctatgcaaaagaggcctattgggccatgaatggaaatggatttatgggaaatttaagtggtatattaacttttgttaattttctacaaaaatactgcaggtggtattttttacttttttannnnnnnnnnnnnnnagtttcatactgcagtatactgtgctaagttttcactggt

SEQ ID NO: 160854 - DNA, 523 bp, Cannabis sativa
  modified_base (341)..(343): a, c, t, g, unknown or other
ggatggaactataggaagcttcctcgtagcgagatggtcatctcgcgttcttgttcttcgagtcgatccgacttttacacttagtttgcttattgcaagcaaaggtatgtgttactttctccattgcctcgctattctcctttagcaacatatggtttcttgttaatacactaagtaccaattcgtacattaattcctcgcctaagaccttacaatcagcgggttacaaatatactctgatacttatgcaattaatgagttattccataaaaagttatgacaccgattcacattccctttaccttgacacgtgtcttccagccgaatttcaggtataacannngccccttaaaaagttctttttttagtaaaaagagctttttaataattacatagggcattttttccaaaatcttttcttggaaagggcacctcctttgattctggcgattgtatggtttcgaagatcattatgaatcgcctattcatattctgcacgattcccaaccattagatttctcaa

SEQ ID NO: 160855 - DNA, 537 bp, Cannabis sativa
tttataaattattctttattacacttatctataaataattcttatatatctgataatttaatcctataaattaataggagcattaacaatgaagaatacattgctgccattatcaatgagaaaagactcttcccaagtcaaactgttctaagaactcctcaatataataatatcattactattaatggcattcaaaatcttccacaagaggtacgtacaatatttttatttaacttttaattaactaattagtttcttttctcggtatttatagtgcttataattatttttggctttacataatattatatactttatttcaataactatattatgctttattagcaaactactttttggataaatgcatcaatctccatcaagaatttaagacaacccttctggtacatgacttgcataaaatgccgccagaaagcagatcttgacaatcaaacatcatgttttaactgctacaactgcaacgaatcatctgttgagacagttccaaggttcatattaactcaattaagcacaaat

SEQ ID NO: 160856 - DNA, 505 bp, Cannabis sativa
aatgtaatagaccagatgttgtatgttgttttcctctctgatcagtataacactcaagacatgctccgttacagctaagtatatcttaagttcttctccgtctacaggttttgagagtataggatgttttttcgagttgcgtttttagctcttgaaaagctttttcacattcatctgtctactcaaattgcttatttcatcgcaggatgctgaagaatggaacacacttgtctattgattttgaaacaaatctgttgagtgcggcaatccgaccagttaagctttgcacttccttcattcttgttggcgatttcatatccaggagggcttgaatcttctctggattgacttcaattcctcgagcgttgacaataaagcatagaaacttaccggagctgactccaaaggagcactttaagggattgagtttcatgttgtatttcttgaggactttgaagcattcatccaggtcatctatgtgccccccaaccttcctggattcgac

SEQ ID NO: 160857 - DNA, 540 bp, Cannabis sativa
tgacacactaaaaggaaagtgtttctactacaatgaaaaaggtcgttggacaccccaatgtcctaaacttcttgcaaagaaactaatgaattatttcttttcctataaactaatgaattttagtgaattattatccatttgaattattaattctggacctactaaccatgtttatttgtttttcttcttattacagcccaagctgcttaaactcggatggtatcttagcgagttgaatcggaaagttggacaaaggggtggagttcgtccaagacaaagatgaagctctttttttatttttgaattaattgttttagtttcagaacaatttggatttcaattattagtttggaattttaaaatattttttttcatattgttgcaaacaattcctttaattttgaaatttttttataataaagttttctatcttgaaaacaaattgtaatttatgatttgagcttcatttactttatcttgtgtaaccaataccaattatatttatatgttttaataattgtatgtgtatgtatttttatt

SEQ ID NO: 160858 - DNA, 554 bp, Cannabis sativa
tgtaatttaaattcaaatttacttaatattttatcataatttattaatcatttgtatttaaatcaatattttttttaaaaaaaaaaataggatttgatgcaaaagaccatttgtttcaaattccatttcactaattaagaagacaattattattaaaaaaaaaaactgccaaaatataattattctcaattaactattgctaacttaatactctatataaagcacacataaaattacaatcacatggaaaaaaatggctttcaatttgatgatatgagaaatttagttttcatattgttggcacttcattgttagagtgaagaaactatataggattttaaaattggtttcttcaaaggtaaatttcttatttttttaatttaaattttattattttgagtaattctttaattttatcaagaagttttgagctctttgtagttaataatcttgcttttatatattattgaaatttcatttggtgagtccgtgagtggagaaataataatcttaaaattgatttcttaacgaaaaggtaaatatatcatgttata

SEQ ID NO: 160859 - DNA, 657 bp, Cannabis sativa
taaggatgaaccaaaatactctttaaagagcaaattgttgaaaatgtatgttgtttagaaattgtaagtaattactaaataacatgacttattagaattttatcaatgacttgtggattattaattatggatactctataaccattaaaattaaaggttcttgtgaatcataattaatctaatacttgaggtgtaagtttgactatttgagaaaataaatgatcttttctagaaactaggttcctagatcgatcgctcgcgctgatcaagtcaattcttaattccacagttctagtattgtgagatggacaataaaatatgtaacccttagaccttatagcttttctgatgaaatgctcatttatggtatttgggcccagatcttttctttgacaattgtactctaactatatacgggtatttataaaatgtgtacatatggcatcaagtcagttttcaaccttctcacaactcaaaatatgtttgagaaacaactttggttagaacacgatttgatgtgtacactcccattgaagaatatcaatcgataaagatttatgaaagtctggagtttgctatgcaggctctaccccatgtccaacaatttttagtttcgtaaatctatcacacaccataatttgggtgcaccaagcatat

SEQ ID NO: 160860 - DNA, 551 bp, Cannabis sativa
gacgggtttgatgtgtgttttttctggagagatatgagttggagatgtgtgttttcctggagacgggttggatgtgttttctggattgatatccaattggacagggaaaagaggcaaggaaggcaaaggttgagcactttgatgttcgtgcgccataacattagattgaggaaaaacagcttgatgattctgaaggatttcccaaaactgatattcatgtgaatgctctccctgaataccagatttgggaaagaaaggttgatgttcaaagaatgtgacatccatagtgttataaaccctttttgaaattggagagtaacatttgtaccctttttgagtgttggaatacccgatgaagatgcacttgtgagattttggatcaagttttgttctgttgtgatcataaacatgaacaaaggctgtacatccgaagactttgaatggaagatctgaagaaaaagctgagatatgagggaatgtagcaagtaacaaatttcttggggctttgaattgtaatacacggctaggcatacgattgatgaggtaggtgg

SEQ ID NO: 160861 - DNA, 504 bp, Cannabis sativa
agaggactattcagatcttagaagacatgctacgggcatgtgtgcttgactttgaaggatcatgggtaaagtaccttcccatgatcgagttctggtacaacaacaactataaggcaacaatcgggatagccccgtacgagcttttatatcaaagaaaatgtagatcacctaatcactgagatgaagtgggtgaaagaaaattcttgggtcccgaggctgttcagagaacaagtgaggcagttgataaaatcaaagcgcgaatgctcgcgactcagagcagatagaagagttatgctgatccaaagcgtcgagatattgattttcaaatcggggacatggtatttctccgaatatcaccgatgaaaggcattaaacactttggtaggaaagagaagcttagcccgaggttcattggatcttttgaaattctcgagatgatagggcaagtagcgtacaggttggctgtgacagtcagtagtcctgtgatgcgtaaggggaaatacc

SEQ ID NO: 160862 - DNA, 708 bp, Cannabis sativa
aattcttccaattcaagtgctctcgcgaattcggttgggaataattgctggtagatctcgtcttactcatagagtgcgtcctactcataaactttttcttaaagtggctcgcgtatttacttgttcccatactttcccgatcattagctcgttgagttttctcctcttcgagttgatcggctatgggttctggatcgtctcgaagtcacacttccttcttcacgctctgttctttcctcccgagagcagtttgtcgtatttcccctatcagggtacgtacgagtcctcgctctatgggttttggaagaacgttggtgattcctagcaggtgatctctgttctcttagttgagttccaagatcctcctcattttcatcagggatttcttgttcatcagtttctagttgtctcctttctggctgttcatcctgattctcagggggtgtctcattttcctcgggttgttcttctcgggccttttcctgtctcttggttcgtgagccacgaggtctgccttgtggtcttctcactccaggttcaagttgattttgagcgttcgtcccctgcgtcgccctggccgaagctgcctcacattctaactcagcattttgacgttgggcttcttccagacggcgtctcaggcggcagctttccgtttcataagttctttctcccatagattgggcacctccacggttgagctcttca

SEQ ID NO: 160863 - DNA, 637 bp, Cannabis sativa
cctctataaaattcatgtgtctttttattgttttatcatatatttgttattataaatcatttatcgcttataaaatagactcattgtcgttggttaaaagtgaagtgaacattttggtactttcattgagagaaggatcacgaatcgctctttattcaacatccaatgccaatacgatggtgcaaactcgtagaggcctgactgatccggcaaattcacagacgctggatcctgcatcacagaacccaaggaacacgagggttccgcctgctgttaatcctggacagctagcgagcgtggggaatggtgaaacagttcctatagatgaaattgcgcctggtgtgcaagagactggaaataacagttccgcacccaaccagggcattcataatacgactgtttcgcctggagccaacgcccagacgactatcggagatgccactgaattacaaaatcttcgtgacgcactcgaactcatgcagggtcataataataccctacatcataatcaagatgaactacgcgtcgcagtaaatctcgcattcgacgaacaaaggcgtacgttcaccgaatggagggatagagagatggaggcattaagggctcaccatgaaaagatcgaagatcgtagtcggca

SEQ ID NO: 160864 - DNA, 560 bp, Cannabis sativa
gaggccggctacgtgagccgggtttagaccggtcattctccggtcgacgtcgaccattgtggtagagagaagcaaaggtattaataagtttgaaactcttttctttgtttctcccaattgcttaaaactcttgaaaagggtctgtgactgtgtgtgtctcagacttagtgaagtgaaaaaatgggcagaaaaattaaacaaaagaaagaaagagtgagaaactctaagaaagagagagccttttagagaagagagagagtcttttgttgcgtaaacaaagctttggattttatagctgtgaattagtggggtccactctaagattttcattcatttacttttaaatcactaaattacgagtatgggtggcaatattgacgaacacaactccatatttaggtgtttgaggtagtggtgtttgggtttgggtggtgtttgaggtagtggtgtttgggtttgggtggtccaatatgatgttgtgcggtgcggtttgcaatcacaaatacaacaaaatttgagcaacacttgtcaaaaatactataagacttgaaaataaatat

SEQ ID NO: 160865 - DNA, 542 bp, Cannabis sativa
  modified_base (509)..(513): a, c, t, g, unknown or other
tgtcacatatcaataaaattatatacatacattaaatcgtctgtattatgctaacaaaattatatactactattatacatagcaaaataaaaaataaataccatctaagaataataatataccatccaagaaagtagaaatatactgtacaacaaaatttatataccaacaactcacaacaacccataaaaaattttaaaaatcaacataactttaaaataaaaaatattttaacaaaactaatatagatataccataatctttaagtaatttgcttttaattttaaaaaaatatatatatatgaaaaagaaagggtaaattgcggcataaatacctaatgttttaaattttatacacttaaatatctaatgtttatttttggaggcaaaaatacataatgttacaattctcttataccgttactactatatattttttgctaactcataaaaatagacacgtggatggttcagatgcattacagcattacatttatttttattttatnnnnnaacttaatattcttaatatcagaaactaa

SEQ ID NO: 160866 - DNA, 561 bp, Cannabis sativa
tttcacatcaatatttcactcatgcctaaagtttccaaaaaggaatggggtagggtgtctaataggaaaccaatagtctgctcgggaatgttataacctctgtagtggccaaggctaagaaggaagtatcctccagccagagcacagacaagggaaaaacatttccaagtagggaacttcccaaggcggggatgaagatgtagctcctcgacttggggacccaagcagcaatgttggacctgtagaagaattagaagagatcgagatcgatccagatatcccgaccagaaaactaaaaatcgaaaaaggtttgttgctcgaagtacaatcagaattgataaaatttcaaagagcaaacctagacgtttttgcctggtcacatgcggatatggttggaattggttcttctattatttcacatgttctgaatattgatccaaactctagcttgttcaaaaaaaaagaaggcttttggacaaagaacgagcagtatccctgaaggaagaagtggaaaagctgcgcaacaacaacttcataattgaagccttctacccggcttgg

SEQ ID NO: 160867 - DNA, 771 bp, Cannabis sativa
ttaaagagaaaaaaggaaaatatctttggagagaccttagaccgccaagtcacctccttatactataaccgctgttcgcgcagttaatttaaaaatattttattaatatactatataatacatagaagggaattaaaaaatgataataaaatacatataataattaaaataaaaatcaatgttttaaattgcacttgaactctaaaataaaaatcattgagaacaatttttaaaatgagtttagatctatctattaaaatatatatagttaaaagctagatattctctattttttctgcatacatgaattctctatactatgttatgagtcatcttttgccaatgatgaaatgagtcatccattttatatttgatctatatattcaaaatcaatgtagtattgtttttttttcgttaattgtgtgaaaaaattataagggaaaaaaacaggaaaatacaaaaaggagaaaaaaaatataaaattattatgggccggcccattcaacatttatacagtccacatacaaatatttacaaaaataccacatgctctaaactttcagccgcacggactgaacgatgaatatgaacatacctcgatcgttttaaaatagcaaaacaaccaaaatgaaaccaaaacgagggaaatacaaccattaattctagcgaaattaactggaaaataagacctgcaatgatctaaacagaaatttacgaaaaaaaattagaaaaactgggaagaaactgaaattacacaattattttcggttt

SEQ ID NO: 160868 - DNA, 529 bp, Cannabis sativa
tgtaattaaaaatttaatttattaaattaaaaattatcatataaataatatgtatttttatggaaattataatttttattatgtattttttattataactacaaaatatataaatttttcattattttttctaatcatatattttattttatttaagattactggtaaagtttttttttaaaaaaattaaatagtttacagtgctaaaaataaagtttaaacaaatatttactacgcatatataaaaaaataattatgaatacaataaaatattttaacctaattatggcactgtaatttggatttttttaaaaaaaattataagtgatactaaataattacaaacgtgcacgaacatgaaaacaaaatcgaaaagtttcttgaatgcagaaacaaataagagtgccaaaacaatgattttaagggaaatgcactatatatatagatattacatgttacacaaagtattggataattctatagtttatcctctaaaagagttatgtcggtacactacttaactgttttt

SEQ ID NO: 160869 - DNA, 507 bp, Cannabis sativa
  modified_base (46)..(46): a, c, t, g, unknown or other
ttgaaatgtgaggtttaggttcgggtttggtaaaggatgacatttnttaggctcatgacctaattacctcaatttatcaaggacttttttttttctcaagggctcacccaaaatttcactctcaacccacaatattcactcaatctagttcccactctcttactatatgtatgtactatatatatatgtatttttttttcttttttttttcaactcaactagataaagagagaaaaaaaaaacaacctttttcattgataaggggtggtacaccctaaacttagccttaaacttgccattttttttctctctctctcttcttttatttaatattatgattatacatatatgtatatatatacatatattttttttctgtttttttatatatccatatatagcaagagaaggaatctagtgttatgtgaattacaactctcaccaccccgactcacatcccatcatgtctctagtatgaacttgttttttccacatcttgcaaagatc

SEQ ID NO: 160870 - DNA, 512 bp, Cannabis sativa
  modified_base (59)..(62): a, c, t, g, unknown or other
  modified_base (290)..(299): a, c, t, g, unknown or other
  modified_base (383)..(384): a, c, t, g, unknown or other
tcattctattttctcttaagaaattgaatgacgcacatgattatattcccgacattctnnnncgaaatgatataaatccccgatcttaaaatcttctactaatatatgcttactttaggcaaatcatacttttctatcccgaaatgatataaatcctcgatcttaaagtcttctactaatatatgcttactttaggcaaatcatacttagagttagattagtagtggtggtcaaagctagaataaaactcattgtatatttggtataaaatttaagtctttgactttaannnnnnnnnnccaaatagaaattttatatttctatttccagaatacaatacagttcaactttcacaagtaattaatatccattttctgtcaatnnattcaaactgtatgttagtatgaaatatgagttagtagtctgtgaccaaaatccacttggactattctaagaactctttaatataatagacctaagtcatcaaaagaccacagccacattcttatata

SEQ ID NO: 160871 - DNA, 858 bp, Cannabis sativa
  modified_base (39)..(60): a, c, t, g, unknown or other
  modified_base (785)..(785): a, c, t, g, unknown or other
gtacataaacaatcactgaaacagtaaaattgaataaannnnnnnnnnnnnnnnnnnnnntaacaatctcaataattcaggaacggctaaaagttcaaggggtatgattttgtacgtatcaaaattcgatggaaaaaaaatcctaattaggctataaagtaaaaaggtgtgaatctttgaataaataataataacttttaagaacggacatccttgatattcaagttttgtagttacaatacaattactttttatgtcaattatgtgggctaccattagtctttcatttcataaaaatagtaaccaataatgtaatatcttaattgggttatgccaattattaatttcaattacaaaagaaaaacaaatagtaatttcttccaatccaaatcataaataatcttcccatccatccaaatcaaatatcttccaataaaagcatatattattgtttagggttctaaataaatctacaataagcctacgagtactttagaataatatagtccatattttgtacgttatcggttacaatctttattatgagattctttcatacccacatataatactcttgagtaaagtgatttgatgttcataaacgttgggcatctttacaatgtgtatctctaaattggcataatttcagggtttcaatttttattatttcttttttataatatgtttattgtagttattataataaatattcattaagtttttgagaaattttaaatagttttcattgcaaataaaataatttaatatatctattttatataaantgtgcctatataactgaaattcttggtttatgagaaatttatggatgacttttcatttttatttaataaaata

SEQ ID NO: 160872 - DNA, 595 bp, Cannabis sativa
ccttctcttctggctactccaccatgtaaatttttttttttcttccaagtcaccatgaagaaatgtagttttcacatcaagtgtttctacttctaaattcaagcgagcagctaaaccaagaacaactctaatagaggacattttcacatgagaaaatatttcttcaaagtcaatacctttcttttgactgaaccctttcacaaccaatcgtgccttgtaccgttgtgagccattgttttcagtcttatgcctataaacccatttgttcttaagagctttcttctctttaggcaacttcaccaagtcatatgtgtgattctcatgcagggatcccatctcttcttgcatggctccatcccactcattctcatactcatgtagaatggcttcttggtaagtttttggctctcccccatcagtgagcattacatactcatgaggattgtatcttgaagttggtttacgctctcttctggatctccttactggagtttgaactggtggtgttggaggtgcttcttgatcttgttcagttggctcaccatcatcatgaacatcataatcaatattctcaccacgatcttcttgttcatct

SEQ ID NO: 160873 - DNA, 601 bp, Cannabis sativa
  modified_base (216)..(227): a, c, t, g, unknown or other
ctttcattgagagaagaatcaagaatttctctttatccaaaatctaacgatggtgcaaactcgcataggcctgactgataaagcaaattcacagatggtggatcctgcattgcagaactcaaaaaaacaaaagggttccgccagctgttaatcctggacagccggcaaacgtggggaattgtgtaacaactcctatagatgaaatcgcgcctggtnnnnnnnnnnnngggaataacagttccgcacccaatgagggcattcataacacaactattccgcctggaaccaacacccagatgaccatcggagatgctaccgagttacaaaatctccgcgacgctcttggactcatgcagggtcacaacaataccctacatcatgatcaggacgaactccaaactgcggtaaatctcgtgttcgaagaaaaaaggcgtatgtttaccgactggagagatagagagatcgaggtgttaagggctcaccataagtagaaatgcgagcgtaacatggagggtctatgtcatacaggcataagagaatggcattactttttgtatagtgtgataaacatgttattgatattttatactgtcttgctggg

SEQ ID NO: 160874 - DNA, 535 bp, Cannabis sativa
  modified_base (480)..(498): a, c, t, g, unknown or other
acccaacatataattatattatgggttaatcaggtaataagtgagattatgatcctactaatctagttcaacaaaaatttcaaatttgatataaggggataaataagcgtaatttataaattgcggagatttagatggcatatgtgaatgtaatatgagttactggtgtaagaaaaatattttcagttttggcgaccttgaagactcaatcgggggccagaaatgtcataacaagcttaattaatagaattaatgaaaatattgtgataagttgataatgtagatattgtggtaattaagagtatgtgagatttaatgtagcaccctaaaagtagaagtttcttagtagctaaaaaatgataagataattattaataataattttttttattaatattatattattattattattataataatattcttttaaaaagtttatcgtgtttaaagtttatatatatatattgtaacaccctnnnnnnnnnnnnnnnnnnncgtgatttttaaacatactgtgtagctcgttgctaat

SEQ ID NO: 160875 - DNA, 596 bp, Cannabis sativa
ttttcaacttaatttaaaatttaacccactttatttagggatttgattgtaaaatggtttataactttcgaaatttacacaaaattaatgtgtatgagtttttcttaaatcaatttttatttttcttaactaataatgtaactgtgtctcgcacagttgttattataacttattaaaaaataaagcagattaagttatgattatataatttttatttatattttttaggagataaattcatactgtaaatattttgtttgttaattagaaaagtgaaaatattttaaaaataaaaatttttgatactttaatttttaaaatgataaactttaaaaaaaaaaaatcactttcaattttttttaagataaggtaaataccattttaagtcttgtattttgcaaaagcgatttttttgataaattaatccctaaattatataaattttggcaagttgatcctcaaattatatttttttaataaattggttcccaaatttatttttttgaaaacataaagtcctcactcttaaatgatggtattttatttatttagttttgtattaattttaaatattttatattaatattcgttatcaa

SEQ ID NO: 160876 - DNA, 798 bp, Cannabis sativa
tttgcatgaattgagttgttgctgtgttgctgattattgttgttgttttcagaagcttaaatatgtttaattgagtggcgtcaagcaggttttgttgattgttagctaggtttaaccaagtttgagttttgaactcaaacttggagctctaatggtggatttcgattctgtgtttgggtggatgttttattgctttgaaaatgttctctagggtgtattgagcaggtctggaaagtttgaattggtttgggattgatttggtcgagttatgaattttttagtgattcctgcactgaactggaattccggctcagagaggcctgtaggaaccggaattcctgttggcttccaggatttcctcccagaaccggaattccagttggggaaccagtctaccggttggggcagatttgggaaccctagtttttcctatttttgtgttgtttagagtattgccatgttattcattgatagaaaaacttttagtttctagtttaagtcctcgggaagtgatttagcgtatcgcttatctgtgttgtaattaatgtgatttaggagcctgtaattcgccgagcagattgttccacttaggttgaccggcacacctgaattcggaatcgaggtaagattagtataacagtatgcataggtatttacatgtttagtgtgcatgttagtaagcctgttagattacattagacatgtatgttgactttcgtgctatcttacagtatcacatcggtacgactagagtatgaccagtgtgccgagtataggctgatattatgttcgatagta

SEQ ID NO: 160877 - DNA, 842 bp, Cannabis sativa
  modified_base (142)..(143): a, c, t, g, unknown or other
gtgcgcctggtcgagggcccatggccagcaaggggcggtgatgcccttgcacaagtacttcaaggatgtggcggacttctttggtctctgctcggcccaaataacccctaaaggcattaagtatttgtctgccctcttcgtnntctacgcttcccaaggatggggtgctccttctccccatgaggtttcctggttctttgatctgaagtctacccccaaacaaggcaggtcgaggtacttctatttctctcagccaggcttcaagtggttgaccggcacggatgccaaggccatcagcaaaatagggcatttcgccgatgagtacttcatggtgaaggatccgagcattacccggactcgattttagcagattccgacatatcaccaccctcccctcactcttgctcttagaaatagagcttagaaacttgcccggttgctgggggaagacaagaatattatctagttgacctccgatgataatcttgtgaagtacgagctctatcccgaggacttttctcctaagttcgtggtggggaagaagaggaagtttgatgctggccggactgaacgaactcattcagagaatgagctgattcaactgaagcgtgaagctaagttgaaaggaggtgccagggccaagcagtatgcttaggagcctttgaatcctgaagatgaggccgaggacgagcaggtgaccccactgaagaggaagaagaaactcccggccacgcccaggcctattgaacattgattcgcataagggagaccatttcacctgttcggccatctcccccctttgccggaaaagggaaagctgtcatgtctgagataagatcgat

SEQ ID NO: 160878 - DNA, 638 bp, Cannabis sativa
gacaatatgccctagcctagaaaagatatctacaactagaattcacactttttgaactttgcatacaacttagcatccctgagtcgctgtaataccattcgaagatgatgctcatgctcctcttctgactcagagtatacgaggatgttatctataaacacaataacacaattatcgagaaaatccttgaatactatattcatgatccataaaggccgctggagcatttgtcaatctgaatgacattaccagaaactcatagtgcccatatctggttcgaaatacagtctttggtatatcttcttcccgaattctgagctgttgataaccagatcgcaggtcaatctttgaaaacacagtctttccctgaagttgattaaacaaatcatcaattctgggcaatggatacttgttcttaattgttagcttatttagttttcgataatcaatacacattttgagggaaccatctttcattttcacaaacagaaccagagctccccaaggcgatacactgggttggataaaccctaaatcaagcatcccctgaagttgtatttttaactccttcagtgccactggagccattctatatggtgcttttgaaacatgttcaattccaggtgcaaagtcaatca

SEQ ID NO: 160879 - DNA, 523 bp, Cannabis sativa
ttatctgaaggaagagttagtacaggagcggtaatcaagcattgctttaactccaggaaacttttctcacaccgatcagtccaaacaaacttctggttctaacctcatcctagaaaacttctaacctctgtagctgatttcgatgctggccaatcccaaacagtttttaattttgactggatccatcatgatcccatctttatccactttgcaaaaccgctccgagatgcaattcatgttttttttttcctttaattccgaatacaccaagatgtcattgataaacatgattacacatctgattcgtatcaaacatagtacgcagccttggcccgtcattcaccgtgatggtattcttacattttgaatactctagatatgatctggaaaagaatccatgaccttgacggccaccttaatttacgtgaagctttctattaccccctgatgctctggaagcctcagccttctgcttgtgctcagggttgctactgtcggtcccccttactgacattaccactag

SEQ ID NO: 160880 - DNA, 502 bp, Cannabis sativa
aaggaacagtgtcccactgatccttaagagatagaagacatgagaagggctccttatgcttcaacagttggaagtttaatgtaagcaatgttatgcactagacttcacatctgttatgcagtaggaattgtgagcaggtattagacaattccaggacaggaacattgaaatgctgttaagaatattttgaagtactttaaaagtacaaggcaattcatgttagtctacaagggtggtgctttgaatcctgtaggctataccgattcacattttcaggcttgtcttgatgacaggaaatctacatctgggatggtgtttactgttggggtggagcagtggtttaaagaagtgctaagcaaaccgcaatttcagactctagcatggaggctgaatacatagctgccgcggaggctgttaagcaacttatggcttagaaagttcttcacaagacttggtgttgatcctagaatggaaaaaccattggttttactttgtgataaca

SEQ ID NO: 160881 - DNA, 700 bp, Cannabis sativa
gccttacaatacttgagtttaactcggcatgatgtagcctatatcaccaacaagttaagtcaatttcttcaagctcccactgtcaagcattgggaagcatgcaaaaggttacttcggtatctaaaaggcactcttactgaaggaatatggcttcgaccgactgacaatcttcacttaaaaggctacacggatgcagattgggccagctgtatagacgatagaagatccacgagtggttatctcatgtttttgggtgacaatctggtgtcttattggtctgctaaaaagcaacatgttgttgctcgatcaagcacagaaagcgagtttagagctcttgcaaatgctgctaccgaagtacaatggctattgtctcttctctctgaactgcaaatatctcagtccaaaccaccggttctatgggttgacaatcaaggtgtcactgcccttgctgccaatcctgtgtttcatgcaaggtgcaaacacattgaaatcgatcttcacttcgttcgtgatcagatcttggcaaaacagctcctagtttgctatgttccgtctttcgatcaagctgcggacattctcactaaacctttaactacagatcggttcaactacttaaaggacaaacttcatatggcatcatccccatttcgtttgaggggggatattaaaccagaatctgttagttaagtttagtctgtta

SEQ ID NO: 160882 - DNA, 700 bp, Cannabis sativa
  modified_base (46)..(55): a, c, t, g, unknown or other
  modified_base (412)..(428): a, c, t, g, unknown or other
  modified_base (484)..(487): a, c, t, g, unknown or other
  modified_base (553)..(555): a, c, t, g, unknown or other
agtacataaacaatcactgaaacattaaaattgaatgaaattagannnnnnnnnntaaatctaacaatctcattagtttagggagaattttaaacggtaaaaaaagttcagggggcatgatttggtatatgtcaaagtttgaggaaaaaattgctaattagccttaagttgatccaaaattaatttgaaaaactaattttcaacttaaatatattttctatgaaaattcaaataattaagtatccataagaatctaattagttataacttcttttatttaattaaatacagaaaaatgcatctggttaatcttgaaaaaagtttcattaaactaagtgtgtttttcttaacttgatttcaaaatagtctcatgaaaaattaattttatatattttgaaattaattatgttgnnnnnnnnnnnnnnnnngttaaactagtttaattaacctatcacagttatttaaatcaggcaaatgagccttnnnnattggggttgttcatgtgagggagcgctgagttcagtaagtcgtacccactactaatggccccctnnntctcacacaagacccaaaggagaggaatttaaccttaatttaaacaataggtccaatactaattgggcctaaataaaatctatcaaaagtgacaattttagttagcaacctagtccatttcaattacaaaaattaaatgggctcc

SEQ ID NO: 160883 - DNA, 584 bp, Cannabis sativa
cggaagctaacttgcaacttgttccagcagtccaccaatcctggttccaacttcttgaaccattcctctgcgggtccgcttaacattagtgggaaggataaacacttggcgtcattgctgactcttatgaccgtcattactcggttgaaccgagacaaatgatcgctggggtccgtgtccccggtgtaagctgccatttcgggcatcttaaaatttttggggagttctgcctccaaaatgtgtctggcgcacggctctcggtcctcataatcagagtctgagtcatccccttttttgtctctgggagactcgagcaatatctttgcgcagtatggctagcttagccataattccttcgttcagcgttcccgcagagattgtcggcgcgtgtttctttttctccaagtgatcctgcaaatcaccatgcttctcgttgatctgatgtctaaaatcaacgggagggtatctccggctcctccctcctttctcttcgggttcttggtgcacagaaacgctctttcggtcctctcgatcctaagggccaagactccctttttggaggttgcccctctgcggacctttcc

SEQ ID NO: 160884 - DNA, 666 bp, Cannabis sativa
gcatagtgtttgaacattaaattttacattcacttgtagatgtttcccttgactccacaagattctctaacttttgtagagattgttgaaggctctgcatactttcatgaacgctttgctaaaactgcaaggtattagatgctaacatttcaatcacctcagcagtaattggcttttcactacatggtgcaacatgagtaggttgttgaaattgtgcattatactgttccatccgagtagtagaagcctccaaagcgttgagcagatcaataagagatgatcttgatcttatggtgctacaggaagatagtaaaaagttggttgaacatattgattgatcccactgtaggaagtgctagaataatttctccattgttgattgtatgtgtaagtatcgtagtagggatcatattgatacacttgtggcgaggtataatatggatcataatattgttgattgtacatcaccatatttctaaaggaagatctgaaaattaaaaccacaactagaagaacaagttagtaacaaaaattaaatatgaataataaaattactttttttcaatttcttttctatttttttttttaaaaaatctaaatttattttcaaaaaaaaaaattctaaattttttctctaataaatttttctctaaatatctatctttt

SEQ ID NO: 160885 - DNA, 525 bp, Cannabis sativa
  modified_base (58)..(60): a, c, t, g, unknown or other
caagaaatttagacttaaaacaatttgtgtgtggtttggatggtttcatgttgatctnnntgttatttgatgattgattgatgcttgtaaaattgtttgaaaaataaatgaattttcgtttttctaattatattttttggatagtttggaaaaaattgagcaattcatttttttacagaacttaattttgattttatttcaattagttatgattttttgaagttttgaaaaaagatagggtgatgacacactctcacgcgcgcggacaccgagtttcactcggtgagacgcgtgttcagacacgttgtgtctgaagaaacacgctcagggatgtctgaaatcccttcctccgcacgcggaaaggctgcgtgcagcctccaacgccgatgttcctcggccgtgtcctctcccctacgcacgctggtggtatgctgtgcataccatccgtacatctcacaattttttcgattttcttcatttttcatgctttttcatggaattaatttccaatttttttgtgtagtt

SEQ ID NO: 160886 - DNA, 731 bp, Cannabis sativa
tcactaagaggcttgaaattttctaaagaacaatgaaggaggttcgaatatagaagaaagaagaagaagaggtctcaagaactctctagttgtttgacaaattgtaaactaggttatgagtcattagttcgataatgagatcatcttattccttttatactatttcacttagaattagatttaaattatatgacattaaaaaaatgataaaaattggccaaaaattaccttaagtggctggccacatagtggcccccactaaattagaattttgtcattttatacaactatttatcattttctttcacaaatgtcatattttttaatttcaatcatttaaatgtcaaaattatttatttaataattagaattaattatcaaataaaattgtcatttatttatttattaataagacttcataaagtctcttaattaacaaataaactctaaaacttcttttcttcacaattaattccttgcttattgaaaatttataaataagacatagtctaattttgaaattataattgattaattgaaatcaattaactgagtcctacaagaagttgtctcaactagtttggggaccataagcctatataatcgagcttccaataagcagatttagaatttaagtaaatgccctaacttataaattcctgcttgcaccactatagatttagaattgcactctcaattatatagagcgctttatatgttccacgatatag

SEQ ID NO: 160887 - DNA, 619 bp, Cannabis sativa
  modified_base (377)..(383): a, c, t, g, unknown or other
  modified_base (591)..(592): a, c, t, g, unknown or other
agatgggtttttacactctttcttctagaatattttctcccccctagagtaaccaccatctcgacttcttatgagttggtgtagatataaggatttctgatacatgcatccttattgtctaacatataggtcacattcacaaatctctcttgactttccttaatgttacttctttgattacatctcagatggctcccactcaacagtaggtgtctggttaaattatacataaaagtacatttaacctcttactattgttttgagggatatctagttgtgacaaattatcttagtctgaaattgtaagttccttctagactaagtcatcaacatagcgatctagtattttaaatgaagtgtaaaatacttgctagagnnnnnnnaatcaaattaagataccataaaaattttacgaggattaggaatttttgcccaagtcattcgaatagactatgcaagaattctactatcttattctcataagtctgataagttatttctatccatatgaattagatttactttctcattagtgttcttaagttcctatcacaagtgtcaaccaaataaagatgggtaaagaattttaannttctcccactcaattaaggtaatgtga

SEQ ID NO: 160888 - DNA, 620 bp, Cannabis sativa
  modified_base (264)..(268): a, c, t, g, unknown or other
atctaattcttagaatataagtgttatattttgcctacacatagtttctttaattttgtgtatgtaacacatttaatgcttagaaattatacatttcataagtgaagagaaatattatattttttaaaatatagtgtgatttatttcaactatatatgaacttgggaatcaatatacttataaatactattaaacttgcattttgtggattctaatgtctcaataatcttattttacacatcttatttgaaaatcattttcatnnnnnctcatctttaatcttaagtcttttagttacttgtcttttattttattcttcaaaactaaaatcccatcaaatatttggaactaggttagaatatccttgctttgtttaaaaaagtttcttttgatgttagtcaaatcccatgggttcgaccttgcacttacacgaacattatattccgaaacggttcgtgcacttgcgagtataaatattaaaatactcactttcgggtacaacaaatacaaagtatggaatgtggtggtagcatgcaccgtggtgtgcatcagggaacacaatctccaaagcatgaacaatactttgatgcctatccgacacaaaggctaagttctcaaca

SEQ ID NO: 160889 - DNA, 550 bp, Cannabis sativa
ctacatattagcgaaattgaatgacattagaaaaaaaatccttaaatccaacaatctgaatagtttatgaagaatttttaacgacctcgaaaattcagagggtataatttgggacatattaaaattcaggaggtaaaaatctaaattagcctttctttaaatctaaaaatagacaattgggacattgttgtacatgatatgttacttgtctcatttttaggaggtaatgtttaaaaaagtaataaaattttgttcatatggtaagaacaaaaatcaaaaagtgtgaaacttgactattgaaaatcaacatatcccaactaaatgaaaatgatcaaaataaacatctcaaacttgacaatatagtaaataaaatttaaatggaatggatgactatgttttataaattctattgcattgtaaagactcaaaatgagtaaactaaacaacatatttatgtgtttcccattatataataactaggaaatgacaccgcgctttgcgcagttttcataattttgtaaaatcatatgtataataaatttaatatttt

SEQ ID NO: 160890 - DNA, 542 bp, Cannabis sativa
  modified_base (148)..(170): a, c, t, g, unknown or other
  modified_base (457)..(457): a, c, t, g, unknown or other
acacacttagtttaatgaaatatagaattataactaattagattcttctgaagcttaattatttaatatttcataaaatattcctatttaagttgcaaattagttacttttaactaatttttgtatcaacttgaatttgaatattttnnnnnnnnnnnnnnnnnnnnnnnaattctaggaattagttattgagagattcatggaatattgttttaagttgaaagtttgttaactttgaatcaacttaaaatggaatatttgtcaaattaagtggttagtaacttaatttgttatttaattcaattttgaaaaataatttaagttgaaaatttggttattttagaacaacttaaattagatatttttcaagtatttattttattatattttaaattttcgaaattatatatatatattattatataatgattgtcgaaaattaaattaaagttgaaanttaatttttaattaattttggacctactttaaattaattaattttcattattaaaatatatggattaaaataaatgattaattaa

SEQ ID NO: 160891 - DNA, 506 bp, Cannabis sativa
ctagatctggaacgagaccctgacctaaacccagacctggacccgcacccgggactcaaacttgaacctggacctaaacccagacccagatcggtatccatacttggaccaagacgcagactcagactcggacaaggaatcagacctcaacccagacccagacccaaactcgaacccagacactgaatcgaaattgaaactgggactaggacccaaatcggatcataggactcggacctggatgggggacctggacctaagccacggaacccagaccaaaatcggaacacggtactccgacccaaacttggacatcggggccaaactcaggacccaagaaccagactgagacttgggactcgaggcccagacctagaatgggactgtgacccatacttagaccctaacccaaatcgcgacctaaactcggaccaaacccgaacccgaacctgaacacgaacttggattcagaccgaaacctaggacctgaacatagatggtggacc

SEQ ID NO: 160892 - DNA, 503 bp, Cannabis sativa
tgctaaaaaacttggtaaaaaaaaggagtacagtgtaaactaactctccctcatttaggcattcatggagatcttttaatcgacgaattctaatcttgtaaactatcttctcaaatatgttgatgctgacaatgactttgtgaataagtttgcaagactgacacttgattgaatttgttgaacaccaatatgtattttcttgaaatgtataaagaagaatttggtgaaatatgtttaaattctatttccgtcaatgtaccctccttttagttgagcgatgcaagtagtattatcatcatagagtactgcttgtgttgatacttttttattgagtgtaatctatatatttctcgaaaatgttatattaatgatctcactcctatacattctctacttgcttcataaaatacaagtatgttaacatgatttaaagttgtctcgttaaaaaccttgtcaggaaaattcagtgggacaaaacccgagctaagaaaaaaagagtgcaa

SEQ ID NO: 160893 - DNA, 590 bp, Cannabis sativa
  modified_base (252)..(253): a, c, t, g, unknown or other
tccccagagttgaggtaggctgctattggtgtcatccagtttggggatgtatcaatcatttcgatttcttccgtgccagtgatgcaaggctctttgagaaatcggataggaaccaggtttgccttgtcacttacgttgctgcttgccaatcgagctaactcgtctgcagttgtattttcttctcttggaatttgtctgagaccgtagcttttgaattgtgtgagcagattgtgtattttgctcagatatgcnntcatcttttctccccgagcttcatattctctagatacatgatttaccaccagctgtgaatcactgcagattttgatgtgttcgaccttcatctcctaggctagtcttagccaagcgattagagcttcgtactcatctttgttgttagatgctttgaatccaaacttaactgcagcgtgtaggtgtttcccccaggcatgatgagggcaattcctacaccagatagttcatctgtagcggacccatccacatgtagtttccaggtcgatttgtcctcattgtgacttggctaaggtattggtgccggcttggggttgcttttgttggaaatattttac

SEQ ID NO: 160894 - DNA, 602 bp, Cannabis sativa
  modified_base (160)..(162): a, c, t, g, unknown or other
  modified_base (216)..(223): a, c, t, g, unknown or other
agacccgaacttgaaactaggacccagctcgtgaccaagcaccaaaaatgataccagactgagacccgactttgggatccagatttggaccaagggcttggacaaaactggtagtcagtgtctggatttgggacctagccctggacccgaacccacaccnnnacctgaacccagtcccaaacccaatagtggactcgaacccgtaccctgtgaccnnnnnnnngaaccaaaactggaagttgaccgggactagactaggacttcgacttggaatcataactataattggacctagatccagaaccgtaaccggaccaggacacagaatccaaatcaaacctagacccgaattgggacccggacctggattccaacccaaacttggactcgagacccgaacccgaacctaaactcagacctaaacatggaacctgactagggacacagattcagggtcgggacctagaatcgcaccctagtctcgatctgaaccaaaactcataaataagactggggagctgaaccagaacaagaccgagacccgtgacagtgatccagatcgtgactcgagatttgggtaacggggcctggaacagaccagt

SEQ ID NO: 160895 - DNA, 519 bp, Cannabis sativa
agatcatgagtcgtccccaacctatcgaatacggaagcgcctggttgtctcagtgattggttggtttggctaatgtgctgaccgacaccattaacgttgttggaattaccaggtatgacttctcccgatgaattactagacaaagtctgcccacctactgcttggctcacaggcggaacctgtgactggagatttggcgattgaccatttatagtctaagaagtattcatcgctggatcttcatctgtttcacccaagggatgacattcgggggttgctgcccgacagattgataggctcttcatatcagcacagtggcttgccgactacgattgtcaatctctacatgatgagcccttaacgattccatctctttgtctctccattcaacaaacacgtgcctctgccattcaacaagcacggagttcctcctgatcatgatgtagggtgttaatatgaccctgcatgagtccaagagcagcacagaggttttggatctcagtgtcatctcgaatggtt

SEQ ID NO: 160896 - DNA, 709 bp, Cannabis sativa
  modified_base (26)..(29): a, c, t, g, unknown or other
  modified_base (471)..(510): a, c, t, g, unknown or other
  modified_base (591)..(599): a, c, t, g, unknown or other
agtcttccacactatgattgagatannnnttgatgtgtgtgggcactcactcgatcactcaagggtatgaaaacttgaagaagaaaagagagggaaggaggttcggctatgactgtataacaggtggctcaatttttctgaagacaagaaatttcatccactttaagtgtgagccatcactatctatttatatgtaaccactaggtttaggttaggaattattaggcattagaataatgaaaatattaagtggaaaaaacctttaagtggccggccatggttagtgggccccatttgggtatttttccaattttcccttattttctcaaaaatgccacttttccaattctaaccatttaaatgcaaaaactaattatttaaaaattaaaattaattaccaaataaaatttccatttaacatatttattaatttgacttaataaaggctttcaattaataaataaaacctannnnnnnnnnnnnnnnnnnnnnnnnnnnnnnnnnnnnnnnattcataaactagacatagtccaagtttagaattgtaattgattaattaaaatcatttatctgagtcttacaagtagtatnnnnnnnnntagtatggggaccatgggcctattcaacaaaacttccaataagccgaactagaatttaccaagtaaagtccctaacttattaattcgttgttgcatccactcatagaact

SEQ ID NO: 160897 - DNA, 583 bp, Cannabis sativa
taataaaataaataataattaaaataaaataaataataattaaatctaataaataataattaaatctcttaataataattaaatctcttatttataattaaatctcttatttttttttaaatctcttatttttttttttaaaaaaatattttatattttattttaatagtgaaaaatcatatcaacttagaatttttcatatagtttggaatgttttttattcacatttgataaaatataatataaaattgttaagttacttttagtactaattttagattaagtttattagtatatttttaatttagttttactcgtgtttggaataattttacgttttttatcttttatttttttagatttaaaatagaagaagattataaaatatcaaataaataagatggaaaaaaagataaaaaaatctcagaaaaaaataatctataaaatagagaaaattgtgcaagaaaatatagttgaaccttcaagcttgaattcgactatgttctgatcatattttggaaaaagtcaaaacataaaagttctagatctctcttttatcttttccggaacatcttgaatcatc

SEQ ID NO: 160898 - DNA, 659 bp, Cannabis sativa
  modified_base (498)..(510): a, c, t, g, unknown or other
acatacatatatttcaagagttatgtgcataagacataacttggttagacctagtatattactacgataaactaaggaaagaacgtaatgtatggattacgtaaatatatatgaatagggttatgcaagcaagggataaccaggttagactcggtaattataatcgagataaaccttactaaggccctattgtaaatagacgtgtgaacgtaacacgtaggtctatgccatatagacatatatagacgtgtgagagcaacacgtaggtctacgccacatacacatatataggcgtgttagcgtaacacgcaggtctatagcaaatagacaaatagtgcagtggcaccattaattatgtgataaatatatatattaagattaagggttatgcgtttaaggcataaccaggttggactcggtaaccaaaaccgagatgaactattctaaggccttatcgtatttagacgtgtgagagaaacacgtaggtctacgccacgnnnnnnnnnnnnnacgtgtgagagtaacacgtaggtctacaccacgtagacataaatgtgagcgcaacatgctggtctgtgtcacacagacagatttgaatggcattattgtttgtattatatgatgagcatattattgatatgttttatactgtcttgctg

SEQ ID NO: 160899 - DNA, 544 bp, Cannabis sativa
cttctttgatggaaataacccaatggatccaagaatactctccactctcaaacaaaaaaaggaaagaaaaaaacacacacataatcaaacaaatcacaagaattagtaaatctaattaaaaataataataaaaataaaaaacatctaaacaaaaaagaaatattttcataaaattaatacaaaaataaaataattatatacctccagagtgtttaagatagaataaagcagagtaggaagtgctctgcttccaatatacatatctccttcaatattcaaattctcataccgaatttcgattttgagaatatcaattccaactctacaaaaataaattaataatttttttgaataataataaaaaaaaaaattgaaagtgaaataaacaaaatgtattggtctttcaaaaaattaaaaaaaatgtaaatactaaatagggacctctcagttctatctctaagtctccttaaaaatttctcattatcttctccaacaatcttaagcacagtgtcgaccaatctgcttcttctccaaaccaccaagt

SEQ ID NO: 160900 - DNA, 614 bp, Cannabis sativa
aaaatctaacattcaatatatgattggatcagatcagatggtaaaatctaacattcaatatatgattagatcggatctggataggcctaaaaatattggaggtgatccaatgaacacccctaattgtatgatattgtggcgattgtattatactataaattagtattgtttaataaacttgaggatggttctagacttggatcccatctttggccatgagccacaaacctagacttagatatttatggttcaagtttggtttcggggtccaaatctgggactggagcttaggggcaaggtcacgggttgggttagaggcgaggttaggttcgtaattgaggtccaggataaaagtctgtgtccaagtagaggattgggatcccgggctgagtccatgttcttgatttcgaaacctttgtaaattttgtaatataagttgatatgggtatgtgttatgcattaaaacttatagtcgtaataattaatacaatacaaaattttatcaaaacatagtgttccttgttatagtcaaagcctaccatttggttcgggtcacacgtacaacttgggaacatgatagtacaattgaacgggagcactaaacatagatatgg

SEQ ID NO: 160901 - DNA, 615 bp, Cannabis sativa
gttcaaaactcaagcttggttaaatctaataaacatgcatcacaacctgctcaaatctacttaaataagcataactaagtctctgaaaacaaccacaaaccactacaaacaacacagcaaccaagttcatcattttaccttgaaaatcaaagttttgggtttaaaattccacacttaattaaaatcaacaaacaccaacacaatcttgcttgaatcacatattaaaacataattaagcttcacaaaccactaacaaactcacacaacagtcacaaccacaatttctcaagcatgcaattatcaaagaaacttaaaagaaagctataggaatcttaccaacaacttgtgatcactaaatctggagaaaatagtttgaattaccaaagaaaacaccaagaatccttgctgctcaaggaggccaaaagagggagagagtttgagaggaaaatggaattttgcttttctcttgtttttttttttcaattttgtaaaatgagagtcaaaagtaactttaattactttattcatcaactaataaacataacataacctaaataattcccaattactaagtccactaaaggacaaaatatcaatggggcaaaatgatcattt

SEQ ID NO: 160902 - DNA, 582 bp, Cannabis sativa
agccgttcttgaatatttttaggatgggccacactgttgttccaggtgagcaaaggcccctcggggtcaactggggagaggttataggagtccagtaactgtctgaagtccaaagaagggcccctgtcggggttacccccttgcttatcatgggagaaaaggaaagcgttaaaattcccaatgagaagccaagggtcacggggattgttccggcctatccttttcagaatttcccaagtgtgaggtttgagagagtcaacaggagagccataaaaacaagtaagatggaacgaaacattagaagaggcacacgacacatagcaatcaaaatgactaatggattgggaacatagagtaacgtttacatcattagtccataacaaaagtaagcccccgcttctaccaaccctaggcatttctaagcccgaatcaaaatggagcttggattttacataattaatagcagtttttacaagctgagattccataataaataaaacagtaggactactagtagacactaaacgggacagattccggaatgcacgatcactccctattccacgtgcattccagctcaca

SEQ ID NO: 160903 - DNA, 566 bp, Cannabis sativa
aaaaaaaaaaaaaaacccaaatcacacaaatttttgattatgctagaatcatacaaattagtaaagtaacattcatcttatatatgaatttatttatagacattaataatatgaactaacgctaataatgtaatcaaataacaaaattatcaacctaaatcaaaccaaaaatcaaataatggtaacatgattaattattcgagtgactacaaaattaaaactatgtacacaccccaaaaacacaaaatgaaacaaatctaaaattactacgaaattaccactataccagtatcaaacccaaaattaaaccaagagctagccaataattaatgaacaaatactaaaattaaaacccctaatgtataacacaggaagaaacttactctagcaccttctcgacatgtcgcgttgcgattagctagcaatactccctaaaagctattatattaaattataagggaattatcccataaactattgttttaactttttttttttcaaatttacggtttgggtttctaaagtaattgcagcgctagttgcaataggggtttctatgtggaatt

SEQ ID NO: 160904 - DNA, 544 bp, Cannabis sativa
  modified_base (36)..(45): a, c, t, g, unknown or other
tctttattaactagtaaatctaattatattgaaatnnnnnnnnnntagggcacaaaacccaacaattttgagtatgaatcttcaggtgtacccggagctaggtatagtgccttctctatgcacctccatgccttttcataactcatttggatcccgtaatccttgtgcatatttttccttatatcagaggccaaatgattcgagccgtcagttgcgaacttatccttaattagatgggaaactatcaaaggtgatgcttgacagttatcttttcctcgaagatcaagggaacatgtatgtacattatgaaatgtactcacctcaaatatgttacaaaatacgttcttcttcgctcttaatctccacccacaatctgtatctttacatgtgacgtaccaaacatcagtaccgaactttctaacgaagtagccaaaccctttcttcattgcatacaagccaacaaccatctttaaatgctctttgtctctaaaaaactttcctacatgtaactccccgcctactgtgccacccatagatatataat

SEQ ID NO: 160905 - DNA, 503 bp, Cannabis sativa
  modified_base (296)..(303): a, c, t, g, unknown or other
gtatcagcacggtggcttgccgactacgatcttcaatctctgcatggtgagcccttaatgcctccatctctttatctctctatttggggaacatacgcctttgttcgtcgaacgcaagatttactgcagcacgcagttcgtcctgatcatgatgcagggtgttgttatgaccctacatgagtccgagcgcgtcacggagattttgtaattcagtggcatctccgatagtcgtctgggcgttggttccaggcaaaatagtcgtattatggacgccctggttgggtgcggaactgttnnnnnnnntctcttgcacaccaggcgcaattccatctgtaggaactgtttcaccattccccacgcttgccggctatccaggattaacagcatgcagaacccttgtgctcgctgcactactacaatatggccttttagtgacactatttagtgacacacattaaagtgtcggtcactatagagttaggaataatttttagtgacacaca

SEQ ID NO: 160906 - DNA, 648 bp, Cannabis sativa
  modified_base (580)..(597): a, c, t, g, unknown or other
acaaaaatgaaagggttagaatctgagcagtgagcagaatgagtcatttaattctgctacaaccactgtaaggtttctcataccttctaagtgtttataattttcatcgttttagaaattcatattaggatgttaaaaatatacttgttagtaaatctagatcgtgataaaatatattccagcagtttcatactttgtaaaccttattctgagtagtcactgttagagtgatcgttattaagaataaaagatttataataatacttatctttcgagattctatggtgttaaattgcaaatgaatgaaaatttattaggaatgaatctcattaaaacaagaactatgtaaaaccaacaatagagatcaaatatcctaaaactaaagctcattattttaaaactgtatttttattttgatatctattttaatttatttattttaatattaatatatttatttaattaaaattagtaatttagataaacctaaatacaaattttattttagtatttataaattatatacttaggttgatctaaaaatatccttagtattaattttcaataaatattatgaaannnnnnnnnnnnnnnnnngtccaaaattaattaacattaattttaaacttaaatctaattttctataaa

SEQ ID NO: 160907 - DNA, 545 bp, Cannabis sativa
tgttgccccaagatatttctcattggactcaaatttcatgttggggttagaaacagtaataatgtctcatttcaagggttctgtttcttgcaggttttgttgagatttccattacaatataaaggcattacactaaactaaacatgctcgtttggaatggtagtgtgcacttttattgcttaaaaatgttggtttagaaacatggctattatgtccttggatggggatatattatttatttttaacttgtcatttcttttataaataatttaaaatgaaattaagtatacgtgctttgcacattttttttaatttttgttacataatatttactttaaattttgtaaaacctatatcttgttcctttaaattttttataagtaaataataaatattattttattatgatttatatatacacaattatattttactaatcaaatataatagtacaaatatcaatttgatacaacaaatcattcttataatcatacctttagttatagaactctaaataaaaataaagaattaaactttaaataaaa

SEQ ID NO: 160908 - DNA, 594 bp, Cannabis sativa
aatagatacaattgaaatcgaagccctaactttaatcattattaatttctcttttgaattattttctttttaatttcactagtgttcttaaatttagttttctcttaatattgaattcaccaaatagaagtaaaggtttaattttaaagtacttaactaaatgtatttttaatcacaatacttgttgtaactaaaactaaattagtgacaacttgtgtctaaatgctatatgttttagtcacaaataatttgtgacaaaaagtcacatttagtcaccaaaaagttatgttgtgactaaaaagttgtcactaaaagtaatagttttttgttgtgattttataataaccgagaacaaaagcctctatgtattcggttattggtagaaactaaagacatagacctccaaaagactacatgagttattagaatattttagatgtaatttaatcaaagatagaaaaaaaaaatagaaatcttatatttcaacgcaaatttaagtttttttttttttgggaaattatagtaaatggcccaaaatcataagagtatgttagtttatgtcctcttttcaaaaaaatatagtaaatggcccta

SEQ ID NO: 160909 - DNA, 526 bp, Cannabis sativa
tcctggtcctagtcctagttcggttctagctccatttgcaattttgtgtttctgtttgggttttagtttgggtcggagttcgagtccttgtctaagttttggttcaggtccggatttcagtctaggtccagatcaggctccgggtgtgggtacgcgtcctgggttttggtttaggttgggtccgagtcccaagttccaatcccaatcttagttaggattcagttctgggtctaagtcctttgttctgatccaggtgtgggttcgagtttgggtctgggtccgggtctagctttgggtctgattctaggtgtgggggtttgagttcgggttcgagtctgtgttcggatttgtgtcctgttctggatcacaatctgggtctaggttcgggtctaggtccaagttcgggtggagagtgcgggtcctagtttgtgtctaggttaggatctcggtctagatctaggtctagcattttgatcccagtctgggtcttggttcgagtcccagttcgtatccggatccctatcta

SEQ ID NO: 160910 - DNA, 509 bp, Cannabis sativa
  modified_base (453)..(477): a, c, t, g, unknown or other
aaaattacttagtttaagttagtccaaaattaaataattaattttcaactcaaatttaattttctataactatataattgaatttgaaatccaatgtattagaaataagatacttttcgaaattccacattaaaataaaataaaataaaacaggaaaaattattcttatttatgttggtctaaaattaaataaatgaattttcaacataaatataattttcctatttaattaaatctcttaaaaaaaatatcaaatatttaagtgttttgaataaaatcaactgaaatattaattttctaatttaattaaatatatctagaaaaatgtcaaaagtctacctaaaaaatatctatctagataatttataaactaattactgattttctaattaaaatataatttgttttagtctattcattttaattaatcattaatgaaaattacttgatttnnnnnnnnnnnnnnnnnnnnnnnnnattaattttcaacttaatctaattttcaaatt

SEQ ID NO: 160911 - DNA, 503 bp, Cannabis sativa
atcacatggcttaggtacacgggtaggtgacaagtcatttaagctacattattccataagcactattaaccaagcaagcacccacatttatttttttcttattcatataccccaaagttgatagtaagagatttccttttttttttctttatgtgcgtaccccattgttctcaattgattttcaagaagacattatcacatatttttcctctttttttttttctttcttcttctattttttttttcaatagaggcacaacacacaataactttattatatatatcttcttcaatctcttactaatacaatttatttccccactaacaacactttatctcccccaaacttgcttaaaggctcatggcagaataaattgtattagtataggttaaggataatgagtttagcttagataagtggtgagaaatttttagaataggttaaggctcaactttgggtatactagggtaaaatgttcgggtaggcttgaaaggctcaatcg

SEQ ID NO: 160912 - DNA, 580 bp, Cannabis sativa
attttggtaattatgacctgagaagggtaaaaggatgaaattaatttaattacgtgcttaatagaactatattattttatagtatgcatgtgctgtcttttcaggtgttttctgaaaagttggcgcggtatagtcacaactgggaattttgggccgaaccgggttcgggcccgaaatgcaaatgggattgatttacttaacattttatttgatatgtgataatctgaaattatttgtgagttatttatgcatgaaatggcaaaattacccttgtgtgggtgagtatgtgtgtatttaagccctagtggcaaaatggtcattttgacctttatttgataattagtaaaggaaatgaattttgaagaaatgaaatgtaatattctggtttttccctatctcacccgaacccctctctctcacttaaaccctctttggttcaatttcttgatttggaggaattgcttgaagttgaactaggactttggtgtgcttttgcttaattcttgcttaaggcttgaggtaactctccttcattgaatttaattgagaatctagatggtttttagttgttgaaaaacat

SEQ ID NO: 160913 - DNA, 512 bp, Cannabis sativa
ggcatgctcaggagagcttgaattttttctggatttgcctcaattcccctttgactgacgatgaagcctagaaacttccctgacttaatcctgaaactgcacttcttcgggttgagtttcattctgtatctctagactacttcgaagcattcttctaagtcgtcggcgtggctagtgcacgcttttgacttgactagcatgtcgtccacgtatacctccatatttcgccccaggaggcctttgaacatccggttcaccattctttgataagttgcaccagcatttttcagtccgaaaggcatgattaggtagcagtataccctcttatcggtcctgaagctagtgcactcttgatctgctacatgcatcttaatttggttgtaaccagcgtacgcgtccatgaaagacactagcttaaatctagaggtggcgtccaccatctggtcgatccttggcaaaggaaaacaatcctttgggcaggctttgtttaggtcagtgaagtctatacaaac

SEQ ID NO: 160914 - DNA, 518 bp, Cannabis sativa
  modified_base (265)..(267): a, c, t, g, unknown or other
atctattagggttgaatctcactaaaacaagaactatatagaaccaacaatggagaccgaatatcctaataactaaagctcattattttaagggttgtattctcatttgacatatattttaatctatttattttaacatatatatttatttaattaaaattactaatttagataactcgaaatataaattttaatttaatatttatacaattatatcctaggaagatttgaaaaattaaaatttattttccatccttagtattannnttccaataaatattatgaaaaatacttaatttaagttcgtctaaaattaattaaataattaattttcaactcaaatttaattttctataaatatgtatatctaaatttgaaattcaacgtatttaaagtaatacatttttagaaatttcacattaaaataaaataaaataaatctagaaaaattattctaatttatgttgatctaaaatcaataaataaattaattttcaacataaatataatttttctat

SEQ ID NO: 160915 - DNA, 535 bp, Cannabis sativa
aaagataagcataaaggaaatcaaaaacttacttgagagtcagatgtctgggttcgagcaacgtcaatccaacaagcagtttgtatgaagactcttcagcaaccttgaagccaagaatctctcttttcgctctaaagcttacttagcaaagaagggtgatgaaaattagtttatgtgccaatgttgtttgatatttataggcaagtcacgaaaagaggtaatcatctcaaaggaacctcagacgcctaagtttcgctccttgaaagcgaatatgggaaataagaaataatcaattgcagccgtcagccgtggagagagaaaatcggatttcgaaatattaattgtcagagcatttattagccaaaaattgaagggacgcccagtcagcctcacatcgagtctcggacagtcacgcttgacacgtgtcgccatccaacagcagaagcaactcggatgaagtctacacgcaacttcagaagtcccgtacagacctgggggcaaatgttatcccaattttgcactctgacgtggcatc

SEQ ID NO: 160916 - DNA, 545 bp, Cannabis sativa
caagacatgtctacacagaacgaaaacaacgtggttagaaaacagacataaaaaacataaggcatgaaaatcaagaagctcaaaaaaaggacaaagcaatatgcaaggtgactgcccaagcaagatttaacagttcatcatcacctaacatcgatcttatttcagacataacaactttcccttttccggacacgggaggggatggacgaacaggtgaaatgggctcccttatgcgaatcgcatgttcaacaggcctaggcggagccgtgagttccttcttcctcttcagtggagtcacctgctcttcatcagcatcatcctcgagattcaagggctcttgagcatactgctcagcccgtgcacccccttcaacttagcttcacgcttaagttgaatgagtttattctctggatgagctcattcggtttggccagcacaagatttcctcttcttccccgttacagacttagaagtaaagtccttgggatagagcccgtacctcacaaagttatactcggaggtcaactggataatattccggtctt

SEQ ID NO: 160917 - DNA, 586 bp, Cannabis sativa
  modified_base (384)..(392): a, c, t, g, unknown or other
atttataagatctattaataattgaactataattaaaatcagatcattggatttgtcaacaagttaatcataacaatttagatcaaataaataataggttccctaaaaaaaattgaataaacaattaaataaaacaaacaatgtccatttaacaaattgtgaagtaagatattaatataattaaattattattttaactaaccaactattttgaaaatttagggttgttataaacaacctaaaatatcttttcaaaatttaaattttaaactaatttttaaaatatctaggttaatttaaattatttttatcaaattaaattaaatatctaataagtcaaataatttaaaaataaccaaatagatattttcaatatcattttcnnnnnnnnnaatttaataaaattaaaataataaaataaatcaattttaaaataaatatggttaggtaattaatattttaagaataaaataataaacgaataataattatccaaattatatatcaaaatatctcaaacctttttcaaatttatataaaaatatctaggctatttaaatattttaaatattatttataaatatct

SEQ ID NO: 160918 - DNA, 520 bp, Cannabis sativa
cggaggttgaagcagcttggccggaggttgaagcagccacctcgttcccaccataagcaacttgggccgcgcagtactcaagatacatgtccttagcctcgcccaagtggtcaaagttagcccggggatcagctttccaaaaatcaaagaagagctcgagaccggctgtctccaaggcatgaccttctccttcaacctgtcaacctcggccgtaagctcccccaccttagcgtccttctcctccttcatccgaagaagaactgctcgcaaagaagtcctctcatcctgaagactgtttacttcagcagataagatcttgatggtctcctcaaaacgatcagcaacctcgagatcctttgtcagcacagagatcttcttctcggaagggaacagcttcttgttggcctcgcccaactccaatcgaatagctccagcttccgccctggcctcctcagcttccttcttggcgaagtccgcctccgccttcaaggtgtcagacagagccacgctcttggaagca

SEQ ID NO: 160919 - DNA, 633 bp, Cannabis sativa
gtgtgaaaacacttcctgatgtcgggatagctgcttaatattctttacaagaataagagcgcctattaaaggcctgagcacctctaattaagtcaatcaacatatcatttacaagctaggtgactttgtaccagcagtattaattagttaagacaaacacaaattgatgtgtccaacatatatatttatttacaccaaagaataagtttttgaaaaataacaatttggtcccgtgcttcaaaaattgttgaattcaccaacaattattccgttcaacatattaaaatacaactaaaaagttaactattataatttagtaaaattgttgatattggaatattccaatattaatatgacacaatatgaatgaaaataattattagaaatgtacaatagcatcctagctatacgatcaatatatatgtaaactcatagttagtatatattgttttttatatatatatatatatatatatatatagatatcctgttcagaataagaataaaataagtataaaaaaccatgtatatatccatatacagtagaacctctattcaagaatactctatttaagaataacctctaatttgttataaaaaaatgaagtcccaagttgggccagttataaataa

SEQ ID NO: 160920 - DNA, 572 bp, Cannabis sativa
  modified_base (194)..(194): a, c, t, g, unknown or other
tatataagttgtatcagaataacgtaagaatacatcttttcaacattaaaaaaatcttttctttctttacgatttttctgagagcaaacagtagggtgttacagagcgatacaattcgatgcagaacgtatcgtacttatacagaggttgttttatcctggggacgccgtggtttctagactgccgtgcacacntcgggcagagccgcgaaacgtcttaaagagagcgacattgtccgcgactcagccagattattctatcggtaattcgttccagtttcattgcttttaatttcggtataacattttcatacttattcagttattcccatccataacatataataagtttttatatattgttatgttcaacttctcgatacacaccaaaaaccatctccaatgcatgctataaaaaaatatgttgaatttggcataaaaaaaataagtaaatattcaaagaaaaaaattacataatagactaaaatctggagaaaaaaaaagtttttacaaaaatattggattttgggaaaaactttacattttaactgccacatggaattttttacaaaa

SEQ ID NO: 160921 - DNA, 554 bp, Cannabis sativa
aggatttgtattttgataccatttgtgcggtatcggcgactgcacttagtcttagcaactaagttgcctacatatccttttataggaatcaagtcaaatgtagttccgaatttttaattaatttttttatgaggtgaatgacctctttttctttggaatgccatttaatttgttatggctttgaattttagtgcactttttaattttttaggtaaaattaccatttttgagatttttgtgaggttaatgacctctttgaaatttggtgaggtaaataacctctttaatattccaagattaattttggtgagctcatttggaattttgtgccattttatatgactttagaattttaccactttttttttgtgataaaattgagttttcaaatctttttattattttcttgtttataaataaaaagattatttgactgatattttaattaatctaatataattcccaaaatttataagaaaataattaaattaattattaattttttatatgataatatttagttatcatttttaattcaatttaaattttaaatt

SEQ ID NO: 160922 - DNA, 561 bp, Cannabis sativa
  modified_base (93)..(97): a, c, t, g, unknown or other
ttaacgtttaacgttaacagtctgttaagttaatcgtgtaaggctaaataaaaaaaggaatcgttaaaccaagaattgccgttagataggcannnnnaatatataaagatatatattgatattgatgataaggaaggttatatttaaaatttgtttttaaatttcgttccctgatgtaatttattcttaaatagagtatctatatatctatatatatatgggtgtgctcttaatgggtattacccatgaatgggtatttaattatggaccgttagatttaatcaaatggatgatatttaaagttattaataatttttttaaaattaatattttttattttgacctgttacctgatgacatggcggtcatcttatttatcaaaccctcccttttttttttccttctcattcattctcaagtgaatatattataattaaaaaaatattaatttataattgttattttaactaatttgaacactttaatttatcaaccaccatttttctcacttggtatcctcgtctcctacctctccacactctgcagccatggcagagcaca

SEQ ID NO: 160923 - DNA, 710 bp, Cannabis sativa
tcctctctaagaccttcggctgtcaaagaggaagaggttgaaagagagagggtggagaaggatttgagggtaactggacttccatggccgccgacgttagctctgccagtgccattagtagcagtacagttggagttggtattgagaaaggagaggatgatacgttggaggcgggactgaggtttaggaaggaaactcaacattgagaattttcaatctaagcaacaaattggaatttgaagctcacaacaacaatggcggccctctttgtagggatttccggatttggttctctctgcaacttttaggatttgttttatggtcacttctatcctattcctgtcttcccaattttgaaattttaccgatttgaccccataaattttttattggcaaaatactattggaaaattctacaatagacccttttaaaatagatacattgatgcactcttgtctcttttagcacccgaaataattttttagttaaattttttctcatggtcatgtacgttatacttatttaagacatcctgcaaaattttaagaaatttagaatagtttaacacgccgaaaattacgttcaaacagtgtgttgcacacgtgactattttattttatagtcgtgtaaaatacactgttttaaacattgttttctatattgtaaattattcttcaaaattttgtaggttatcttaaatagttataac

SEQ ID NO: 160924 - DNA, 609 bp, Cannabis sativa
  modified_base (546)..(557): a, c, t, g, unknown or other
gcttcaacttgaccatttgattggggatgtgccactgcggaaaaggttttgatgataccatggttcgcacaaaaatcagtaaaggactggttgtcaaactgtttgttgttgttcgaaactattttgtatgacaatccataccggcaaattatgttcttcacaacaaagtcttgaactttcttagatgtaatggttgcgagtggttcggcttccgtccacttagtgaaataatcaaccgctaccactgtgtactgcactcctcccttgcctttgggtaattgttcgatcaggtcaattccccaaatggcaaaaggccacggactttgcatatgagttaactcgttgggcagagcttgaggtatcttcaaaaatctctcgcatttgtcacattttttaacataggcttttgaatctttaatcattgtcggccagaaataaccttcccttagaattttcttagataaactctgcccagcgacatgatttccacagaatccatcgcgcacttttgatagaagtcgtgcagcttcttcttgagtaacacannnnnnnnnnnncatagagaatcctcttttgtacataattgcctctactatgatatatcgtgct

SEQ ID NO: 160925 - DNA, 1433 bp, Cannabis sativa
  modified_base (1300)..(1317): a, c, t, g, unknown or other
  modified_base (1396)..(1404): a, c, t, g, unknown or other
agagagagagagagagaaaggggaagagagaaaatggggaagaaggaggcgcatgctttgttatatgagggtcaccttttgtcggtgaacttcagtttgtcggtaaacattttaaaaaaccctaaagcataaagcgcaccttttaactaaaggttttcttacttttgctggcgaaattgttctccgacaaaatgttttccccctaatgatttgtttcacacgaaaaacttaccaccgaaaatttcaagacttttactgacgaagttgatcgccgacaaaaagtaaaaaaaaatcgcgataaataggtgccttttcgtagttggattgcaaccttttaccgacaaaactacgtaaatttgtcgataaaagaatcttttaccagcaaagtaatgcaccaacaaaatgttttcatatgtacaaaaaatggcacacaaatatcggcgaaacttctttaattcgttgatatatattaacttttttttagcaaaattcatgaatttcgtcgagaaaagtttcttttcttgtagtgggatcctatatatttttacttgaaattattttgaatgagtagagtttttatactttaagaacagatgatttactatggacttagtgaggtacaagctttctagttttgtccaaagatcacttgatgttgtttcctttgataattctctcaaaaactttatttgagaattattgcagtgtgaaccttttctaacatctcaatcttctcattctcaaacaaccctcagacaaccctgatggaagtttatcttcccccattagagcttcctggagcccttgctgaactagcggtgctctcatcttttctcaagattaaacttggcattccctatcttcttactcaaaaattcacctcaatcttaaactttcaatacagacaaagattttctttcaaagatcaagaacttgtattccagctctaataccatttattaatgtcaatgcatctctgttttgatcttgtctacacattcatgttatagtttacttggatcgatcacttagaatccagtttaagggttacacaaagaatgattacaataccatatttattggctaactaacaaaactgaccccaagtttattggtcttgacacaaaatgaacaataaagatatcaactaacatataactttactaaactatactaactgtagctaactacattaactgtcactcaaactaacaaaaaagaatagacatttagtttagcaacaacataactaaaaacacaaaccagtcgctacaaaaaattttacttttagtcataacannnnnnnnnnnnnnnnnnaaaaaattgcgactaattataaatcatgattcttatgttgtgactaaattaaaggtctgtgactaaaagtattagtcannnnnnnnncaatttgttgtgactaaaagtattagtca

SEQ ID NO: 160926 - DNA, 653 bp, Cannabis sativa
aatttaaaacttaatcatccaacatatataataaacattagtttagttcaacctagctaattctcatgatcataataaaactgttaaaaaataaaacttattcaatacatattgacaattttattagcatttaggaagatgagaattaatattttaaatctaaggttttttttctttaatctcatgtgttaaatatatatattaaatcaactaatatatatttttaaataaataaaattataaatatattttaaaaatatataaatataattggatgactattggatgataattggatcggtttggtcggttatccattaaatcggatgtccaatccaacaaccgatccgatccgattggattttcaaaatttacatccgatctgatccaattatgattggatatccgattctattggatcggttgggattggattggtcggttgtaattgaattggatgactttctgcacacccctagttagaatgagggctttcatcaagtcttaaaatgagaaagcttggaggatggttctatcaggatggtcgcttcctattgtgacagattccgaaggtaattctaaaataaaatttgaacttgaatggttcattgaagatgataaacgttttacttacaatagcaaaactttacatg

SEQ ID NO: 160927 - DNA, 680 bp, Cannabis sativa
atgtcatcaacaacccaccaacaaccatcaatccatcgttattggaaaatagtaacgcattagttacacagacaaatgcattagaaacgatggaatacaatgcaacaataacagaagactcaacaacatacaattcaagagacaatactggaagatggggaagaaaatttcgacttcatggactatgcaaaacttgtggcagaggaaatggttgagcaactggaaaacaacaaaaacagggagccataaatcacaaattatgacgaactactaatcacagatccacaacatcctgaaatagaagaagcacaaatatacaaggacaaagaaacacttcaaagtgtgcttagtttctatgcaattagaaaaaacttccaattcaaagtgaaaaagtcttgcgcaagagcatacaaaatttgttgcttagatccaaaatgcaagtgggcactaacggcatctaaaaacggaccaacaaagttattcataattcaaaaatatgacagaaaggtaattaacacttgtgatctaaacataagatttgtagacaaaagacaatctacaacgaagttgattggaactacatcaagacacggtttaccaacatgaaaacaactcaaacgccacaagacatcagaggagaaatgaaacataagtatggggtgagaatgaactacatgaaa

SEQ ID NO: 160928 - DNA, 601 bp, Cannabis sativa
attattaaaaataattgtatataccatattaacaaaattatatataataaaataaaaactaaatatgcatgatctaaaataaaataatatactatacaatatgttgcccttaattttgtcaaaaatacgtgggccaacgggactgcgacacgtggatttgaggagtaaggttttgggataatttgactaagtctttttaatcgagaggatcagcaagaagcctatctcctggagaaggtatgagggatccacgtactcccagagggcaaagctatagcaaagcacctccgggaggtatcaaaccccatctgaacggttgcctcgcatttaatgccgcatgggagaaggcgtattggaactgccataaatattaagtctgacggcgtaaccccccttctgtagctattacgctatgattaataagcctagtgacggctactttatgaggaatcacatcagtcaaaaagggataatggattacatctacctaacccctaaaatacctagggtgtagaccacgcatttcctatgatacactcgttgggaatgtgtgctcctactgaaaaatacaaaaagacatgtagctcggttctagggatca

SEQ ID NO: 160929 - DNA, 521 bp, Cannabis sativa
aataaatattataaatgataattttattttatttattttaattattaaataaatagttttggcttttatagggttgaaagtacaaaaagtggtatatgttaaaaatatatataaatggttaagaaaaatggcaaaaatctaactagtgtagggcccatttcatggccggccacttaagggaaattttgctctatttttatcatttttttattccaaataaatcaaccctagccctatgttaaattagtataaaaggaaagatatggtctcattatccaattaatgcttcaaaaggctttaaacctagttttctttctctttgacaactaggtttatgagacttcttcttcttcctttcttcttctaatttcgagttcctatagctttcttcactatcaaatttgagccttagtgattaagtgcatgcctgttgagctttttgctctaaataaaactcaatttcaatgtaatctctatcatttaaatatcaataaagagacagaagtattttcatcacttat

SEQ ID NO: 160930 - DNA, 527 bp, Cannabis sativa
  modified_base (56)..(68): a, c, t, g, unknown or other
ggcatcctgctcgacctatcttcccgagcaggtgctccaagtggactccacgtgtnnnnnnnnnnnnnatgccacgtcagagtgcaaaatttgggataacaataactaaagcttattatttgaaagagttgtattttttatttgatacttattttaatctatttattttaatatatataaatttatttaattaaaattactaatttagataactctaaatataaattttaatttaatatttataaaattataccctaggaagatctaaaaaatagaatttattttccatccttagtataaatttgccaataaatattatgaaaattacttaatttaagtttgtttaaaattaattaaataattaattttctactcaaatttaaatttctataaatatataaaacaaaattctaaattcaatgtattttaaaaatacattttcaaaattcacttaaaataaaataaaataaaactaaaaaaattatgctaatttatgtttgtcaaaaattaaataaattaattttcaa

SEQ ID NO: 160931 - DNA, 506 bp, Cannabis sativa
tacatcaatctttgaaaacaatctttgaaaaatttgaaaaaccctcaaaaccctcaacaaacccctcaacaaaccgacgataatacccagctaagcccaaaaagcttgtaacttcagtagctaactttggtgttggccaatcccaaacagcttcaattttggccgaatccaccatgatcccatccttatctactatgtgccccaagaaagagacccgagataaccagaattcacactttttgaatttagcatatagcttatgatcccgtaatcgttgcaaaatcgctctaagatgtaactcatgctcttcttttgattccgaatacaccaagatttcatcaataaatacgatcacacatctatccaggtaatccttgaatacccaattcataagatccatgaatgttgttggggcatgggtgagtccaaaagacatcacaaggaattcataatgtccataccgagtacgaaatacattttttgggatatcttcctctcgaattctc

SEQ ID NO: 160932 - DNA, 507 bp, Cannabis sativa
  modified_base (46)..(60): a, c, t, g, unknown or other
  modified_base (198)..(200): a, c, t, g, unknown or other
tcaaatatttaagtgtctagaacaaaatcaacttaaatattaattnnnnnnnnnnnnnnnatatatctagaaaaataccaaaattctacaacaaaatatctaactagataattcataaactaattactaattttctaataaaaatatattttagtctatttattttaaataaattattaatgaaaattacttgatttnnnttgatctaaaattaattaaattaattttcaactttaatttaattttcaaattgaaaaatttcaaaatatctgcattaaaaataaatgtatttcaaaattaaagtgggaaatgattattaaaataaaataaaatatactctgaaaattattctaatttaaaaataaatgtatttcaaaattttagttggtctaaaaattttcgatttcacatacttaaatataattttctatttaattaaatccattaaaatagaaataattaagtatctaggataaaatcaacttaattattaattctaatttatta

SEQ ID NO: 160933 - DNA, 559 bp, Cannabis sativa
  modified_base (149)..(152): a, c, t, g, unknown or other
  modified_base (496)..(498): a, c, t, g, unknown or other
catttattctttgtttttaaaaaatttaaaggaataatatatgtgttttgtaaaatttaaaggaaatattatatagtgaataataaagaaaaagtgtcatccaaaaatattggaaaaaaattattaaataaagagtaatttgcggcatnnnnacctaagtttaactctcagttgtaaataaatacctaaatttaatttttttttccattaataatacctaagttataattttagaacttttataggtacatgactgttaagtgttaagtaaattactacgtggcaattcctgattagtcaaagtcattaaatttttatttttttaaagaaaaaattaatttaaatatatcaataagaaaatgacaaatggataatgacttaatatttaacggtcatgtacctacaaagttccaaaaatataacttagatattagggtaatttgaggcataacctcctaaagcggtcaggtgtttgcaactaacccccaattctaannntttggtggtaaaacctcctaaactgatattctgttagcaattagccatttccgtccatttt

SEQ ID NO: 160934 - DNA, 545 bp, Cannabis sativa
caagccttgacaggaagaatggcagcgcttaacagattcatttcgaagtcaactgacaagtgtgtgccgttcttcaacattttgcgaggcaacacaaagttcgagtggacaaaagagtttgaagaggcctttcagaacataaaaaggcatttagcaacgcctccagttttggctaaaccaataactggagagacgctgtttctctatttagccatctcagaagattcgattagtgcagctatagtgcgagaagagggcaagcaccagcaacctatttactatgcaagtaaaaggttactaggggtagaatccagatatccctctctagaaaaactagcgttgtgcctagtccatgcgtctcgtaaactatggccatacttccaggctcaccccataaaagtgttaattgatgagcccttgagtcaagttttatcaaatccagatgcttctcaaagattgataaaatggtctattgaactggggcagttcgacataacataccatcctcgaacatccatcaagggccaagctttggccgacttctt

SEQ ID NO: 160935 - DNA, 502 bp, Cannabis sativa
attgatatttcttcttgttacacagattatggctcatgccttctttttcctccacagtctgttgggacttaggcttggtctccgccgccggaagattggattaaaatcaactgcgatgtcaaagtcggaggtgaaactatgtgtgttgtggcgattgtgagagaccataacgaatcagttttgtgggtggcggcaaaaaggctacacttcactgacccactcactggagaagctgcggcctgtctcttagccatggagacgacggtatcattgcatcatccttttgttttggtggagagtgattcagagattgttatcaagaacctaataggggatgactctatctgggggattgagaactatgtgcgacactgcaagctcctctctacttttatgactaattgtaatttttcctacatatctagaaactgtaactatgcggcccataatgtggccaaatagaggaaattacactctataccctttttatattgtcctattt

SEQ ID NO: 160936 - DNA, 516 bp, Cannabis sativa
  modified_base (67)..(69): a, c, t, g, unknown or other
  modified_base (456)..(460): a, c, t, g, unknown or other
taaaataatttatttttaatttaatcatttattttaaaccatatattttaataataaaaattacttnnnttaagttgatccaaaattaattaagaattaatttcaactttaatttcattttcaaatttaattttttaaaatcattatataataatatataaaatttgaaaatattaaaatataataaaataaatatttgaaaaatatttaaattatgttgttctaaaataataaaattttcaacttaaattatttttgaaaaaatttaattaaataaaaaattaagtatcttgaactaatcaacattaatatgaaaaatattctattttaagttgatccaaaaataataaattttcgacttaaaataatatttaaagaatatttcaataactaatttcctacaatatctcaatttaattatgaatttcaacaatattcaaattcaagttgatccannnnnagttataaataactaattttcaacttaaatattttatgaaatattaaataattaag

SEQ ID NO: 160937 - DNA, 502 bp, Cannabis sativa
aataactttatacatatacaattatgagttccatgaaggttgatatagataagtttgatggttcaggtgattatcgtatttggaggaagaagattagggctctatttgctcaacacaaactgttgaatgttcttaaagatcctgtggaatggtcagctgatacaaccaaagaccatcaagaagagttgctggaaacagcaaccggattgatcattttcaacctatttgattctataatcagattggttgacaaggaagatacacctgccaaaatttggaacaagttggaagagcaatttcaaaagaaatcattgattaacaagatttacttgaaggagatttaagatgagtccatctaaatctcttgaacaaaacttggatgagttcttgagattgcacattgggttagcaaactcgagagaaaatgaggccttaagtgatgagaatcaagcaattatcattctcaattcattaccggaatcctacagggaggttaagacag

SEQ ID NO: 160938 - DNA, 602 bp, Cannabis sativa
  modified_base (26)..(36): a, c, t, g, unknown or other
  modified_base (68)..(75): a, c, t, g, unknown or other
caataaataacagtataataaattannnnnnnnnnnataaataattttcataattaactgctaatttnnnnnnnnaactaagcgggctttacaataattgtatcatcaccatcactagcggccccacccccattgtaaaaaattggtactagccaacacctaatcaatggttaagtatttcattcgtatgatgagctatataatttattatgagtaatatatggatgaaaccttttagcacattactacctgtaaaatagaagaatttatacaattttggtaatgaaaaaaattgcacatctacttcaacctcctttctaatatatgagtgcaactttctcttcttcatgaatttcatgtgactcttcatacatggcctcataatcatgttcctcctcaaaatctctccgatctcatcttgtataataatttataaaacttaatggcgaatggttgtatttagagatggaaattggtcggttaatgtacgtggaatgcaatcttcgcccccatccctgctacctatttctacccccatcctcaccccatccccgtctaataaccaacggattcggggtaggggaatacccatcggttatggg

SEQ ID NO: 160939 - DNA, 501 bp, Cannabis sativa
tcacgatctgttgtttctctagaggagttatcatcaatccatactgtagctacttgtgaagctaaaggagcgttgtatactctttgatctaatcttacattagactgtatgtggattgtgtagttttgtaagttaggaatgtttcttagacttcgaaaaaataaagaataaggattcatatttatgatttctataagttgtgcaactattgtttgattcatttttgatgatatattgattcggttttctgtttcatgctctgtatcatagaagtacaattgtaaaaaagatggcgggccttcatgtggaagtagttcattaatataatgataaacctatccttgtactctaaacgtgtatattcctttgtttcttttacctaaatttttgtcatttttagcttcgaaagaggtgaaagcaaaatgattattataagtacgaacatactttctaaagtgttcagattctactgttgaggatgtaaataattcataaagtgta

SEQ ID NO: 160940 - DNA, 626 bp, Cannabis sativa
  modified_base (573)..(576): a, c, t, g, unknown or other
ttgattatatttgtgattagtattatttttttgtatttttgtgtgtgtttttcttttttcatttttcatttgattgtctgatgaaactgatctcagttttctttattatttaacatttattattttttatgattttttatagcgtcaaaactagtttcacaggttttaattgttctgtaatagggttgcttcatttttatgatgttattgtatatttgttagtttgtataaaattagttttattattgtatgatatttgaacaataatttttgttttattttaaataatcagtttctgatacacagatcattttcataactggtttttttaagttactagttttcataactgattttttttttttttattgttattcataattgagttttaattttcaattttttatttgattatttcaagaaactaatttttttttgtttgtttttattttggttattttattaattggtttctcacattccactattttttttttgttattctcttatggtttttattgtatttttgtcaagttaattttctttgtttcttttttttttctctttgatttnnnnttctgattctccttgttatatttgctgcacattgtatgcttaaatcaact

SEQ ID NO: 160941 - DNA, 589 bp, Cannabis sativa
  modified_base (29)..(45): a, c, t, g, unknown or other
  modified_base (122)..(129): a, c, t, g, unknown or other
  modified_base (214)..(223): a, c, t, g, unknown or other
  modified_base (272)..(273): a, c, t, g, unknown or other
  modified_base (480)..(491): a, c, t, g, unknown or other
taccaccgtcttactcactatgattgagnnnnnnnnnnnnnnnnngtgggcatggcactctatcactatagggatcaaatatgaagaataatgaggaggtgaaatcactatggaaggaactnnnnnnnntactagttgtctgacagagaaaattagatttgatttggttgaaggcaatagttaaactgccaagtggatgagatgagagcatcannnnnnnnnnatagtgtttcaactagggcttagacttgaattatatggattaaaaaagnntaaaatattgggcaaaattcacttaatggccggctatgaagtggactagtttctagttacaattttgccactttatttcaacaaattattcttcttttactaataccacattttccaattcaatcctataaatgccaaaactatttatttaataattataattaattatcgaatagaattgacatttatataatttattaattagannnnnnnnnnnntcttaattaataaattgaccctaaaacctcttttcttcacaactaagcccttacttagtaaaaattcataaataagacataatctaattttataatta

SEQ ID NO: 160942 - DNA, 527 bp, Cannabis sativa
aagagatgttccttaacaggatgagcattgaagaactcttaaagactgattggagtcctcaacttaaggtgatatttaataatataaataattttcacatctcttcctcatgtattttttgttgaaatattttataattttaataaataaaaaactttaattgtaggaatattttcttactgtgaggggaaaaataacagaaatagacaacacatttggatggaactatatctcctgccaaaaatattttagaaaacttggacttgaagatggtgtttataaatgttccacttgcaacaacaagtgtgactatcctcttgtgaagtaagaaaatgattccaatttttcatcaccaagatattagttatattattgatttatttactgtgtaaaaaaatattttaatataggtacaaattacatataaaagttgaggataagactgcagagacaactttggtgatatttaatgatatagctgagaacttacttgacacagcagcaaacaagttgtttaaacaaaaaac

SEQ ID NO: 160943 - DNA, 506 bp, Cannabis sativa
  modified_base (473)..(480): a, c, t, g, unknown or other
agttagttagggtgttacactagatcttggtaaaacatattctaacaactggtatttgagtcatggtaatgatttattttcatgaaatatgaattaaaactatgatttgtattgatttggatggtttcatgtggtttaagtgcttatttgatgatagtttagaaatcgcaatgtatgttactgaaatattttttatttcaatctgaaattatttttactagaaagtaaacaaaaattaataaattttggcttttacagaacctaatttggattttttatgaattagatatgattttttgaagttaacaaaaatatcaggatttgaatgtcacacgcgcgcgcacgagcctcggatctgctcggacacgctcggcaattcagacaggactgaccgaggattctcggacataactatctagaaaatatcttatttcaactaagtatcttttccacaaaaatttgaaaaaaatatnnnnnnnnagttgttatagaaaaaatctagaact

SEQ ID NO: 160944 - DNA, 500 bp, Cannabis sativa
  modified_base (397)..(408): a, c, t, g, unknown or other
tttaaaattatatgatgaattttctatagatttattatcttctttctgttttagatctctattttgttaaagaaatatttagtttctaattttttttttactataacgtatattttttttttaaaaaaaaaattgtctaattttttatttatataagaagttgtatgatattttttttattctttagagttttctatatagatttattattttttaataagcatatatatttttttaaaaaatatatacaaaaataaatttaaaattatttgatattaattttattgttcaattaatatttatataattatttaaccgtcgcacgcgaagcgcgacctgtttcctactttataataatagtagaaatttgcaaaaataactaaggtggcgtttggtnnnnnnnnnnnnatcagttttctgtttttaaaattaaaaaagtggaaatatttttcaaaagcatgttctataaaactgttttcactttttaattttttaattga

SEQ ID NO: 160945 - DNA, 692 bp, Cannabis sativa
  modified_base (316)..(316): a, c, t, g, unknown or other
  modified_base (363)..(371): a, c, t, g, unknown or other
aaatttcatgttattttaaaaattaaatattcaataaaataaaatgataatttaatgttatttttctaattttacaatttaatttaaataaaaaataacaaaattcataatgtcctatttctatttgaaatatcatgattaaaattatcttattttaaatttcaaataaggtcaatttattaaaaaattaaaataatttaaaaatatcaaatatctgaccttaaatttaacaataagataaaataatcaaatttttaaaataagataattaattaagcaaaaagatagatttttacctattttcaaatacaaattncactaatatcttaaattaatttaattctaataattagatttgaaatnnnnnnnnnaaaaatctaaatacaaaattacacaaaaaaatcaaaattaattccatggaaaaacatgaaaaattgaaaaaattgtatttggtgcggattgcataccatcagcgcgcgcaggagaaggtttctgggcgaggaatgtcgcacaaggatgctgcgtgcagcatctccgcgtgcgtaggagaggctgctcagacagcctgggcgagaaacttcggacacgccctgtctgaaccatgggtgacacccgtgtgcacgtgcatccgcgcgcgtatgggtgtgtcaccacccctaagatttttccaaattttaaaaaatcataactaa

SEQ ID NO: 160946 - DNA, 505 bp, Cannabis sativa
  modified_base (47)..(51): a, c, t, g, unknown or other
ttttaaatttgctacaaaatcaataaatcattagtaacaaataatannnnnatatttgttaatcatcaaaacaaggagatctaaaagtttgagttaacagttgaatgatcaccgaaatcgcaattttcttcatagggtagttgcagttgtttgtgcagctgcattttattttatttggtcaaatcgaaatacttatatttttaagcaaaattttaaatgtgaataatttgataaaaggtgatcttaaagcgagattattacttatttataggaagaatttctctaagagagaccaacaaattatttattttgtttgtaacatgtaattctaccgtatgttattttgcggatgctgatctttgtagcatttgctctattttgtttaataaaattctcctttaatcaaccaaaaaaacaaaaatcgcaaaacaaaaaataaatacaaaaaaatattgggttttatgccctaaataagatcggaagagcgtcgtgtagggaaagagtg

SEQ ID NO: 160947 - DNA, 778 bp, Cannabis sativa
  modified_base (596)..(597): a, c, t, g, unknown or other
gtgtatcatctgttttaggttgtttatgggatgtttgacctatttagaagttgttgggagttaagttatgattggattgagttagggtttttatttcataattttggtttaaggtattcattgagtttcaattgtcgtgacataggaccgggatcgcctagcttgttttccactcaggtcggcccgtacacttgagttttgaactaaggtaagaaaactggtaagcaccgtatgtggctaaatattaatggttgaatggtagtggccttgtttattatcaagactttgattaaacaattgttgagcctaggttatgacctatggtgggaaacggttaataccgtcacgagtaattactcttgaaaccgcggttaggtttgttacttatcgtttgcttcatcgggcaacgatagtgacatatacagctcgtggttgacgagtggtaaatgggtactttataaggtaccaggattgtgtgtttatgatattgtgtaactatgtaagcgtgctgatatgagattgaattgatgattattaccgattgttgttttgttcacttttcttgctgagtctctgtgactcacaggtgctttatnntgcaggtaaagggaaggctaaagttgagctgccatgagtgcgaggtcgtagcagcaatgtacatatcagccgcagtggcatggccaagtaagcaggatgatctattttgaatgtattttgggaatacaaagtttatgttgtaaaaatactattaaactagtttgtgaatattttgaaaaca

SEQ ID NO: 160948 - DNA, 657 bp, Cannabis sativa
tagggtaaatctatagtaggtacatgtgttcttaccctctatagggaagtaaattgaaccaataaaaatttaaaaaaataggttgcattgatgttatgttagactaggttgtaggagatttatttattactttattaatttaattaatactttactcattttttttttttttaaaataatagctgttgagtattttttttttgaaaatttatttgttgagtattttttattattgaatatatgcaaatatataccgtatgttaaagttttattattattatttatttttttataccaaagttatttctaaataaattttgttataatttctaaaattttattttaacaaaaacatattgtgttgaatgaagcaaaagtttcacaacattatccccttactaatactgtaaactaaactagttaagctttctatattaaaaaatcaagcaaatgagtatctatcatgaaaacctacaccataatcgaagctatttttttttttttgtttgaaaccactcacaatttagttttacacccactctcttaaaaaatggctgccatggcgaaatataccacgaggcaaatagaaaaattattaacgagatagagttgtgaaatttatgcttcatttatacaatatttttgttaaaaataaaa

SEQ ID NO: 160949 - DNA, 562 bp, Cannabis sativa
agggccatatgaaatcgaggatgagatcggctccggaacttataagctgaaaaggatggatggaaccattgtgccaagggcctggaacgctgaccatctctgaaaatattaccaatagctcgaataaactaacttacgccttgtttaaagaatttgtaacgtccaaatgtatgcaacctctaaattttataataaagctgagtgccttaaaaacaaagttttcatgtcactcaggggggtactaaggcataccgcacggacagatgtaaaacaggctcaaagtaaaagcaaagttcaaaaagaaatatcctgacccaaagggcaggtccaaaagaaaaaaaatatgcataaaaaaagatcatgtatagaaatatcactgacccaaaggacaggtccaaaagagaaatatgcataaaaaaggatcatatatatatctatataaatcctggccctaagagcatgtcaaaaaaataatataataatatatacaatacaaggggcccggggacaggccatagataattgtctccccttggaaaataaagcagctacttaattaaag

SEQ ID NO: 160950 - DNA, 679 bp, Cannabis sativa
gttggagatgagtaacagacaaggttcacccacgattttcaattaactccttaatcctaggaaaatgcttgagcttaacacgatattcaggccacaatgggcgacgacatacattctcttgaaatctaagcagtttatcattagagtaaaacggtgcattagacttgttttgctcagacatactaggttcagggattttgatttttttagccactgaggaaggagtagcatcagaggaaacatgtttcctttttgggtgaggcttcgacagagggggctgagacgagtcagactcagtgggagggaggggtgaagtggtggatgggggtggatgagccttagtcgaggcaaaaggaattgacatggaccgagtaaaccttctaagaagacttacagaggaagaagtcttacctgggattggtgtgcatggaggcgattcagacctagtgggggacgagtggggttccacagttggtgagagtgacgacgagccatcaccagttaacgcagacgttttcacgagacgcccagcctttttgcccattgttgcacagccaatacaccccagaaacagtaaataccacagagaagacgaactgagcttaagaagatgaatagtttgactgacaagtttggtgaaatcaaatgatggtaaaaacagatatttattaccatttat

SEQ ID NO: 160951 - DNA, 600 bp, Cannabis sativa
aaatttattaattaactaaagaagaaaaaagttaaaataattttagatcatgttcactccgtatttcttgaatcccagcactcaacacttgagaaaagaaaatccactgaacaaaaaactcatcagagctatcaccatcattactttcttggtccaaatattgatcaatacaattactccaatgctcatttatcttattatggattctttcaatttgtctatggaaaccttactttcaagatcctctacctttgaatgaaacactttaataaagtttttgatctttatagggatgaattcaagactaaaaaaggttacctcgaaatgaagaacttcattgatgatatgctgaactaattcgtcttcgatttcatcattcaaataaaatattgtcttcttcttttccttcttattcgtctcgttataccaaaatagtccaaccaactccattacttttttaaaaaatcgccataaagtatcagaaccatttattagaaatgacttgttacgattctcttccacatttaagcattggattaaagttataacctcatcaagaaacaacaacaatgttgaaaatattaaacattttgaacactt

SEQ ID NO: 160952 - DNA, 565 bp, Cannabis sativa
  modified_base (215)..(215): a, c, t, g, unknown or other
cacttccattgttgaataagaaatgcaagttagtttagacccccaagaaactgcccctccatctagggtaaatacccaagccgttgtggacaaataatccccaaggttggctatcaaacttgcatcattatatccttttaaaattgaaggaaatttggagtaggcaaggcataggtttttggttttctttagataacccaaaactcttcctattnccttccaatgatccatacttggattactagtaaacctactaagtttactcaccgcaaatgatagatcgggccttgtatattgggtagcatacataaagctccctatagcactttcatactccaattgagccaccgctctaccactatttcttaactatagtggtttactatgatcgaatggtgtgttagactctttagcctttagatggctaaacttattcaacactttctcaatatagtgtgcttgccttaaagcaaaactcccactataccttgtaaatttgatacccaaaatagtatctacttctctagggtctttcattttaaaggttgaagaagaaatctcttag

SEQ ID NO: 160953 - DNA, 519 bp, Cannabis sativa
  modified_base (483)..(487): a, c, t, g, unknown or other
ataattctaaaattagactattctagtttatggatgttcactaagcaagggcaaaattgtaagataagagattctaagtcttatttattaattgaaagatttcattaagtctaataaataaatttattaaatgacaattaatttttagttattaaataattggaattgacatttaagtggttaaattgaaaaattggcatttttaagaatatgggatagaaaaatgacaaaattgcaaaattgcaaagtgggcccaattcactatccatgggcggcacacttagtgtgattttaccatttatttttcctattattttaatgctatttaattctaacctaaacctaggtggtaccctataaatagatagtgatggctcacattcccacttaactttgttagatgaaaactgagcctctttctatttaccatagccgccacttcttctctttccttcttgaattttcgaaccttgagtgaatgannnnntgcccacacacatcaagtagtatctcaatcat

SEQ ID NO: 160954 - DNA, 538 bp, Cannabis sativa
cagatctttgcatttttttgtcaaggtaaaatgaagaaaacaaagaaggggtatgtatttgaaagattttctaacaatgacgtgtcctcgttaaaaaatctatgtcctcgttagaaccacttaatatcccaaaagaaaccgcgaagacttggctcgttactgaaatttaatgtaacgaggatattttatgatgtgctcggtagacaagtccacgtaaagcctctattttatcatgggaaattttaaattccatgcttaaaataccttataatttttcccctaaatgcatagttattaaaattggtcatatatgaccaccttactaattttcctaaactacccctcacatttcaaaccatctcagcctctctctcagccgaaccacgtaaaaacccaaccctcagccgacgcgactattctcaacccacgctcaacccacggccgtccacggtgaacccaggaccgtcgacgctcaaccccgaccgtcaacgctcaaccggcgaccactccgaggcgacccgaagcgaaaatgggattc

SEQ ID NO: 160955 - DNA, 646 bp, Cannabis sativa
aataatctatatatatttatatatatgtttaatatcatataaatgcatgattcacgaggagataaagaaagagaaatgtgcatgactagcaaaactaattaaatcttagaaaagataaagtgttgtaaccactaatagcaataataattcaacctaattatagtaaatgagtaaaaattaatttaaataatataccattatttatttgtttttttcttaaatatataccaaaaatttattatcatcattaattataataattatcatggttacaaacttattaattttgcaaatagtttagcaaactattgattttacaatctttttctacaccaactaaaaaaaaaaaaaattcttctatactctcctatatttattgaataataataataataataatagtaattatatgatatataaaatttatagtaactatttgattgcagcatctttaataaaaaaataaataagagatgtattgttaaaatatagttcattttgtaaaaaattaactctaatactgtgttaaagttgttaaattatgttcctcgaatacaaaatagaatactacatacaattataatactcaaattaaatttcattaattaacttttttctattttgtaaaattttaatatttttatat

SEQ ID NO: 160956 - DNA, 514 bp, Cannabis sativa
  modified_base (27)..(31): a, c, t, g, unknown or other
  modified_base (409)..(409): a, c, t, g, unknown or other
cggtctcggcattcctgctgaaccgcnnnnnaaaaaaaaatacatatatatagtttagattcataatgtgattcttatgtataggtggctttgacaatgtatacacataatttagtttagtgatgatttaccaaaaaaagaatatagtttagtaatgtagtagccaacgactaaaattaaatataaccattatagttatatatttgatgtaattattaattttttatatatatataaatgagtaattttggcataaatacttaagtttaactatcagttataaataaatacttaagttttatttttggcgataataatacataagttatatttttggaattctgtaggtacctaaccgttaaatgtgaagtcattatatctacttgtcattttcttattggtgtatttnaactattttttttaaatattaaaaatttaatgactttggaccaatcaagaattgtcacgtggcaatttatttaaccaggtacttacagaagttccaaaattataa

SEQ ID NO: 160957 - DNA, 661 bp, Cannabis sativa
tgtagaaaagtaaaaaaaaagggctttctatagtcccccgctgcagcggccaaaagccccgccgcggccactggacatctttttctgcttcgacctctttcagtaaaataggcataactttctcatacaaactccaaacgagctgattcaagatgcgatggaaagataaaaaagagatctaaaacttttatgtttttacttggtccaaaatctgatcagaacatattcgaattcaggcttgaagtttcagcttttttctctttcaaaattttctctactttatagatcactattttccgaaatttgtccaatttataaattccaagcgtagaaacctgaaatcaaagaaaacaagcataattctattccaaaaataataaaaaagaaaaaaaaaactataaaatatgacccgaaacttaggctaaaaatagcctaacaaattctcccaaactaaatccttactcgccctcgagtaagactaaaaactaagacaaagaagaaaaaaaatacaaactaacacataattaactaagcctttagacaatcaaactgctactgcaacctgtgaaacttcagtcaattatttaaaccagaatttcaatctcaaaactctaaaattaattcggatgctactctgaaaaataatgtaaagatgcaaatt

SEQ ID NO: 160958 - DNA, 513 bp, Cannabis sativa
aataatcttattttaaatttcaaataaggtcattaataaaaaaaaataatttaaaatattaaatatctgaccttaaatttcaaaaataagataaaataatcaaattttaaaaataagataacatactaagcaaaagatagatttttacctattttcaaattcaaatttccctaatatcttaaattaattattttaaaaaatattaattaatttaattctcataattagatttgaaatttgaaaaataaaaatcaaaatacaaaactacacaaaaaattcactgcataccatccgcacgcgcagcatgggtgcaccgccgaggaatcacgcacacggatcctgcattgtaggatttccgcgcgcgtgggagtccttcagacaccacatgggcgagtttcttcgaacaaggagctgtcctaatgcgcgtgctcacgggtgatcacctgtgtccgcgcgcgcacacagggtgtactcgatttttagatcttttttttcaaatttttaaaaaatcat

SEQ ID NO: 160959 - DNA, 636 bp, Cannabis sativa
attccagcattgaacagatcggcggataagaatatttgtccatctgtaatcgaaattacattagtaggaatataagctgaaacatctctcgattgggttacttattattaaatcatagtatttagatacaagttatcattaatttagttttagccacaataagtatggcgactgaaaacatatttagtcacgacaaattgtaatttttgtgactaaaacctttagccacagactttttagtcacaacataggaataataatatattattagtcacaactattttacttataaattttggcgtgactaaaagtaagattttttgtagtgacggtaaattatttaaaatttttaaaattttataaaatgtcttaaataactacaacatacaccatatcatattttatccccataattgtatttgatcataatcatattttaaacttccactaacaattcttaaataaaaactcttcaactaacaatatcacccaaataggcatttttaattaaatcgattgtacattaatttgacaacaaacaaatatcaatctatctattaccagtcccacccaatcatgtctattaatttaacattaattaccctaacgtacgtataaacattttgagcaaaacaa

SEQ ID NO: 160960 - DNA, 1123 bp, Cannabis sativa
  modified_base (173)..(176): a, c, t, g, unknown or other
  modified_base (319)..(320): a, c, t, g, unknown or other
gtcccctatccttctaacaatgaactcggtcaagattgctttcaaacgtcctcaatcacccaacgtgaacgtccgccgaaaccctccgccgccgaatgatttcaaatgagtgttagcaatacatctctccgacagtgaagtcagttcagagagcttttaaacatcctcaatcnnnnaacgtaaccacccagttgatagttgtgacgccgctggattttagacgagtgtccaccatccttcagacaatgaagtctgtcaagatatcttttaaacatcctcaatcacccaatgtgaacgcccgctgaaatcccatcggagnntggtgacactggatgatttcaaatgtgtgccagcagttcatcactctggcggtgaagtaggttcaaacagctttcaaacatcattaatcaaccacgcaaccacctagtttatggttgtgacgccgcttgattttaagacgagtgtcccccatcgttctgacaatgaagtcagtaatgatggctttcaaacatcctcaatcacccaacgtgaacgccagacgaactcccatcggagtgttgtgagacaggtttatttcaaatgagtgtcagcaatacatcactctgacagtgaagttggttaggagagctttcaaacatcctcaatcaacccacgtacccacccagttgatggttgtgatgctgcttgatattagacgagtgtccaccatccttctgacaatgaagtcagtcaagatagttttcaaacatcctcaatcaccgaacgtgaatgcccgccgaaatcccatcggcgggtggtgacaccggatgatttcaattgagtgtctgcaatacatcactctgacagtgaagtcgattcgaacaactttcaaacatcctcaattaacaaccgtaaccacccagttaatggttctgacgccgcatgattttagacgagtgtcccccaaccttgtgacaatgaagtcagtgaaggtggctgtcaaacatcctcaatcacccaacgtgaacgccaggctaattcccatcagagtgttgtgacgcaggatgatttcaaatgagtgtctgcaatacattactccgacagtgaagtcggttcggacaactttgaaacatcctcaatcaac

SEQ ID NO: 160961 - DNA, 507 bp, Cannabis sativa
  modified_base (204)..(222): a, c, t, g, unknown or other
aatatttttagtattaagttgtaattctattattttttatgtgtaaaaaaaaagttgtattttgttgtcctaatacaaaaatatatctctagtgtgaataaaatttaatatttgtgttaatattttttttaataattatcattcattatcaatggtgaccttttatttttttataactccaagtattattattattattattannnnnnnnnnnnnnnnnnntattattattattattattttaggggagttgatgtggcaacttctatgtcattttttttttcaatctttcttctcttaattttctagatttactcttatttttaaagatttaattatgtatttagtctattcttttcttttaattagtaccatttaaacccatgaactaattttgaaatttattacattaatttataacattcaaaggatacaaatagttttctttgtattattattaaatgaaagaatcaaaatctatctatttatttatctatatataatttt

SEQ ID NO: 160962 - DNA, 502 bp, Cannabis sativa
atgggtgatatttcattttagcaacctagtcaatttatctatccagaaataaatcggcttcctatatgcatctaagcccaaaagtaaacatatatgcttacaaaggtcatattgatttggatgagccctatcatgtttctaggtttacatagatgaatgaaatacaaaatttacctgttacaaataattgataagatctattgataattggactatgatcaaaatcatatcattggatctgtcaacaagttaatcatatcaatttagatcaaataaataacaggtttgttaaaacaaggtttttgaataaacaatttaaatataacaaacaatgtccatgtaacaatatgtgaaataagatatttatatataattaaattattattcaactaaccaactaaattttgaaaatttttgggttgttgaaacaacctaaatatcttttcaaaatttaaattcaaaattgaaactaattttaaaatatctaggtttatttgaatta

SEQ ID NO: 160963 - DNA, 572 bp, Cannabis sativa
  modified_base (102)..(117): a, c, t, g, unknown or other
atagaatttatacattaaataatcctgaaataaatcatgtgaaccatgcaacataaaatgttatttatgttctttagtaactagtaaatctgattatattgnnnnnnnnnnnnnnnngggcacaaaacccaacagatacatctaggtattatgagtcagggaagataaacttttgaacttagaagagatatcttggtagaaataaagtaatccattctaaaaatggatttcaagccagaaggtttgtgaaaaatgacaagcttgagccgcccttttatacacaaagtacagtgacaagaaagccaaagattaagaaatcaaacggctgggaatcgtgctgaatatgagtaggcgattcataatgctcttcgaaaccatacaaccactagaatcaaaggaggcgtcctttccaagaaaggattttgatgaaaatgccctccattattaaaaagctctttttacaaaaaaagaactttttaatgggcaatcgttatacccgaaaatttgctggaggacacatgtcaagataaagagaatatgaatcagtgccgtatctttttatggaataactc

SEQ ID NO: 160964 - DNA, 528 bp, Cannabis sativa
aacaaaagtgttaccaaacggcatattttttattaattattgtaaatatgtggtacgtgctttttaaaccctttgagccaaatgcatcaaaaggtaaaaaaattcatagaccgtcaccgacctcattgtctctatcccgtaggaagtacgaggtaaccccaattaataaaatgatatgtgccttaaaagtttaagggttaatgtttcacaaacagtatttttgaaatagaataaaatagaaaattttatgttgaaagaaaaatatagaaccttaaaaattgatcaaaaatgaaaaatggttatttttaaaactaaaatccataataactaacgggtttaaggaaaaaaaaaacctttgacgaacaacgaagcccaaactgaacaaaggaatgtcattctaatactttaaatgtcattccattaaaataaattttaaatttatttaaacatttccattaaaattaataaaataaataaatttacatattaatcaaatctttacataaatacaaaataataaaataaata

SEQ ID NO: 160965 - DNA, 537 bp, Cannabis sativa
  modified_base (46)..(70): a, c, t, g, unknown or other
attgtatcactttttaataacgtagaaaaaaactagcataaaattnnnnnnnnnnnnnnnnnnnnnnnnnttttactagtatatatatatacacggtaatattatagtaggttctagtaaaagttccctattaataggaaatttatttttttatcgttgattttagatcttgtagttattatgatgtaaggtatatacccttactacaggactgcttatatacaattaaaactttatacatactaaaataatatttgataatatatatttattttaaaaataatataatattaataattaaaaaattaattattttttatttttaattattattattttttaaaattaatttaaattatttttatatagatatttattttcaaaaaattttctaatgtaggattgtttgaatgattttagatgctctttaattggaaccgtaccaacttgcttctcctaagctcaatttttttgacagaaaaaataatatctatccgaattaattaattttttttttttgataagtggcgtctcaaa

SEQ ID NO: 160966 - DNA, 535 bp, Cannabis sativa
catttgcattctccaaacaaggtaattggtgtcatctaactttgctgaaattgtttggttgaaggaagggaaatttgggggtaaggttggggaagaagatgaagtcgagaggggagaggcggctctagtgttagggttttgtgtgttagtgatagtagggtttggaagggggttttgggtattttcattttccatttgtggtgttgaacttgtacactctattgaagccatgaagagccttttggctctgataccatgtcagaaggaattaaaatgtgtattgatattcttcaaattacaagagtacatagtaccacatatttataataaaaaggagaccaaaggagggacacatgtcaccatacaataaaagcaagtaaataatacaataaaataacactatggtttaacaaagtcaaacataatatgataatttaaaattcatgcaataaaaaacttgacacacaaaaaagtttaaaattacacatatagtcatatataaaaaatatatataaattcattatttattataaac

SEQ ID NO: 160967 - DNA, 736 bp, Cannabis sativa
tatcgtttatcgtttatcgtttatcttctataataaatttcttctttattgaaaagtgagaaacgtgaagggtcgaaaatattattatggtgaccttttatcttccttaattcttattgcattgatatttgttaccggttcgatatacgtgaaattaattatctccttgtttctattcattcattttaaaattctacatcacgtattttaatttagagaaatgcttatatatggcaatgatgtatgtaatattgcttttggaatttattatggggtcccacatattttatttcaatacaaattttagtaaatggctagcaattataggaagtcacctcatagtggtattagagcatccctaataatagcgttttggaggatgctcgatgaggtagaaagtttaaatggtaaaatataaggatgttagactattggagaatgcttgaaatttgttttgatgtcacacaatagcattgatggtatgtttttttacaataaaaaattaaaagtacaatatatatagataatagtttaataaagaaaaaaaattatgtatatataataatgtgtgagatcataattatagtatttttagaaagtgatatgtatattagagcatctccaatggtaaaactttagaggatgcttggtgaggtagacatattatgtggtaaaatattgagatgttataccattagagagaaaagaatgacattctagaaatttgcatagatgc

SEQ ID NO: 160968 - DNA, 502 bp, Cannabis sativa
  modified_base (62)..(68): a, c, t, g, unknown or other
  modified_base (426)..(457): a, c, t, g, unknown or other
ttatcgttgtagaaagttcatatttagggtgtttaaacaacatatttgtgagtagatctaannnnnnngtaaaataaatttccaacataaaaccccccattttatataggggttttaacccttgtctcaaggaggcaaacaattcttagatttttctcttgaattagccttttaacttctttaactttccaagaactattaacccccctgagattccaacaaaggatcttatccatcaattgtgggaggctctaaccctcccccaattacatttttcaaattagaaagaatttttccaatctggatatcctctccaactccataatcaccctctaaagcttgaaaaacaatttgcaagggaaccttttgtcacgtttttcatgactgcaagtttatgatatcacgaccctgttgggttttatgccnnnnnnnnnnnnnnnnnnnnnnnnnnnnnnnntacttattaatatagatcagaaacaacatttaatgttgcatggtt

SEQ ID NO: 160969 - DNA, 615 bp, Cannabis sativa
tatataaaaatataatatataattcaatttaatataatacaatacaatacaagttaatacgatgttccaaacgagccagtgcataagattaggacttggacaaattaatagtctctggtatgttgtgtttgatgtaatattgaatttggatatttgatgagtttgaatgagttttcttgtttgtttaggaatgcatctgcatatctgtgttcgatatgggtataaatgtctggtggagaagaatagtgggagggaaaaaaataaatcagaaaaacttgagttgtttagtatgaaagaaaaatagagataagagaaaagtgagaaaaaaaagaaaagtatggtcctttttaatgatgagaaatgtccttttaattatagttgaaataaaggatttaaaaatggtatttatcatctaaaatagtatataatatatagaaaaaaaaaatgaaatgaaaaattatattataaattttatggatttttatactttttgtgtaaaaatataatttttatgaaaaaattgaaataatgttttttttttttctaaaattttctaataaaataatattttttaagaaaaaaaatcatatattggtaaacttataattgatagaa

SEQ ID NO: 160970 - DNA, 705 bp, Cannabis sativa
attctcttactttttgtcctacatgaattttaattttttttaaaaggagtccaaagaatgactaaattataatgatattttaagtttaaattttagttatttttttaagtttaaattataatgttaattttgtacaaggagtgtctatgtgtcctcttataattttttctttccatttttcctatttttttatcacattttcctattttatttgaaaaccaaaccatatgtacaaactaaaagtctcacattgtttaaagattgtttaggtttaatatatgtaggttataaataatattcttactatattacttcctttgtctaaaaaatatttttttttataggtgattgatgaacttaatcttgcccaataagttacaatttttttttaaagtgaatacaaagtacatttttgtatttttcaatctttttcaagtttaaaatgattataaaaaaattaatttatttattttttatattaaaaattattttcttattattttttattttaattttatttaaataattaaaattatattaatttattaatgtataatatttattagaataataagacactttaaatatatattaattaatatacttcagtgatatgagactattgtaaatgttaaacttatcaaatatgtgagtgatagatattatttatttacacatattcttacattttttaatttttgcaaa

SEQ ID NO: 160971 - DNA, 854 bp, Cannabis sativa
aaataataatttagaccaataatattttgacacgtggtaattttgaaaaaataaacggctcagttaaaattaggactaatggacaaataaaaaacatgatcttaaagactattaccgctatttctcgtggttggggacttatctgtgtcaaattgaattttttgaggacttttgccgcaaatttctctttttaatacagtgtctcattttttttttgatgaaatattaacttcattaaattaacattctgagtacaaaacatccagaatagcaactggagcattagacacagaaatactacgaccagataagtaccgtgacatcctagcaacagtatgtgctagatggtttgctgatcgtttaacaaaacagacttttattaaaggcatagaaagcataagagaatgacagtcttgagctagatttccaaaaatggaacaaagaggcgagcggctacgaatagcttggatagagactaaactgtcagattccagaacaacatgttgccaaccttttcgtttgatccaacttagggcctctttgatacccatgatctcaacaacctctggtgtgaaggcaccattaaaacaatgagttgtagcatcaataagagaaccagagtcgtttctggcaaccaatccataaccatattggttttcactagcaaagatcgcagcatcaacattaaccttgattgtttttgtttctggtttagtccatagctcagctccgtcatcagaactactatagtagatatgagacaaagaggtgttatcctgagctttacgccagtgatcaagagcaatgcgggctgaagatagaacatttgcaacagtaagaaccttatctttcca

SEQ ID NO: 160972 - DNA, 536 bp, Cannabis sativa
aaaaatatatatatatacaaataacattttaatgtaaagaaaataataatttacaagtctaatacatataatacaattatattttgaaactcaatagataaaatatatataattttttttttacatacaatttaaaataatgaaattaaacatttttttatacatataatttttttttttcagtctttgaatttgttattcgttattttatttattttagtttgttgttggagacataaaaaaataataatttattttattttgttgttagttatgtgatgaagaaaaatattttttttcataaatattaaataatttaataatataaagtaacaaatccaaaataactaatctaatccgcaaaaagattggattggattggatttaagctattctgcggatttgattagatccaaaaaaaaataaatccactggatgcactataaaaaaaatagttcatttagggctcgtttggaacgctgtattaggtcgcattgtatcgtattgtattatattgaattggattatatatcata

SEQ ID NO: 160973 - DNA, 830 bp, Cannabis sativa
tcgagccaggttggggaggctaaaccaggaaacactattggaataccacgaggtaaaggtttggtcacatcaaacatgatgcgcacccgcatgtaagagccccaagtttcaagcaaggagggctgatgaatttcaagaagggtgccagtaatttggcccagcaatttggcaagagagatagaccttcgggaaaaaggaatattgtgaacttgtacccaaaaggggatttttctcatagtttctggggataaggtggagtcagtatcaggaatttccagcaggatagggcatttttcgaaaatccatggttggttgaggatggttctacgtctgtcaccttcacagtgaaacgctgcaaggtacatgtttgaattgggtgatctttctttgacactcactgggaagcgtcctttccagtgtttttccagatagtttttgagggcattgtggttaaaattttttgttgtgaagagagtggccatgagatgaaactggggtggggctggtggaagtccctcatttggatcgacatgttcagcaagagaatggattgtattttcagtatcagtgaggtgaagggctgcagaaaaagatttagctaagtcttccattttcagtaataaagggacacacgaataaagcacagatggataatgcacaaaaagggtaagcttccctaaatctagaactgagtttaaataggaaactaagcatagagcaattaaggatctaactgatagatctcctaaatctagagatgtactcgagtgatacagggagaataaaagacaggtatttaataccggatcaggcaggggattatccaaatc

SEQ ID NO: 160974 - DNA, 593 bp, Cannabis sativa
  modified_base (269)..(274): a, c, t, g, unknown or other
attgtcagttgtgcacaatgtattccatgtttccatgttgaaaaagtacgtgtctgatccaatgcatgtcctaagttatgaagcattggaattgcaactagacctgtcttatgacgaacgacctgtgcaaattttggatagaaaagaaaaggttcttcgaagtaaaaccatagcattggttaaggtactctggaagaatagcaaagtggaggaagccacttgggaattagagtctgatatgaggactcagcatccagagttgttcaggnnnnnnttcggggacgaaatccttttaacagggggataattgtaaagacttatgattaatacattgaattattaaataattagggtttatgcatgggattttattattatttataaaaatgcatattgtggaaatttatttaagttcgtatatgtttattatgttatttatgtaaatttcttaatgtttgtaattgtgctcggaagtagtggaaagtgatgttgggcctttagagagtcgcattttatgtgttttagaatttttggggtttggaaaatgactagtttacccttgggagttagtaaccattttaatttagttaaag

SEQ ID NO: 160975 - DNA, 506 bp, Cannabis sativa
  modified_base (178)..(184): a, c, t, g, unknown or other
aatttctctggccgctcactgagattgtttacatttgtgagcggcttctccctggcttctttggcatatcgctcttgcgacttgcagtagtctcgtacgatatggggccctccgatgatcgttaagatattgcgaggtgttctcgaaccactcgcgctttgattttcttctttgtcannnnnnnggggatgaccttcctcgttcttcttatatttgtcaaattttcctctctgaataagctctcaacattctaaagtggtatgaccaatatctttatggtacatacagaactttttggggtctcttctgtcgcggtttcccctgatgggggtggctttttgaagactccattcctctcttcaattgcataaatgtggtctcggggcaccgtgagttcggtataattaacgaaacgcggtccacccttcctcttcggcgagtactccttcttgggaggagatttggccaactttggacttcgttgtctccgtgggctgtgtcttctc

SEQ ID NO: 160976 - DNA, 544 bp, Cannabis sativa
atgaatttttgtaaatatgtttttaaatgtgtacatttttaaaattgtgtttttttgcacattttttgtaatataattgtttttgttgtacactaatgaaaaaaccccttaattattcaactctaacaccaacataattttgttacattgttttataatgatatacatatatagtactgaatgaaatcttttctgacatttcaatttctttctattttttttaatctcattaatcataagagttgatcacgaattcagttgatggggaaaagtagttagtttcttcacatcattatctagaatttctctgaatcattttacctagagatggaaatttatactgcggggatgggtaaccgcggggacccgcctctaatggggtagagattccccgtcttggtggttaatagggcggtggtgggggacaattttaataaccgaaacggggatgggacgggggcggagataatactatccgtaccatatccgaccccggtatagatatatataattttctttttattcttaacatatatatagtata

SEQ ID NO: 160977 - DNA, 592 bp, Cannabis sativa
ggcacttcagcaaacttgaagccagaaaaacctctcttttcgttctgaactcacttagcaaagaaagatggtgaaaataagtttatgtgccaatgctctttggtattgataggcaagtcacaaaaagagataatcatttcaaaaggacctcagacgcctcgtttccccctaaaaagcaaatatgggaaataaaaaataatcaagtgcaaccatgaactgtggtgagagaaatcagatttcgcaatattaattgtcagagcattaattagccaaaaaccgaagggaaacccgtcagcctcacatcgagtctcggtcagacgcgctcgccacgtgtccccatcaaaaggcagaagcactcgaatgaagtctacatgcaacttcggaagtcccgtacagacttgggggcaaatgttatcctaacttttgtactctgacatgacatcacatgatggtgacatgtggaatcaactttgagtatctgctcgaagggcatagtcaaaacaggatgcctcataggcatgtttggagcaaagcgatcagcaatccgcgcagagcaatcaacagttagtgaattcagctttcgcatcgtgag

SEQ ID NO: 160978 - DNA, 599 bp, Cannabis sativa
actcaaactcggaatcgcaactggaactggaactggactaggactaggaccaggaccaagattaagacacagaccaaagcccaaacccgaccgagacttaagcctgaacatcgactaggacccaaaccagaacatagaatggaacccaaatcgggacctggacccagaatcgagatacggacttgggcaacgaaactaggagcgggacccaagacccgaacccaaacccggacttaattctaggacccaactcgtgacttgacatacgaaatggaaccagaccgagacccgagatccggatccagatctggacttagggcttggacagaacccgtagtcggtgtttggatctggggcccagccccgaactcgaacctagaccaggacccgaaactaaaccctgacttgaacccagtcccaaatcgcaaccaagacccgaacacgtaccttgtgagccgaaattagaaccgaaactggaagtagaccgggacccagattgaggttagaaaccaggacttggacgtggacctggacctggaaacgtaatcagacctggacctagacttggaaccgtaaccagactaggacccgaactccaa

SEQ ID NO: 160979 - DNA, 535 bp, Cannabis sativa
acctctttatgaaattcttcagtgtctccgtaggcagctgcttgatgttaatcaaggtgctgacctccaggttgacttttcttgcggcgacaaatggcctcctgaagctggtttgcaacttattccagcaatctacggatcctggttccagtttcttgaaccactcttccgcggatccacttagagtaagtgggaagcacaaacacttggcgtcattgctgaccctcatgactgtcatgacccgattgaaccgtgacaggtgatcacttggattagagttcccggtataagctgccatctcgggcatcttaaaatttttggggagctctgcttccaggatgtgtttggcacatggctcccggtcctcacaatcagagtcggagtcatcgcctttctgtcttcgggagactcgggcgatgtcttttcgaaatatggcaagttctgccatgcttccttcatttaacgttcccgtggagaccgcgggtccgtatttcttttggtgtaggtgatcccggagatcaccttggttcccgtt

SEQ ID NO: 160980 - DNA, 626 bp, Cannabis sativa
  modified_base (387)..(405): a, c, t, g, unknown or other
tgacatgataatcggcgataaggcatacttacacctttgataagtgttatgtccttttcagggcattgacaaagtttagcagtattggatggatggactatacattggatgggaccgatattgatcttggaaaagatatcataagtacttactgttatatctttctaagtcaatatcatttgttgatcttaggtctaaggatcttaatcctgatatgattaggttcagcttagttgtattatttaatttcttcaagttgtttgtggaagctaaccaatggttctgacagatatttacatcttggtaacatggtagttcaattgagtgggagcgttgataatagatatggaatctatagctctataaatatttagaagtgaaacgatnnnnnnnnnnnnnnnnnnntgaatagagataaatgattaaggcctcatttcagtaattatagtagtttactaaaatatcatttataggcagctaagtgttttaaggataaaacacattgaagggtagaacggtaaatttgtcctttttcgaggtagatcatcaataaaggatctttcactattaggattgtaataatggataatcataatgtatcaatatcttggtacatatagagtgtt

SEQ ID NO: 160981 - DNA, 509 bp, Cannabis sativa
cttggatgaattgaacttaagtccggtagagatgctgagcgagccaagtatatgtgaaactaaagacgtcgagatgatagatagctatcctgcatcgatgactcttattatcaattatttactcgacgaacaactcccaaatgacaaaaacgaggcacaaaaattgttgtattcagtgcctcgctacacaatgatcgaagacaaactatatagaagaaggtactcaatgcccctacttcggtgtgttctccccgcagaagcaaaggaaatcattagagaaattcatgaaggcttctgtggggatcatgcgggctagcaaagtctatctaaaaagatcattagacaaggataatattggccaacgatgaataaggacacacacaggtttgtcagagaaatgtgataagtgtcagaggttttcacatatacctcgcataccgccaacatagcttagaatgatgacctcactctacccattttctatgtggggtattgacctaattggggca

SEQ ID NO: 160982 - DNA, 537 bp, Cannabis sativa
aatgggtgggctagtaggaatttagcctttgctggccgtgcgcaattaattcattcggtattgcttgggatccggaacttttggatgagcctctttattttaccccaaaaaattgtggcaaccgtggataaaaaatgccgtgactttctctaaggtgtgaatggtaataggagtaagctgcatatgccgtcatgggaaaaagtttgtctccctaaacagttcggtggtattggtttcagagagggtaagaaatggaacatggcgatggttgccaaacacttgtgggcgattttgagcaagcaggataatctttgggtgaaatggatcaactccatttacttaaagaagcaggacgtgtggtcttgcccgataaaacctgacctgagttggtacttcaagaagcttttgaagattagaaatgtgaccaatgcaaacatgttgaaccaggcggcgaaaggtaataaattcaaagtgaacaggttttataatgagttgattggagctgttagaactccctatactgctactgtttggcat

SEQ ID NO: 160983 - DNA, 570 bp, Cannabis sativa
  modified_base (499)..(506): a, c, t, g, unknown or other
taagagtctcacattgtttacaaaactatgtgagtattatacttattaactattagtaaacacaatatatattatatttcattaaaaaaaatacaacaagtaaaatatttcttcattcacagatttatccaaaaataatattgtttctctttataggggtaattgaataccttatccaattaattttatatatttatatataaatatatatatatattctattgatcaactttatataaatatctaaaaattaatatttttttctatagatttgattatttttgtccatttacatataatatttgtaattttttttatttcataattactttaaatatacattttagttagtttatgtatatatacatcttaattgagtttaaaaaatgtggcactagaaaagagaagagacaaaaatattcatcaattaaaataataatattagtctaacttaaaaaaatgatagaaataattaatattataaataataatagtaatnnnnnnnntaacaaatcatgattcattaatttaatgaattgttgcaacaaaaaattaagaaataatatttta

SEQ ID NO: 160984 - DNA, 643 bp, Cannabis sativa
ggatcccatagaatccacaaaaataccatcccaacacttgactttccagtcgtataaaacaactaatatgattggaagaggatcttatatttgagatttcaacgttctctttccatagtaacattaatcccctgcttagaccatttcgtggcacttcatatccctcttcaaaaccaagacattttttcatggaatccagttttccttctgctaatttagtctccataaagaagatgacatctgttttatgatacttcaacaacaattttgtttctcgtaaagctacatctccattaagtcctcttacattccaactgactatagtcattacctacttatcattcaaaagcaaaactaatattaagatatttttaaaattagatggttattaaaattttttattgctcctaactaagatttttgattcaaaaaataaatttgttgtaaattttttttattagattttaaagataaaataccaaaactagtacctttttagatgaaactctaaaggtccactcttcctttcttgagagattcctataagtttgcaaagtatttgaaatatgaagcaaaattagaaaaaagtcttaatactccaaactttaaaactgttttcttgtagaaacaaaacaatgtgcaa

SEQ ID NO: 160985 - DNA, 522 bp, Cannabis sativa
cacgagccaccatacccaaccacatctaccattaggaacatcaagtgtagcatcgacgttgattttaataaacccattggcaggcggcacccaggccgatcgagaagagcccctgggtgtggaagccaagctccccaaagagtgagaaatatcaagagacttatctaatctctgatagtctgcaaggaagtcatgaccacatgaaataacaatatatgaatcaatcattttatcattatgcacccttttgttcctcctaaactaaattctccacataaacaccaaaattagctctaaggaagtaattggcgaaggttccagaaattgataaataaatcataaaaatcgtgataaacaacaagtggatctaccgagtaaatattactaagttttcagcagtcaacgagagatgagcaacaagaggcgaaatcactatgaaaaggagtctctcatctactggttgtctgacataatacactctagtggtcggccacttaataggcctcactagttacaattttg

SEQ ID NO: 160986 - DNA, 594 bp, Cannabis sativa
gatgtcagcaagagagacatgaccaagttttgtcgatttcatggagactatgaccacgacaccaatgaatgtaacaatctgaaacgggaaattaaattccttatcaggaaaaataacccgcatttacaaaagtatgtcaagaccgatcaaaatcagagaggtgataataaccaagacttgctacctccaccggtagatggacatctgcaagtcatcgttggcggcccatacatagctggagattcgagcaaagcttgggagaggtatgcccgaacagcacaacacgagcaagaagaagtgatcctagtcgtagaagaaaggaagcctgtaatttcacacgtcctaaatattgatcccaacttcggaccagttcaacaaaagcgaaggctattggacaaagagcgagcgctagccctaaaagaagaagtagagaagctacgcaacaataatttcataattgaagctttccacccaactggggttgcaaatctcgtactagtacccaagctaaacaagaaatggtgagtatgtattgatttcacagatctcaacaaggcaggccccaaagattgttttccactcctaagaatcgat

SEQ ID NO: 160987 - DNA, 784 bp, Cannabis sativa
atatcatcatcccccgtcaatacatacagaggagggtggtgctctcttctcaggcttaccattgtactttttgcttctccttctcggatcactcattcgagaaaacgtttggggccaacatatccaatcttactatttaggccaatggaaggagtatgttcattgcaagtgggacacgccatatacccttttgtgctccaaccagacattagagcataagcaggaaagtcatttattgtccacaacactgccgcacgcattgaaaacacagttccgttgtaggcatctcgggtttcaacacccgtctcccacaactgtttcagttcatcaattaacggtctcatgaatacatctatgtctttcccaggagatgatggacctggaattaataaggtcaacaacaacgattcagaactcatacacttccacggtgacaaattatatgggacacaaataactggccacaggctgtaagagttgctcatgttgccaaatggattaaaaccgttagtagccaatcccagtctgacatttctaggttcaacagcaaaagacggatgaaggcggtcaaaccgcttccattctttagcatccgcaggatgcctaagcacaccgtcttcttttggtctctgcgagtaatgccaccgcatatcctccgcagtgtgtcttgagcaatataatcgttttagtttaggtgtgagagaaatgagtgggattttgagtgagattgatagagattattgagattgagtgagaatgagattgaaagagagggatgaaggag

SEQ ID NO: 160988 - DNA, 644 bp, Cannabis sativa
atatacatttcagtttatatatataaatgtctaacatgtttttcctatatctttaattttgaactctttctttagatattttacatcttatattttacatcttttgaaaaaaaattaggaattctaataatatccaagtcatcttcataaataacagtgattacaaactcataacttgaattttcattaaaatacatcatttgtatatttttcttttaataaatatttactaaatcgattgtaccacatgtgtacggattgttttagtttataaaatgatttttgtagtttaattgaacacattttttcaaaaaacttaaaggttggatgattttttgcaagtaaattgatagttgtggggttttgccacaaattacttttaaggggtgtttggaatgggttaatgttagcaagggaatggtaatgttaaacattaccttgtttatttggagggtttaatcttaaaatgtcattcccttggtaatataaatacccttgaaaagggtaatgttgatacattaaaaaaggtgggatttattattctcttctattatattaatttgaataatatttttaaattaataaataaatttaaataccattaatattataatttattataaacaaaatattataatatatat

SEQ ID NO: 160989 - DNA, 523 bp, Cannabis sativa
  modified_base (204)..(206): a, c, t, g, unknown or other
  modified_base (268)..(268): a, c, t, g, unknown or other
cattacttgtttaaactaacaattgattttcatcacaagtgtcttccaagtcataacaaggtgagttccttgaaaccctcccactatgacacgatactgtgaatttttgtctaagcatactaaatggtattatcctcttcgattgtgtcaaaacaatagaggcagtgggatcatcaaatacaaaataagatgatagaacacttnnngaatcaagaaaaaaaaaatatctcctctattttgctactttttttttcagacttagtcattntcttagaaaagtagtatttattgaaacaaacactttcttatctattgaatatgggatggtccacctctaatcacttagaatagctatcaaacatgcaaaccttagttaacagctctagctttcttaagttcacgatcaagtcatccatgaatctagtaatgcactgctacaaaattcactattcacgtcggtcaacacgactgttcatcgcgttgaccgacgtgaatagtaccatattcaatatattcgtcattt

SEQ ID NO: 160990 - DNA, 531 bp, Cannabis sativa
taagccctagttgaaatagtacctttgatgctctcatctcatctaactctttcaacctgccaaagtttctaacctagtagatgagagacacattttcttagttatttgcacgtcctttattgttcttcaccattcactcttagtgatagagtgtcatgcccagacatagcaagtcatgtactcaatcatagtgagtaagatgttggtaaccaaacccaaaggagagaaagagatccaggctctaatcttaataatactctgcaacagaaaggaacaagggtttaagatctgaacagaaggagtcattatatgctgctgcaaccaatggaaggttttctaaactcttatgtgtttaatttcattattttagagatattcatatttaggatgttaatcaacccacttgttagtaaatctagatgtttgtaaaatattcccaacaacttgcctcaaagccatggtgatgatttactttcataaaatatggattgaaaacgaagaattttgtttattgtgttgatttggatgtgt

SEQ ID NO: 160991 - DNA, 699 bp, Cannabis sativa
  modified_base (538)..(539): a, c, t, g, unknown or other
tgtaaaaagtggtatttgtgaaaactagataaatagttgagaaaaatggcaaaaatctaactagtattgggcccacttcatggccggccactagtgtctatttttgttccatttttatcatttttttattccaaataattcaatcataaccttaagtgaagtagtataaaaagaaaaaaaaagtctcattatccaactaatgcaaatattaactcttgacctaattttcttcttgagagacaactagtgagtttgagacttctttttcttcttttcttctctaattttttgaatccttagtcttcttcacaaagtaaattcagcctttagtgattgagtgcatgcccatccatagcaagttagtcctcaatcatagtttgtaagactgtgaagaatccaaacaactgaaggagtcattcaatttcgctgcaacgtaaggtttctcgtaccttttatgtgtttatttttaaggtttctcgtaccttttatgtgtttatttttcatcattttagagattcatatttaggatgttaaaaanntacttgttagtaaatttagatccttgtaaaatatattccaacattaaataccttatatttatttttgtaggtaaaaatacctaatgttacagttctcttacacccgttactacttaactcataaatctggacacatggaaggttcagatgcattacattt

SEQ ID NO: 160992 - DNA, 583 bp, Cannabis sativa
tgagtacctctagatttaactactccaggacaaatcaaatgaacatttattaataatttctacattgttcatttacgcttcaggcgttttcaactcattctaaatcaactttgaataatattgatccgacgggagtggaaaatacaaagttataacttgcgtataaaactgaatactaacggttctcgtgagctaggaaagtactaaacgaggcatcacaacaccttgataaagtacttaaacctagaaaacgaatagataatatagctattcatgcgagaaaattaaaaatatacaaagagataaaatccttaaagtatatttaagtttgcttaaggtagattataactgcaactgcgaggcagaatggacaaccgcttaaaaatcataaagtttggtagattattaactacttaaagaagaagattatgagcaatggaaaaacccaaaagtgttgtatattcaataaaaatataatggtttacattgtgaataataacgcaagcaaatacaattgtattaagttcgaataaaaatagttcaaggcatttaagataagaaaaatgccacaaggggaaaacca

SEQ ID NO: 160993 - DNA, 685 bp, Cannabis sativa
  modified_base (247)..(254): a, c, t, g, unknown or other
  modified_base (307)..(317): a, c, t, g, unknown or other
gtgatacgtcccggatgtcgagggtttgactccagcaacttccacgatgttctccagctggtgggggcaggttagggtggaatgaagctcagccgcctcccatcctgtggcccgagatttatacccctcctgggcaataggacccagcgagacgtcttcaagggtagccagacgcttaccgctcttcttggacaattttgaaccggacgcagacatgttttgattctgaaaaaagagttaagattcnnnnnnnnaggccccataccaaaccctaaatccaaaaaaagagaatgggggtcccctaacnnnnnnnnnnnggccccctccggacatctgtcaaccagaaaacttagaaggatttcctggacaaaagtcgggtgcaatgaactcacagaagaacgacattgcgcataaaagaaaaggaaagggtagaaaatcgagaaaaacaaagaattctctatgccctaaaaggccagtacacgaagagtgtatggtcctttacaaaaaaaaagatataaataaaaataataacgacaggtacgtgacaagagtaaccctaacaccatagaaggtgagtctagacctgttgcgtggaaaactcaaaagaatacattcccagaaacttcaaataccaaacccagaaaaaacaaacagataagtaaagcatgccatgaacacaaacagt

SEQ ID NO: 160994 - DNA, 749 bp, Cannabis sativa
  modified_base (48)..(66): a, c, t, g, unknown or other
cttattatattgaaatgagtttcagttagggcacaaaacccaacaaannnnnnnnnnnnnnnnnnnaaaactaaaagtgcatttcaattaatctcaacaccttaatgtccggataaagtatagtatgtagcattatatctgtaagaggatctgacaggttgtattcaatacaaactttcctccaccattacatctccttagtcacaaaatccttgatattgtgaaattcctttctatatgtctactcttcttggaatactggattctttactatttggcaattaaatctatgttggtcaagaagcaacactagtagttaatccatgacaagaataatgccaaaaactgtacagaactttccatcgactgaataattatctagtagccttcctggccactttaacatccagtctcactggtagagttagtgactccagattagtttttacacttctcttaaaattactactccacccccagagtaatcacaatctcattagtagactttctagtatcaacgcaagtctagaaatataatttggtgtagtttaagagtattaaaataccacccttatcgactaacatacggttcctctttttgatcttaagacttatttgatagttttccaatgttcctttcttacctacacaaaactcccactaaacagcaggtatctggtctaatgcataccagagcatacaagagacctctcactgttgatgcttaaggaatcctttccttggccttt

SEQ ID NO: 160995 - DNA, 503 bp, Cannabis sativa
agtattgctaacattgttgatgtatgagattgggttgttacaactgttgctaacatggttgttatatgagattaagttgctataaaagttttaacatacttgttgtcgatgatttatttgctaacatattgttgttatatatttgagattgggttgctaatatggttgttttatgagataaaattattacaagggtttctaatatgattgttgtaagggttgtttaaatgattgcagtatgagattgttaaattattatttactctatgggttgctaaaattattgttgtatgagattgattaaaatttttctatatataggatttgctatagtgcactttaagcatcaaactacaaaaataataaataattctatacaactaaaagaaacatgatcaactaactgctgtattaataataattattctatttattttaccaaaggagctttgaggtttgctagaataggcttgatcacaaaattgattttataaaattttata

SEQ ID NO: 160996 - DNA, 555 bp, Cannabis sativa
ttaatatttgagaaccttgctttaaagctctcactctagatatagtttacttctaatgtgatcatggaggactcgttcaagaaaaagaaaatgaaaagatgacttcttcaagttgcaggttagattttttatggggtatacgatatatttaagaaaaaactgtaaattgtttaagacctatatttggaattgaatggggtgtaattataaaataataacaatttaataaaaaaatatggggtgcatttagtttggggtgtggtgatcaattatgggggtgcaaatatactttccctaaaaaatatgccaattttttaaaaaccccaaaaataccccctcataactcaaaccctttctctctccctgaaaccgaatgaaaaaaaaataaaaaaaataaagcccagggtccgaccatcgggccactatctctcttcctctctctgaaaaatattaaaaaaaaaaagggtctggtccgatggtcggaccagggcccttttttttgttttgaatatttttcagagagaggaagagagatagtggcccgatggtcggacc

SEQ ID NO: 160997 - DNA, 619 bp, Cannabis sativa
aatctatttttactctttttttagtgtttcatattttgttttttcttttttaaaaaaattcctataccaacatatgcattaatataaattattttaaaaatccatatatctatttatctatatatctatataatcctaatgttaagcaaggtgatgtggcatcataagatttctctaatgtattttatcttttttcttattattctaaatttttatacttatcaaaatttattttcatttaagaataaaaacaaaacaaaaaaataattatatatttattttagtttcacatatgttacacatcaattctttcatatatgtaacttatacataactaaattaatacaaacttttaagatgaaacgttttaacctatgacattctaattgacctatagatatatattacacatcaattcatatatgtaactcatacatagctaaattaatactaacttaaaagaggaaacattttgacctttgacattctaattgacctatagatataatctacatagccacatcacacgttttatagttcactaaagaggatacattaatttgctttttttttttttaaaaaaaaaagtacttcataactcaatagatttatatgtgtt

SEQ ID NO: 160998 - DNA, 512 bp, Cannabis sativa
agaccggttgccaacccaaccagaagtccagttttgggttgggtcaccagccggtcgaccggttgctacaggtgccccagaactggaagtctggttctgtgctgggaacccgaaaaatgcccccatgacctcaaaatccaaccaaactttaccaaactctccagtacacctatacaatgcatttacaacctaattcaaccagaaaaatcacagaacaaaccaataaattccaacttgccataaaagacctaaacttgagtttcaaagctcaagattacccaattccatctccacctttcaaaactaataatcagagcttaaaaacaactcaaaactaacctagaaatcagattacacaatctttaaaccttaacaacccctattctcaaaaatcacattctcaaccgaagaaaaaagcttcaaaacacataaccaagagttctagggtttacctccacttcaagaacacttaatccttagcttaattccagaaaattgaggaggagaagttg

SEQ ID NO: 160999 - DNA, 612 bp, Cannabis sativa
ggaatttgaaaaagggaaaattttctaacttctatgcttttaattgcgtacatctatgagctttctgtttccaactggtggattacatgtggcgttagttacttggtccatgaactttgtgcccgtttaagaaagcatgtgacgcttgggttagcgtgatgacagttgaactatgttagtgtgcgtatcgagaaaaatgttatcattgaaaccacctcgattccaatgtactgcattttaatgctgacctttttaacttccagactgttggattcaatttgtactttctgggatgtaatctgggccattgattcaagggtcacacgaatcatcagctcttttcttataaatagagagtaaaagttcaattcaccacttttgcccaattttcactttgaattcaaaattctaagagaaaagatacaaaaattacttctggtgaatgaaccactattttaatgagtgccttcaccttttacttcgaattcttgcacgagaaaacccaggagcaccacccccaaacatgatgaatcctcctttagatccatcaagactgttgtatctctaggcacaagtcttctcccgaagaccaaagtgcttacttcctcccga

SEQ ID NO: 161000 - DNA, 561 bp, Cannabis sativa
  modified_base (179)..(190): a, c, t, g, unknown or other
ttaacaccctaaataagaacttttaaaacgataaaaataaacacatataaaatatgagaaaccttacattggttgcaacagaattctgctcaaatcttttacccttatatcctttctatcgtagagtatcaccaagatctaagcccaaaactcatttagttgtttggattcttcacagnnnnnnnnnnnntgattgaggactaacttgctatgagtgggcatgcactcaatcactaaaggctaaattttattttatgaagaacactaaggatttcgaattagagaagagaaaagaagaagaagaagtctcaaactctctagttgtttgacaagaagaaaactaggtcaagagtcattagttagactttgagaccattcttttctttttatactagttcacatagggttaggattgatttatttggaataaaaaatgataaaataataggaaaattacaacctaatggccaaccacatgtgggcccatcactagttagattttcgccatttttctcaacaatttatctatttttttacaaataccacattttgcaatttcaa

SEQ ID NO: 161001 - DNA, 563 bp, Cannabis sativa
cattaagaaaaataaccaaaatttgaatttaaaatatcattataatttagtcattctttggagtcttttatttaaaaaaaataaaataaaataaaatccatgtagtacaaaaagaagaatagtcacaacttggtaacctgaataattttggagaatatttagtatcgataatagtttgaagacattattttttcagtaataatttaggaaaaataaacctgtttatttttataacaatttaagttgtacaaccatgactttaaacataattttaaaatcattttaaatatattgatattgattgttttattttattaattaacaatgagaaaaatagataaaaaaatatcaattaaaatttacataagatgccacataaatcattttaaagctcatatttttgtttttaatttatattataaactacaaaaagtatttcttaagttaaaaaacatcaatttgtatctctaataattttaactatttaaataatttaaactaaacttacaaaatataaaaataagaaaaatgataaaataataataaaaaaaatcaatttgttg

SEQ ID NO: 161002 - DNA, 789 bp, Cannabis sativa
  modified_base (602)..(606): a, c, t, g, unknown or other
acaaagcgggttaagggtctacgagtgttgaacttttgaaattctatttggccgtttaggtgggctagaaagaaaagacttgtaaataagtttgtaaatatttttgggatcccaactgtttaaaagtttaaatgtattgcaagtcttattttcactatgtttaatataaaagtttaaattctgcgctattttgattagtaatcccgttataggggattagggtttcataatcatttttgggtagcgtgcctaattatttagggtgttacaatttggtatcagagcgccaaggtttttaaacttcctatagaccggccgaacatgtacattcgtcgtcagagataagctcgaatcatggtgcagtaagtattgagagtaaatactttactgtttgtgtgatcatctgtttatcgctttccattttaggcagtatgcaagcatctagagtatgtatgtgtgatgtgatgtcatgctttaaatgctatttgtttatgtaaatattatatgaggtaaatagatgaattagggtttaaggcattaagtgcgtaagtgtggtattcgtacttaactcgctggggttgttgattacaggggtactagtnnnnnaccctccgtaatcatctagaccacaaggcgagcaagtagagcccggggctacccgaaccgatccaccagcaccgcctccacctccacggaatttgggggataatgcgggggctaataatgctaatcctcctgctgagtggcagcagatgtttcatgaaatgcgaagtgtcatacttcgtcaag

SEQ ID NO: 161003 - DNA, 613 bp, Cannabis sativa
tcgtaatcaaggataaatttgctgcattttgtttttaacaaagaatgaaaatcgaaaaaaattatgctcaaaataggacaacaaaggataatgtattaaggttagcttttggctcaaacgattcaaagaaaattgccttaatcacctctacacaacaaagatttaggatttcgcctcaataaattaatcacacaagttctagttatctcaatatcaaccaaatcaaaatcaagtctacataagcacataaaatcacaatatatagaacaagtagaacaacacataactcatatcacaatatcaaaatcaagcatagcaggttaagcacacaatccaaagtctttcacacatactaaataatgtcaaagagtttagcataagttcataaattcccataggtcataagttaacgttgatacaatcatccaaaaataaaaataaaacttaaatctacccataaaaaccaaaataaataaaaaaaatgaaaaattaaaaatatcaaaattgccttctcctccacaaacttaaaataaacagtgtccccacttgcaataaaattaaaggagagaaaacaaaccatagcagctaggactacgggtccatagctgtatca

SEQ ID NO: 161004 - DNA, 524 bp, Cannabis sativa
tacttccaagctcacccaatcagggtgttgaccaaccaccccctccggcaagtcctacaaaagccagaggcatttggaaggctcctcaaatgggcaatggagttgagccaatttgccctgcactacattctccgcatttccataaagggacaagcgttagcagacttcatcacagaggcaatgaagccgaagctaccgcgaacatacccacaccatcagtcccaacatggaaagtatttgtagacggagcctccaacgagaatggatccggagcaggggtcgcaatgatatctccaagcagacttcgactccaagcagccctacggtttgacttctcagcttcaaacaatgaggtcgagtatgaagccttgatagcagggctgaggctagcaaagaccgtgggggctgaaagagtggaagtctacaaggattcccaactggtagtgaactaggtatcgggagagtatcaaacgcgcggagaaagaatggccgcgtatgtggcgatagtccgagaactgctccac

SEQ ID NO: 161005 - DNA, 503 bp, Cannabis sativa
ccattagtgttttgtcttttagtggcttttatttgaaaattaaatgtttatttataatgtttacttggctgaaataaaatagtttatatggcattattcatttattcttcccatttctacacttagcaaaatttagaaaaactttgaaaaaggaaaacactctcaagtcttctctccatttcggctgaagcattagggtgcatgaagctgattttctctttgatttccaagcaactctcatccattctaagcattcttcaagctaggttagcttctcttggttttcttctttaaaattatgaaaaaaatggtgaaatattgagtaaatgcatgcttcttgtggctgttgttattgctgtgttttgttgttgatttctgaggtataaagcatgtttaattgtagttatttgagctgttttgaagcatgttagctaggttgtgtaaggtttgagttttctatgcaaaagttatgattttgaagaaatgttgtgtaatctgttact

SEQ ID NO: 161006 - DNA, 529 bp, Cannabis sativa
tccctccttttctttgtattttatgtaatcagattcatataaaaatttcacatacttttttgttggcattgaaaaataaaacccaccattatcaacatcaccatattcttcacactataaaatctggacattcttttctcaaaaaattagattagatattaaaattagtttatttgatttcaaaaatcccaaacaataatatgatacctaaatcacaaatctactaaggcgtcgtttggtaacacttttttaatcagttttctatttttgaaattggaaaaataaaatatttttcaaaaacatgttctataaaaccgtttttactttttaattttttaattaagaatcaaaatttttttaaaaaaagaaattgcttttaatatttttttaaatagatttttttaatcaatattttgaacttcgactaaacctggacccaaatcccccacggccttggcgctgaacccggcctctgacctaaacccaaatccgaccccgcacctagactcgacttaaacaaaataaaaaa

SEQ ID NO: 161007 - DNA, 540 bp, Cannabis sativa
  modified_base (345)..(357): a, c, t, g, unknown or other
ttttaaaataaaaaatgatttatttaggttttaaattttataaaagatcttatcatataatcactaaaatattaaaatgatgtttgattagcaggaatgaaaatataaaaataaaggtaaataccattttggaccctgtgttttacaaaagttaccaattggaccttctgttttgttaaatgacaaaattgaccttttattttttaaaattgtacaaatagcacactgaattaattttttgtccaaataaaacataataataatctgatatagaaatgttatgacaaaactggttacattttctgtatttgttcgtattaaaaattgtcttaaagttggttatannnnnnnnnnnnnttattgaaaattgagctcaagaaactatttttattattttggaaaatatagagttcatttcgttatttaacaaaacaggtggtccatttgctaacttttataaaacacagagtctaaaatgatatttaccataaaaataagaataagaataaaaatgacatttgaatattttaaaatgcaacc

SEQ ID NO: 161008 - DNA, 582 bp, Cannabis sativa
atatagttgttggagacttgatttattcatctataaggtgtataaatggttcaaaattaagtgaaagtgatttggaacactttggagaagaattgacaaaagctaaacaatggtaactagtaactagttacttttttttttagcatataagtgcataagtttttgaaacttttggagtctttctaacagcccaaaactcctcaaaatcaccttattaataccataaatgcctaatttatgattggtaacatccaagggctttatggtggtcatccatgttcatatgggagtgaaaactctataaatcgaggccatattgttcacttgtgagtgaagtagttgaaatcatttgttgtggttagaaccttgtgaggatatgctcatctttagacactaggctgagtatatgaggcttgataaatccctaagagcagttatagagtttccctaagtgtccgtatcagggaggaaatgacttttagggaaaatgtccttgagccttggtcaagctttttgtgtgttattattcttcttcttctctagttttcttgtaatcttgatgaaatacttttatttgtattt

SEQ ID NO: 161009 - DNA, 502 bp, Cannabis sativa
atttgttattgttttgttaattattgtttttttattaattatttattattgttttttattaattattaattaatgttttattattaattattgaattaatttgtattgttttagtaattattatttttgtactcattgttacttattaattattaatattttttatttattaattattgttttattaataattattaatttttgtattaatttttattattttattaattatttataattattttttattatttattgattattgttttattattaatgattaattattgtatttttattaattattaattaatattttattattaattattaattattatattaatttgtattgttttacaattattttatttttttactaattattaatttttaatttttgtattgatttttattgttttattaattttgttttttattaattatttattattattttttattatttattgattagtgttttattattaatgattaatta

SEQ ID NO: 161010 - DNA, 606 bp, Cannabis sativa
  modified_base (539)..(540): a, c, t, g, unknown or other
acagtaaaaaagtaaaaaaaatttgcctgatagtatttttgtaaaaaaaggacaaaaattagtataacatgtaaatttcccaattttttatgcctaaagaagttgcttgtgaaattgtcacatgggatgggctgagtttgtatctataaactactttgttgaaattgctgggagaatggtgggtaatactatttcatcaagagatataatgatagagaagatacttaattggagaaacaacatagtatgttttgtcgatatggaaaatttataaagcttgttacatagttctaaagtcaaatgtaatttcaataagagatatattatgtcaatatttgaatttcactttgtccggctacaatataatcatgctatttctctaatttcaaagtttatgcatacatgttctgaataaatattattttagactatgtgttttgcaaaagttattaattgcactgttttgtttataataaaattgatcatatatttttcaagatagtacaaataggatcttgaactaattttttatcaaaatnnaatttaataataatctgatttaaaagtgttatgacaaaactttttacattttctgtatctgtttgt

SEQ ID NO: 161011 - DNA, 550 bp, Cannabis sativa
cttggcctcccttgtgcaatgggacgaaataaggatgctatcttggggtttttgaaagataaaatgcagaagcgcattcaaagctgggagggtcgtttcttgtctatcattgggcgtgaggttctaataaaatctgtagcgcaagctttgctatgtctgtgtttttactacctctgaaaacttgttcacatttggaaagcattatggccaagtattggtggaggtcaagttgtaggaagggtgtgagttggtttagttagaggaaactatgcaaagataagaaatctggtgggatgggttttcagagtttgcatgagtataatctctcgttgttgggtaagcaagggtggcggctacttctgcaccaggattctcttgtgggtcggatatataaggttcgatattttcctaaatgctcatttttggagggcaagttaggtggtaatccgagttttatatggcgcagtgtctttgcgtcacaaaagctgctcagagatggtgcccgtaggagaataggatctggtttagctactgaagtgttaaacacacc

SEQ ID NO: 161012 - DNA, 575 bp, Cannabis sativa
gagccacaaaccctgataggggaatgtgtgcctggtcgggtggtcataccaagcaaggggcattgctgcctttgcacccatactttaggaatatggcagacttcttctgcctctgtctgacccagttcactcccaagggcattaagtatctatctgccctcttcgttctctacgccttccagaagtgggatatgccttctccccatgaggttattaggtggttttttgatttgaagtccaccctaagcaaggcaggtcggggtacttctatttctctcaaccagacttcaagtggttgacgggcaccggggattcgaccatcagcaaaattgggcattttattgatgagtacttcatggtggatggcatgggcaccacccacactcatttttagcagatccctacctatcaccgccctcccctcactcttactcttagggatagagctcaagagcttgctcagctactgggcgatgaccggaatttcatccagttaacctccgaggaaaactttgtgaagtacgagctccatctgaaggatttcattcctaagccagtgaaggggaggaagagga

SEQ ID NO: 161013 - DNA, 576 bp, Cannabis sativa
ctagtgataggttgcttaacaaccttagcatccctcatagagaacttgtctatgattttctcaatgtagtcttcctgcctaagtatcaattttcctttatccctgtcccttagaatagaaatcccaaggatcttggtagcatttccaaggtccttcatttcaaattctgtcttgagcagagccttaaccatttcaacattagccctttcttgacttataataagcatgtcatctacataaagtaataagtagatgacatcttttatagagtctcccttgtagtacaaacaagtatcatgatagcttctgttaaaaccatgctttatcataaaagcatcaaactttctgttccattgtttgggagcttgtttgagtccatacaaggacttaaccaacttgcagaccatattttcctttctcttaatctcaaatcccttaggttgttccatatagatctcttcctctaggtctcaatgtagaaaagctgtagtaacatccatttgatcaatttccatgtcaaattgatttgctatagatagcattatccttatggtcttgtacttggctactggtgag

SEQ ID NO: 161014 - DNA, 552 bp, Cannabis sativa
gccacggactctgcatctgagttaactcgttaggtggagctcgaggtatctttgaaaatctctatcatttgtcacacttcttaacataggattatgaatcttcgatcatcattggccagaagtaaccttgccttagaattttcttagataaggtttgcccggcggcatgatttccacagaatccatcatgcacctcggataggagttgtgcagcctcttcttgagtaacacatctcagcaatggtattgagaatcctcttatgtacataattccgtctactatgatataccgtgcagctttccttctcattttccgggcttcatttcgattatctgggagtttcccagagtcgaggtaggctgctattggtgtcatccaatttggggaagtatcaatcatttcaatttcttccgtgccagtgatgttagtctcttcgaggaactggatatgaaccaagtttgccttgtcacttacattgctgcttgccaatcgagctaacgcgtctgcagttgtgttttcttcccttggaatttgtctgagaccgtagcttt

SEQ ID NO: 161015 - DNA, 558 bp, Cannabis sativa
actaaacccagccctccctcacatgaacaatcccaattgtgaagacccatttgccttattcaaataattgtattaggctaattataatattttaacctaattaaattaaattagcaacataattaattttgaaataaataaaattaattttttattagattattttaaaattaattttaaaaaacacacttagtttaaagaaaagattctagatagtgatttctagtagctaatttaaattttctaatatttaattaagtagaaaaatatatttcagttgaaaattaatttgttaattaattttagatcaacttaaattatgattttttcttagaacataaaattaaaattaataattaagtagattttattctagatacttaattatctatattttaataagtttaattaaatagaaaattatatttaagttggaaatttttccaatctcagatattcttaaattagaataattttcagaacatattttattttattttaataatcattttccaattaaatttcgaattgcattatttttaatgtagatatttcgaa

SEQ ID NO: 161016 - DNA, 587 bp, Cannabis sativa
taatttataaattatgaagatttatatagcatgtgtgaatgtaatatgagctttatgtggaataaaaatatttttaggttcggcgatcctcaaaacccgataagtagataaataagtataatttattaattacagatatttatttgaaatatgtgaatataatatgagttattttgtaaaataaaaatattttcaagttcgacgaccctggagacccgattggaggctaaaaatatcataacaattttagttaaaaatattgatgggattattgagataagtttattttagaaataccgaggtattttgggatactcgaagttggccaaataccctaaaaatagagatttcttagtggttaaaaaataataagataactattaataataaagtttttattatattatattattataatattattattattataatattattttatatatataaagttatcgtaattttttttttatatatatattatctaaattacagtaaatatataacacttagaatgaacgaacaaaattatcgctcttcgtacttcgataaaattttctcctcctatacctattttttttttt

SEQ ID NO: 161017 - DNA, 577 bp, Cannabis sativa
  modified_base (157)..(177): a, c, t, g, unknown or other
ataatggaaaatgtaatttgtgacatccataaaatatataaaaaataataattaaatatatgtaacatgcaaataaatacctacattcaaatgtgtgtattatgctaacaaaattatataccactattatatatagcaaaataaaaaataaatatcnnnnnnnnnnnnnnnnnnnnnatacaacaaaacagaaatatattgtacaataaaatttatataccaacaacttacaacaacccataaaaaattaaaaaaatcgacacaactttaaaataaaaaatattttaacaaaacaaatataaatataccatgatctttaagtaatatgcttctaattctaaaaaaatatatacaaaaattttttatgtgacaaaagacaatataattaataaagggaaatttcactatttgaccttaataatacaacacatatcaaattttataccccttactaatttgtacaaaacaattccactattttcaaaatttacccaaaataccccttacatttaattttcccactctctctttccctctctctctctgtctttccgtttctctctccgtctttccctct

SEQ ID NO: 161018 - DNA, 511 bp, Cannabis sativa
attgctccacaattcaacttaaaattcaagcttaaagatataaaaataactctaaatcttagagttatcaacaccccaaacttagaatcttgctcgtgcccgagcaatgaaaacacaaaatagacaaaatacaacagaataacaaattttacacaaagactcacacacaagacacatgagagattccatagaaattcaagttggcctagcgaacattgatgctcttagaaaaaatggaattaaatggaataggaaaatgtttgccgtaactttatatgctgcccctttaaagttttctcgttggataacattaatacctccccaaagtcacctaatcaacaatttatacaagtatatcccgccaaaactttgaactttcctacaactatcttaaacttttttttattcattcattcatttcagctccataagttggattagtgcactcctctccactaatgtagtctaaacttatccccttgatcaataggactttattaggcttgtaatg

SEQ ID NO: 161019 - DNA, 543 bp, Cannabis sativa
tcaaatgtggctgcaacaggcagtacggagccctcttcaatctaaaaagatggggaaatgaagtagaaaccagcaatttcagttgctgaaattcccccagatgttacagcatcaggtcagcattctactgtagaaaagtctttgcaaaagccacctccaccatttcctcaaagattcaagaagcagtaagacgatggtcaatttcagagatttcttgatgttttgaagcagctccacatcaatataccattagtggaagctttggagaaaatgccaaccaatgttaagttcttaaaggacattttgacaaagaaaatgaggcttggtgagtttgaaactgtcgctttgacagagggatgtagtgctatgctaaaaagtaaaattccacccaaattgaaagatctgggaagctttacaattccaatttctattgggggttgagatgttggaagaactctttgtgacttgggagctagtattaatctcatgcctatgtctatttttaggaagttgggaattggagaagcaaggccaaccaccgtc

SEQ ID NO: 161020 - DNA, 540 bp, Cannabis sativa
aaaaaaaaaaaaactcataattcatacataaacatacagtttagatcccttgacagaaaattgatattaacaacttatgaaagttatactgtattgcccaatgtattctaggatactaaaataaaaatttctatttggaatctaaaatttaattataccaaatatacaatgagtgattattctctctaagaccaccactactaatctaactctaagtctaaattgccttaagtaagcatatacaagtaggagattctataagatcgaggatttatatcatttcaggatagaatgtcgagagtatagtcatctgcgccattcaatttcataagagaaattagagtgatatcataagcagatgaattataaacgatccatatttaagcaaattctaaattaaaaagctaagaggaaactaataaaggataatttcgaataaaataagaatccaacgatttcctagtaggcgagaatcaaagttattcttattttattatttcttcattgtttcatattgtaagtactagtataagttgtcat

SEQ ID NO: 161021 - DNA, 540 bp, Cannabis sativa
  modified_base (41)..(41): a, c, t, g, unknown or other
gtaaaattactaactgtccttttgagtgtacttttcctccntgtggatacgacatatagcccgtttactaacgcgaccacagtgtaactaattgggcgagctcaatttttggcgccgttgccagggaggtttctgcgctacaagaggttagtatagtagttttttttttatttatttttttttcgtttctctttatttgattatatataaataagattacttaatataatataatttaagttttttagttatatatagattcaaaaaaaaattattattattattattattttcttctttactcttttagtaaaacaaaaaaaaagaagcaagtagtttaacttttttttttagtttatttgttagttttatttattattttgctatattagggtgttagttttttttttggtacattatcttattttgtatactttttttttaggattagccatttttttgattaatttattttaggttagttgtagacttttatcctttaggctaaaaaaaaaaattgtgcataaaatattttcataa

SEQ ID NO: 161022 - DNA, 602 bp, Cannabis sativa
  modified_base (538)..(549): a, c, t, g, unknown or other
cccgtactagtccgtggcgtggttcggttggcccaaagtacaccgggcaattcttgggcccatcttcctttagcattttcgagtcgctttttaatgttattaatgatgactttatttgatggctctgcctgcccattgctctgcggatagcgtggtgtggaaaatattagtttaattttccatcgttcacagaaacttctgaacttgttactgacgaactgggaaccattatccgctacaatctcctggggtagtccgaacctgcatattatgtttttccagacaaacccttctacttctatgtcttttatttgagcgaatgagtcagcttcgatccattttgagaaatagtcggtgagggccaacatgaattttttctgagccagtgctgttggcaaggggcctactatatccatcccccatttcatgaatggccacgggctttggacggtggtcagctccgttgggggggctaggatggacagagaatgtttttggcacttttcgcatgttcgtgatgttggaaattattttaccnnnnnnnnnnnnctactcacaagtatgttgattacattgggtgcagtgaaattaaatgactcctt

SEQ ID NO: 161023 - DNA, 545 bp, Cannabis sativa
aaaggaagcctaaaatcccacgggtaagagggcctaccataaccttcaacgatgaagacgctatcaaaatcaggtttccgcacaatgacccgttgattatggaggtcaatattgataaaatttttgagagcaaacctagatgtttttgcctggtcgcatgaggatatggtcggaatcgatccttctatcatttcggacgtcctaaatattgatcccaacttccgaccagtttaataaaagcgaaggctattggacaaagagcgagcactagccctaaaagaagaagtaaaaaagctacgcaacaacaatttcataattgaagctttctacacagcttgggttgcaaatcccgtactggtacccaagccaaacaagaaatgacgagtgtgtattgatttcacagacctcaacaaagcatgccccaaagactattttccgcttcgaagaatcgatcagctcgtggatgcaacaacaaggcatgaaatattaagcttcatggatgcttattcggggtacaatcagatcaaaatgcatcaaccagacca

SEQ ID NO: 161024 - DNA, 567 bp, Cannabis sativa
  modified_base (31)..(32): a, c, t, g, unknown or other
aatggtcagccgtccaatccccggtcacganntccactcgtgggccaagaggtaggcgggcagaccttgtccgggaattcatcagaaggagcaatacctgacagatccaatcagaataatggagtcattctgcatgtcaaccaagcgaatcaatcactaaggcaactaggctcttctgtgttcgataggctgggaccaaccatgacctaagggacgatctaaatagaagaaggggaacagacgagcagaatactacaacgatcgtgcagcccggagcccatactcagatccccgctcaaaaagatgctgatgtaatccaaactgaccaaaacgccaatcaagtcagccaagccgtacaggcccagcttgacgagctgaagaatatgtttcatggcatggtcggacaacgtaacaatgatcttgagttagaccgtgctcgcggaactcccttctcgagatcaatctcctaccattgccccacaagttcaaaatgccaacatggaaaatgtatactgggagagaagatcctctttcccatctcaagtattttgagatgcaaatggattt

SEQ ID NO: 161025 - DNA, 921 bp, Cannabis sativa
  modified_base (387)..(395): a, c, t, g, unknown or other
aagaggattctctattgtgttaaagaaggaagctgcacgactcctatctgaggtgcacgatggattttgtggaaatcaggccgccaggcagagtttatcaaagaaaattctaaggcaagattatttctggccaacgatgattgaagattcaaaggcctatgttaagaaatgtgacaaatgctaaagattttcgaagatacctcgagctccgcccaacgagttaactcagatgcaaagttcatggccctttgccatttggggaattgacctgatcagacagttacccaaaggcaaaggagaagtgcagtatgcagtggtagcggttgattacttcactaagtggatagatgccgaaccactcgcaactattacatcaaagaaagttcnnnnnnnnnttgtgaagaacataatctaccggttcagattgccgtacaaaatagtttcgaataatggcaaagagtttgacaaccaatctttcactgatttctgtgcgaaccatggcacatcaaaagtttctccgcaatggcacatcctcaagcgaatggtcaagttgaagcagtgaacaagaccttgaaggatacactaaagaaaagactcaaagatgccaaaggaaattggctggaagaacttcctgaagttctatggtcatatcgaacaactgagaaaacggcaaccggacagactccatttgccatggcatatggatatgaagctatgctgcctgtagcactcgagccaccatctcacaggagattggcatacaaccaagataccaatcacgtactccttgctgaatcgatgaaatcgaaaagaagcgaaccacagcaaacttaaagttaatagcccatcaacataaagtagctcagtatttcaataaacaagtgaaggctcagaaattctttatgggagatatggtcctaa

SEQ ID NO: 161026 - DNA, 539 bp, Cannabis sativa
  modified_base (26)..(60): a, c, t, g, unknown or other
  modified_base (117)..(123): a, c, t, g, unknown or other
aaatgatttggatgggccctatcatnnnnnnnnnnnnnnnnnnnnnnnnnnnnnnnnnnntttacctgttacaaattatctatagaatctactgacaattggactatgattaaaatnnnnnnnttggatctgtcaacaagttaatcaaagctgttgactgaggttttcggcaaccaatttaataatatataagaaagctgtagaaagattaatgcacgagatttttacgttgttggggcattaatgagccttagtccacgagtcttttttatttatgagagtatttattacagagaatgttcttggtagctttttctcgctttggttcttatgaaacccaaaaatctcgacccttgccttaatgagtttggggggtatttatagtgtttttgtggggtgatccctagaaccgagctacatgtctttctgtatttttcagcaggggcacacattcccaacgagtgtaacataggaaatgcatggtctataccctaggtattttaggggttaggtggatgtaatccattatcccttcttga

SEQ ID NO: 161027 - DNA, 581 bp, Cannabis sativa
  modified_base (532)..(535): a, c, t, g, unknown or other
acatcgtcacaacatatcgtcgacgtaaacctctatgtttcgccctatttgatttgcgaacatttaatttactagttgttgatacgttaccccagcgttcttcagtccaaacgacataactttataacaatagagtctcgtgttggttacgaagcttgtatgttcttggtctggaacatacatttttatctggttatatccagaatatgcatccataaaagacataagctcgtgcctagtagttgcatccactaactggtcgatttgtgggaagtggaaaacagtcctttgggcatgccttattcatatcggagaaattaatgcaagttcttcaagttccgttaggtttcgggatgagaacaggattggctatccatgagggatacaatacctcgcgtataaaattgttgactaacaacttgtcaacttcctatttttgtgccccttgcctcttggaatccaagagcctcttttttgtctcttcaccgggtagtttggatccacatttaagtgatggcagataatcttaggnnnnatccctatcatatctccatgattccaggcaaattgatcctggttcg

SEQ ID NO: 161028 - DNA, 571 bp, Cannabis sativa
tgggaactgagagagtgaattgtgcggcgttcatgttacaagaccatgcccgcgtctggtgggacatagtgggtcagaccccggacgtcagtgtgatgacctgggaagaattcaagaatctgtttgaagaaaagttctataatgttgctgtaaggactttacatcaggaagattttgtgaagttgactcagggaaaaatgtgtgtggccgagtatactccggaattcgatcggttatccaagtttactggtgatctggtgcccatagatttcaccaagaaacagaagtatgttcgaggactgaatgccacaatcagtcgggacttgaaaattaccacatcacatgacactctatgtaagagagtggtatacttggccttaattgctgaggaggctgagcaacaagtaatgaaagagcagctgcaaaggatgccgtcacggcatcaaatcctcttgccagtggtagtatcagtaaggggaccgacagtggcaacccgtattataaacggaaggctgaggcttccggagcatcaagggaaatagaaaggttcggggaaacagaggtggccgtc

SEQ ID NO: 161029 - DNA, 563 bp, Cannabis sativa
tattatgctgccgaattttctagaaaataaaaaggaatatgttcttttgttatgcttattatttgcctgttttggttatactgatgagagccatattattcatgttcggtgcatattgttgtttcacgacctagtctctgtgtcataataggtagatcaggtgtgcactcacctgtaggtgaaagatctagaatctgtacagggagtgaattaaacctgagccccggtattatagtggatatcagatgcgactacccggttttggatgtcgttttctatgattggtattgagagctaggggtctagtggacagtgtgatatgcatttgacgtttgatttgtgattatttgtggtctctctactttattcgtacatattcatactgttgatgagatattttatttttacaaagctaaccatgaaggaattttactaaaccaagggtcctttgacgctggtggaagaggatggtaccattgggaaaagaattcgttattagtttagtcttattctactctttaatcttctaatgaaactgattttgtatttaagtttaaatggat

SEQ ID NO: 161030 - DNA, 515 bp, Cannabis sativa
  modified_base (38)..(48): a, c, t, g, unknown or other
ttatattgaaaatatttaaccattgtaagaccaacaannnnnnnnnnntatctcttgattaaagctcattatttaaaaaaaaaaattaataaatcatttattttaatccttgtatttaaataataaaaattacttaatttaagttgatccataattaattttcaactttaatttaattttcaaaaattaatttcgaaaattatatataaatatataaaatttcaaaaaaaaaattaaaatataataaaataaatatttgaaaaatatttaattaaagttgttctaaaataataaaattgccaacttaaattattttcaaaaatttaattaaataacaaattaagtatcttgaactaatcaccttaattagaaaaattttccattttaagttgatcaaaaattaacaaattttcaacttagaacaatatttaaataatatctgaataactaattttcaagaagattctacttaattattattaaaaaaaattaaaatttaagttgatccaaaatta

SEQ ID NO: 161031 - DNA, 536 bp, Cannabis sativa
attcactgtgttgggaagctgtgtaagttggaaatcgaatttgcagaaagttgttgcattgtcatccacagaggctgaatatatggctgcaacagaagctgctaaggaggccatgtggttgaaaggattgacaagtgaattgggattaaactctgaagatattgttgtccattgtgacaaccaaagtgctttgcgtctcatgaaaaatcctatgtttcatgagagatcaaaacacattgacataaagctacattttatcagagatgtagttatgtcaaagtaggtccaagtaaagaaaatttgcactcatgataaccctgctggcatttttacaaagagtgttaccagggataaattcattcattgcttgaacctattgaacatactagattgcaaggatatgatcaattcagccagctctgtccaagcagtgaacaagtgaatcaaatcaggtggatttgtggtggatttgactcatttgtcccccgccacatcagcaaatacctatcctggtggcaagaaggcagttaattcgg

SEQ ID NO: 161032 - DNA, 522 bp, Cannabis sativa
atagatcgaacccgaccaactctaaatttgttaatttgaaatttaaggatttttttttaattctgtgcatctctttcatgggtttttgtttgttttagatctgtgttcatctagtttaattttggtagatttaggctcgtgtagctcaaatctatttttttttaacatgacattatgcaactgtcagcaatattgagccactattgctgatgatttagaacattctccaattcctttattaactggtctaaaccgttggctacaatgctaattattgctgacaattttaaacagtcgggacatagacatatactcgacgatttttcactgacgcctattccatccaattttacaacagtcgaataagcgccaatcatagagtttgatgataataccataccgaatgttttttaacagtcggaaaagctccttttttagtagtgttggggtaaaaccatctaaacttcatgtaacaccctatctcataaggacgccacatgtatggttttataaattagtttt

SEQ ID NO: 161033 - DNA, 515 bp, Cannabis sativa
  modified_base (27)..(51): a, c, t, g, unknown or other
aaagaaaaaaaaagaaagaaaaagaannnnnnnnnnnnnnnnnnnnnnnnnaaagaaaaagaaagaaaggaaaattgtgccatgtttacacagtgtccagtccaacatggcacttaacacctaaaatggacgaaaatgttaaattgctaacataatacgagtattgggggttttaccgcccaaatttaggttttgggggttaagtgaaactaaaatgaaagttttgggggttttgctgtcatttacccatttaataaatattaaattaaaatttatatttagagttatctaaattagtaattttaattaaataaatatatgctaaaataaatagattaaaataagtatcaaaagaaaatacaactctttaaaataatgagctttagttataatgatattcgatctccaatgtttgtcctgcatggttaattgttttcaatataacctcgagacgctagacttcgtccccctcatagatggttattcgttgaagcatttaacaccataaagatctc

SEQ ID NO: 161034 - DNA, 789 bp, Cannabis sativa
  modified_base (247)..(247): a, c, t, g, unknown or other
ggttaggatattaccaattttattaaaaaataaaataaaaaaagtttgaaaattttatggttcgaaacccaaaaatttctattcaaacctaaactaactatcttttttttttttcaaattttcatgttatttttgcaaaagtaaattttaataaaaaatatctaataagataaaatgttaaaactaatatttatcaaattttaaaattttaatttaataaaatatttcaaaaataacaatttttttnttttttaaaaaaaaagatatggttagcaaattttgaaatttgaactagattatttttaaaaataatactttaatatcaaaataagatcattcaaattttaatgataaaaaaaaaatgtaatatctgatcttataattaaaatcaataaaataatctaaaatttcaaaattaaccataaggctatttttgtgaaaaatcaaattttcaaaaatcaaagcctactaacatctaaaactaattttaattaattaaaaaattgataaaaattaattttattctaacaattagatcttttaattgaaaatttagattctacacaaaattctactaaaattagaattttgtttaaatgaaaaacaatttctgaatcaaaagaaatcaccataacaagattgcattaggggagtatgcacaataggctgcgaataggcgacggaagggctgctagcatcctcatgggggacaaaactcggtcaggaggggcttaggacagcccttgttcgagtgaattcggacatgggcgtgtctgaagccgtgtcaga

SEQ ID NO: 161035 - DNA, 592 bp, Cannabis sativa
  modified_base (520)..(520): a, c, t, g, unknown or other
aaatatgaggttggatggttttttgcaagtaaattgatagttgagggggttttgccgcaaattattcttttctatatatgcggataactactcatccaaaaaattaataatttcaaaggattctatttttttggattgcatcaataaattaagaaagctaaagtttgagtgtagtataattttgtgcaatttagaataattataaaaatctaaaggaagtctttactaaatctgtgaaaaatattttcttcctaacatttaatatttcctatttgaggtccaaacaatgcaaataatggcattggggttgttcgcaaaatatctgatccaattcaatctgtacgattcaatccaattcaattcgcaaaatgcggatatccgcacttgcgcggattggattggattgaaaaatataaaagccacacttgtgtggattggatgttgtttgacctcaaaaagtaatcgatcaaacttaatctgcacttaattatatatattttttaaaaaattataatatatnatatatattaattttttagtaatattaaaaaaaaaaaagacacaaactattactccatatactgttttttaa

SEQ ID NO: 161036 - DNA, 574 bp, Cannabis sativa
  modified_base (87)..(100): a, c, t, g, unknown or other
agagtccgtggtccttgagtccggatgctcatatataatccaggaggctctaatacttaagccgacatggagacttcgctcaaagannnnnnnnnnnnnntagttatttctaactaacttaacaaccttgtttcttgcagccacagactttaggatcttgatcctaagcctataaataccacattcacttatcctttaacaacagactgaatacatgagtttgagaactctgttaaggtaagattgagagcaagagagagaggtgcagagaaaagagcgagattggtttgggttttgtaagaagaatcttctgtagatgaagaagattcttgtgtgtgagagttgaaacactttgtgagaactcaatggagaatctcatctcgactgtattgtacctattcttgctcactcaataaagaaggattatggtggtgttccagtactggagtagagccatacatcacatcaatctgttggacttgaaccagtatatatcttgttattgatttctttattttttgcatttattgtttctggttttaatactctatttgccctttttttgtcgattatt

SEQ ID NO: 161037 - DNA, 578 bp, Cannabis sativa
ataactacatgatctaaaatcaatggtcaaaaaaacttccataccggtagggaacttttgttaggtcctaccatagtcttgccatatatatatatatatatataaatatagggtatatctatagtaggcacatgtgttttcaccctatgctatagggaagtaaattgaacgaataaaattttaaaaaaataggttgcattgatgttatgttagagctaggttgtatgagatttatttattattttattaatttaattaatactttactccttttattttattttcttaaaaaaataatattttactgttgagtatttttttttttttgaaaatttatttgttgagtattttttattattgaatatatgcaaatatacacagtatgttaaagtgttattattattatttatttttttataccaaaattatttctaaataaatttgatgagtattgtgaagtgttataatttttaaaattttattttaacaaaaacattgtgttgaatgaagcaaaagtttcacaacattaccccttactaatactgtaaactaataactagttaagctttgtatattaa

SEQ ID NO: 161038 - DNA, 545 bp, Cannabis sativa
aacaatgaggtcgaatacgaagccttgatagcagggctgagattagcaaaagctgtgggggccaaaagagtagaagtcttcagtgattcgcaactggtagtaaactaagtattgggagaatatcaaacttgcggagaaaaaatagccgcgtacgtagcaatagtctaggagttgctccatgagttcacgaactacaaagtggaaagaatccccagagaaaaaaatgctcacgcagactgtttggctaagttagcatcagacagcgaaattgagaaactgggtgtggtgcccgttgaacgcctctcggaaccaagcattaaagccaaaagtattgtggcggcagttgaacaagagctcaactggatgatccccatcatcgaatacataacaaaaggcgatttgccccaagaaaaggcactatccagaaggatacagtaccaaaagcaccgttatgtgatgatggacaacattctctatcgaagaggactcagcatgccgtacctaaggtgtgtatcagaccccgaagctaagaaaattatgctaga

SEQ ID NO: 161039 - DNA, 545 bp, Cannabis sativa
acacataaacatagctctgtgagtcaacagactcagtaagaaaagcataatataaacatacgaataagccgggttataacctggcgcccatacacctgatcataaccctaatccccgtgtcctacacaatactgagtctagaacgttcataagacaatactatcgaccataatgtaagcctatactcaatatgctagtcatactctagccatattgatgtgacaacatcgatcagttttctagccaacatacatttatcaataatcagtacaactctatctatactattattgctatcaatgtagtctaacaggcaataacacatgtacgctaaacatgtgataacatatgcatgatattatactaatcttacctcaatttcgaattcaggcgtgccggtcaacctgagtggaacaactcctcggcgaattataggctccaaaatcacatatattccaaaacatataagtgatccgctaaatcacaaccgggacaaaggtttaaaaccaaaacttaacgtactgtaacttaatacaaaaatatcc

SEQ ID NO: 161040 - DNA, 560 bp, Cannabis sativa
  modified_base (28)..(31): a, c, t, g, unknown or other
  modified_base (57)..(60): a, c, t, g, unknown or other
  modified_base (87)..(90): a, c, t, g, unknown or other
tttgttagaggtaatgaaatggaatggnnnnaggtaatgaaatggaatggaaaagannnnaatgaaatggaatggaaaagaaataannnncattccattcttttgtttagtttctttttaaagtcatagaatgtaatccaaatagaatgccctttccaccattttggtggaatgaatattctatttcgaaatggaaggaacaacaattatcacgtaacatgagaaaaaatttaataatttttatcaacctttttatgcattttaaattttattttattcaattctcattcccattcgtctaaaccctaaaccctaaaccctaacccctgaacccttgatctcaaacccctacccctaccccaaccctacccaaaaccctaacatctaacccccaaaccccaaccccaacaacaaccctaaaccctaaaccctaaaccctaaacctaaaccccaaaccctaaaccccaaaccccaaaccccaattcccatttccattcctattcctcgacgcattctctctcccattcccattccaattcccattcttattcccattccca

SEQ ID NO: 161041 - DNA, 550 bp, Cannabis sativa
ttttttaaaaaaaataaaacactaaataaataaaaaaaaatgatctcaactgtagatgttgtttttttttcagaaattaaacatgtttttttttatttatttaaactatcgtttcttttttgtgttaaaaactaattatttcattacaagcaacagaaaaaaaaaatcagttttatcaacattatcctgaaaaaaaataatataaaaaattataatctaaatataatacaaacattaaaaatcagtttcatcaatattaaaagaaactaataatttcattaaaagaataaaaatatagtttcatcaacaagataatgaaaaaaaaattataatctaaaaatgatactaactttaaaaaccagtttcattaatattaaaagaaactaattatttaattaaaagaggcaaaaaaaaaataatttcatcaataacatgatgaaaaatacacagtgcctcataaataaacttttacaaacgatactaaatttaaaaatcagtttcgaatatataaattttatatcaataggtaataaccaaatttctaacttca

SEQ ID NO: 161042 - DNA, 539 bp, Cannabis sativa
gagcttaattgaagatgacttgactgagcaagaagggaaggaggcaatggagtatgtcaaatggcttgattcctatgggccattgaacaggaagtattatgaaaagttgggggtagtaccaaagagcttgtaccatctatagagaaacctccagagttagagctgaaagtgctttctaatcatctacgatatgaattcttgggagaagataaaaagcttccggtgatagtgtcagcttcactttcggatgtggagactaataagttgcttagagtactctggacacataataaggccattgcatggacattgggtgatgttaagggaatcagtccctctacagttatgcatcgaactttaatggaggagggcgccaaaccgactattgatgcacaacgaagacttaacccaccaatgaaagaagttgtcaatggaggagggcgccaaactaactattgacttggaaagatatgacggtgagtttataatatcttaactaagttgcaatatcggtcccgtccaatgtatactccatacat

SEQ ID NO: 161043 - DNA, 526 bp, Cannabis sativa
tcaaaactaaaatttactaagctaattatacaatttgaggtgttggtttagccacgtaatcatatcaaaaatagttttaattatttaattaatatgataattatgtaatatgatttcgttctttatttttattttctttttttatatacataaataggaaacaaaccgcgcttcgcgtgcagttatattttatttagtgataattaagttataaaattatatctaaattcaaaatttaataatattttataatttcttttaataatatgagtaattcttctaattttttttacttttaataattaatagagattttttatttttatttttagaaaatagaagttggtaggcttaattcaattttttttaataaaatattaagaaaaataattaaataaaatttaaaattataaaaaagagagaataaaggagaaaatagaaaaacctatttgaagtgattttagaccgctatgtcaccgccacattcttctcctttatatatatatatatatattagatcggaaga

SEQ ID NO: 161044 - DNA, 567 bp, Cannabis sativa
tctttatttagccatctcggaagatgcgattagtgcagctatagtgcgagaagagggaaagcaccgacaacctatttactacgtatgtaaaaagttactaggagcagaatccaggtatccccctctagaaaaacgcaaactacagccatacttccaggctcaccccataaaagtgttaaccgatcagcccttaagacaagttttatcaaaaccagatgtttctggaagattgataaaatggtcgattgaactggggtagttcgaaataacataccatcctcgaacttccatcaagggccaagatttagctgacttcttgatagaaggtataactcctgaagaaatcccacctgatcagcgagacgcggaaaccttgaagttatatgtggatggcgcatccaacgaacagcgttcgggtgcaggggtaatattaatatcgctagaaggatttaagtttcactatgttctgagattccaatttgacgcatcaaataacgaggctgaatacgaagccttgatcatcggcttaaagatagtagaggccttgaaagtcaaaaatctcatttg

SEQ ID NO: 161045 - DNA, 547 bp, Cannabis sativa
  modified_base (26)..(36): a, c, t, g, unknown or other
  modified_base (460)..(460): a, c, t, g, unknown or other
aaaccaattggcaatgagtggagtannnnnnnnnnntatatatggctcaatattcttacatttgatccatgtgggacaatattgtccaatagtgtgaaaccctagcagagctgcgtgcctttgtgattttcttgaacattattcaagcttgtaaggaagaagaaaactataccaaggtttaggtttcaattttgggataattacttaaggattcgtttggtatgctatattataccgtattatattgtatagtattatattaaattgtattttatacaatatttttatataaaactatatgtggtattaacttttataggcacttaaatatataatattttagtataaatttaatattatataaaaatatgatatataatctaattcaatataatacaatacaatatgacctaacaacatgttccaaacgagccctaaggcaccattttttgtaaaaaanaaaaattacatttttatatttaatgatttttttaacatttttacaatttcccgtaaaaacaatacaaaaataacaagaaaactacat

SEQ ID NO: 161046 - DNA, 583 bp, Cannabis sativa
  modified_base (429)..(429): a, c, t, g, unknown or other
tagatatatttttctgtatttaattaaataaaaaaagttataactaattagattcttttcgatacttaattatttgaatttttaaagaaaataaactcaaattgaaaattagtttttcaaactaattttagaacaacttcaattagaatattttgaaattaataattaagtagaatgttctagaaaattagttattcagatattctttattatatttttaagttgaaaatttgttaattttggatcaacttaaataggaatattttttaaattaacgtgattagttcaagatacttaatttgatatttaattaaattttgaaaaattatttaagtttaaaattttgttattttagaacaacttaaattagatatttttcataaatttattttattatattttatataattttggatcaacttaaattangtaattttcattattaaaatatgtagattaaaataaatgattaattcataatacattattttaaataatgagctttaattaaagagatattagatctccattgttcgtcttacaatggttaaatgttttttatataacctcgagatgctagact

SEQ ID NO: 161047 - DNA, 599 bp, Cannabis sativa
  modified_base (51)..(55): a, c, t, g, unknown or other
ttggctatagcaccattgttgtcacaaagtaaaactagtggtttttccatnnnnngaacaacaccaagtcttgagaagaactttcttagccaaacaagttccttaggagcctcaacagtagctatgtactcagcctccatggtagaatatgatattgcggttttcttagtgcttctccaaacaactgctccaccctcaagagtaaaaaccatcccagaagtagactttctgtcatcatgacaagcctggaaatctgagtcagtatagcctacggtatttaaagcaccacccttgtagactaacacataatgtctagtacttttcaaatatttcagaatatgcttaattgcagtccaacgttcctctcctgggtttttctaatacctgctcacaattcctactgcatagcaaatgtaaggtctaatgcataacattgcatatattagactcccaactgctgaagcgcaaggaacccttctcacgtcctctacctcttggggatcattaagagactattccttagacagacggataccaaatctaggcatcactacccttttggtatttgtcattgagaatctctctaaaaccttatcaat

SEQ ID NO: 161048 - DNA, 533 bp, Cannabis sativa
  modified_base (373)..(375): a, c, t, g, unknown or other
acaccaatggcatcacaagagggctcaatctattgtatagcaaatataaaatgtttggggaagtactaacagattggtcggatataagccaacatctaagattgatttgattttttatagatttgtgtatgttatatattttaaattatgttagagattttgtattatatatcaacaatttactagttgaatttgtatatatataagttattaattctattaataaagtgagttttgatattttaattattctacaaatatataattagaaattttgcattattggaataattaaaattaaatattaaatataaatttggttggaaaatcacaaataattcaatttaaatttattttgcaacaaaatttcagnnncaaaattattatatttttaagtactaaagttgtatttgttaccaaagtaatttgcaaccaaaatgtagtaagtaaaaaagttttagtagtctttcaaagtaattattttgctactagatttgatattttttgctacaaaaatattagtagcaaatttg

SEQ ID NO: 161049 - DNA, 547 bp, Cannabis sativa
  modified_base (29)..(41): a, c, t, g, unknown or other
agaattcatattagggtgttaatgaaacnnnnnnnnnnnnnaatctagatcctggtaaaatgtatatccaacatgatggacttctgactttctgggcgggcagtcattctgcgctttacttctttttcagcttcttaactttcatgctattttttgctggtttgtgctaaccacgttgtttttgttctgtgcagacatgtctcggtagatgatcgatgctttagggaagaggatgagcggaagctctagcgcctcccctccggccaagaagtctaagggcggagaggggtcttcagagaagaggccttttggagaggttattgacctttccgaggagctgactgttgtgaatccttccactcccaaatctgccaagtctaaggagtttgggccaccaacatctgggtctgaactggtcaggaggattcctgagcgggtgcaggcaccaactccacccgtgcccgtgctgcctgaggccaagaagggcaagggggtgatggctcattacatgaatcggctggttcctgaggtcggtgagcaactggct

SEQ ID NO: 161050 - DNA, 515 bp, Cannabis sativa
tcatctcatgataaagagttctcatcactctttcaggctcgggatggccatcaatatcgtacaaatactacaaacaaatagtatttgttaaaaaattatgtattaattgaaattgaatattgaaacattaaacttgttaatttgttttaccttcattctttttacaatttggtctttaaagtgttgagggacatcactaaaattcaagtagtgtcctggcaacgtaattgtgacctcaacacccatttgacgtacaaaagcttggttttccgtaccaaccactttgcctgtcacgatatcaagttttagtggtaatagttttcccgcatcccgccttcttttctcaacatccatgttggtagcaaggccgcgtccccttcttattggcggtggagccgactaacaagtcggcgataccctactagggtccggtggatcggtaccacccccgtctccaccatgataagtggatacatcagctgacatttctttttttgaaaaaaaaaacaatattt

SEQ ID NO: 161051 - DNA, 554 bp, Cannabis sativa
ggaggaatgtgaaaaggctttttaggacctaaaaatgcaactcgcaaaacctcttgtgctctcacaacctctggacagagaagaacttggaatatacctggccatgatcagaaaagaaaacaatatccaacacccagtctattacatcagtaaaagactcattgaagctgaaggccggtatccattgatagaatagctcacttattgcctaattctagcaacgagaaagctaaggccctactttcaggctcatcctattcgggtatacactgaccaaccattatgccaaatattgcaaaaaccagacgcctctggacggttactcaaatgggcagtgagttgggccagtatgagattatctttcaaccccgaacagcgattaagggtcaggccttggcagattttgtagttgaatgtacgagtaaagaagagagaattttagaaaacaacccagagcgagtacaaatacctcaatcgaataatagtgaaaacaagccgacttggaagctacatgtggacgggtcggctacagatcaactatccggtgcaggaat

SEQ ID NO: 161052 - DNA, 507 bp, Cannabis sativa
acctagatatttttgtagaaattgaaaaaaggcaggtacacacaaagctcttctttgtctaggaatttaggcaacgtaggtggccgagccaatttgtttcttcagctcctcgaattcagtttcacattcctttatccactcaaattttttgttgcctctcagaattttgaagaagggtacacatttgtttgtagacttggacacaaatttgcttagtgtagcaatgcattctgtttggctttgtacttccttgattgttgtcggcaacttcttatccgaaaggactttgatcttgtctggctttgagattcatgttgtaattatagaggattttaaagcatttgtctaggttctccatatgcccctagcctttttggacttgacaagtatgtcatccacacacacctccatgttgtggccgataggatcattgaacagtttgttcacaagcctctgatgtatggccctggcattctttagccctaaggggcgtgactttgtagcagt

SEQ ID NO: 161053 - DNA, 588 bp, Cannabis sativa
taagttaattttattcaagatacttaattatttatttttatttaacgaaattttttagatcaacttaaattagaatatttttagaatataaattagagttaataattaagttgattttttttaagatacttaattatttgcttctattttaataaattaattaaatagaaaattatatttaagtcggaaatttgttaatttcaaatcaacttaaattagaacaattttcaggaaatattttattttattttaataatcatttctcacataaattttgaaatgcatttattttaaatgtagatattttgaaattttctattttaaaattagattaaagttgaaatttaacttgttaataaatttagatcaacttaaatcaagtaactttcattaataattaattgaaataaatggactaaaatatagtatattttaatttgaaaattaattattagtttatgaagtatgtagatggatattttcttggtagactttttggtacttttctagatatatttaattaaatttgaaaattaatatttaagttgattttgttcaagaaagttaaatatttaatatttttcttaa

SEQ ID NO: 161054 - DNA, 713 bp, Cannabis sativa
gggcataaaacccaacaatataagtaggactgaacatttcgagcgggttcgacgagaacccgagcaacccgcccgaacatgaaccggtgaacccgcaaattttttttaaaaaaaaatgttcgggcgggtcgtgttcaacccgataccctttgggcgggttcgcgggttgagtttttaggggtaccagccaacccgcaatttaaatatatatatattttttaattatagtttatatatattaaattattaattaaaaaaataaaaaaataaaaaaaacctaaaagatttttacatttcagcactcattgaacaccacaaaaagaaatagctattctctgttgaagtgggcaaattactggttattaaaatggggatggagcttcctcttcgttttgaatttcaaaagcttccacaggtgatattaataattcgagaagttgttagtaatcgaaggcttgaagagttgaaggagtctgatatgtttaatctttgttctaagttcttccactatgtggcagctgggactcatattgcccatcatatgcagtatctcaatttattgcattccttaaacaattgtcttgttatgtgtgttctcacttctataattattgatgcaaatttgtcgatccttgtatgatgatctttgcttcgttcaatgaagttctggacattacatttaccaataaaccaacgatgcctcttctaacaca

SEQ ID NO: 161055 - DNA, 555 bp, Cannabis sativa
tctaaaccttcagccgcacagaacgaacgatgaagatgaacataccttgatcttttcaaatcagcaaaacaaccaaaatgaaaccaaaacgagagaaatacaaccattaaatctggaaaaatcaactgaaaaagaagacctgcaatgatctacacagaaatttacgaaaaaaaaaaccaaaaaaactaggaaaaaactaaaattatacaattgttttcggttttattcgatcaaaacaactctccctaatattgaaattcagattcataaaatgtagatctgttacaaacagatctggagctccctccgaatccaaaacaaagtatgatatgtgaaaattttaaaaaaacctcatgaataatagatctacttcatatacagttgcatttttgttcattactggtttccaatgtggaatatatttttcaaaaaaacacaataagaagagaaaatgtaaattaagggacaacaagttacgtataagtctgtttattttttgttttggttgcattatagttgtattatcattttatgatagtttataaattatgcaag

SEQ ID NO: 161056 - DNA, 545 bp, Cannabis sativa
atagaaaataagcatatgatttataaactatttatccaatgatatattatttaagtaatttcataaatgaaaaagctaagaggaaaaaataaagaataatttcgattaaaataagaatccaacgatgtcccggtaggcaagagtcaaagttattcttattttatgaattacttcattgtttcatattgtaaatactagtctaagttatcatctttggatgtacaactagatgttgcatttataaatacttatctgtcaagatctaacactattatgtttgcctaatgaatgacaatcctttgagatttgtctcattaaaacaacaaattaaattagaccaacaatgaagactcgaaatttatactacaacattaataacagaaaataacatgattcaatataaattcatacacattcagaaattatcatatagtgagcaagtaataaagacatgtgagaataccaaaaaaaaaaaaaaaacacacatcttaaataatttccaagatttccaacaaactaacagtgtcccggtaagcgagagtcaa

SEQ ID NO: 161057 - DNA, 523 bp, Cannabis sativa
tacatttatcagtaatcagtacatttctaagtatattattaccgctatcaatgtattataacagtcataaacaacatgtatgctaaacatgtaataatatatgcatgacattatactaaccttacctcaattctgaattcaggtgtgctggcccacctgagtggaacaactgctctgtgaattataggttcctaaatcacatcgataacaacacaaataagtgatacgctaaatcacaaacggggacttaggttttaaaccaaaaacttatctactgtaacttaacatggaaatacccttaaatagcagggaattaaccaactaaagctctgaaactagcataaattgacaacacgaatttttcggggaacccagcaacaaatctgggtaactggttttacaggtcctgtaaaaccatccaaacccaaaaacatccaaaccctaacaaaatcgattccaaaccttaccaaacgttccagacctgcataatataccccactaaacatattccaagcaataaaac

SEQ ID NO: 161058 - DNA, 590 bp, Cannabis sativa
  modified_base (502)..(511): a, c, t, g, unknown or other
aggttgaatactcgcatttgtctttccacgtaaatgttatagtgagatttctctcacctagaaattctagaccagactcctattaagaggacacgtatatttagatttccaatgaaagctgaaatgtccatgagagactcctcgaagtttaacccttgtccaggatagagccagcgagatactgcgagtacgaccaaagtcggatcgcataactgtaactcgtattatgcgggatgagagaatggatccaactcgcatgtgtcgggacatgtgcgagtatcctctctatactcctgcgaaagcatagagatcgactctctataatgcgagtttggtcccgacgacccaacagccttgataaaccgatatagactcgcaagtctaggttctatcagctcgacatgcgatgtctacaagaagcgactacctaaggacgcagacatcccaaacgtaataataaccctgcaagctgaacatcggaacatgaacagtcaactcgcannnnnnnnnnacgcatacgttgatggacttagtaactgtcattcatttattaatgttaatgttgcctgggtttaattattgtaattcaa

SEQ ID NO: 161059 - DNA, 786 bp, Cannabis sativa
  modified_base (138)..(140): a, c, t, g, unknown or other
  modified_base (225)..(233): a, c, t, g, unknown or other
cattttgttgtggagtgctaggggcagttaattgggattcaatgcaaagttcgatcaaatgatctttgtattgcatatccatatattctccacccaatcagttctcaagatctttaaggttttacccaattggttttnnnccaatgctagaaattcctgaaacttttcaaacgtttcagatttcttacgcataaggtaaatatgaccatatctagagtaatcgtnnnnnnnnntgacaaagtactcataaccacatctagctttgacattcagtggtccacataaatctgaatgtactatgcctagtggttccttggcacgctctccctttgcagagaaagaacgttttgtcattttcccttctaggcaagattcaaaaactggtaattcacctaaggtgacatttttcaatggaccacctttggttaatctgtgaagtctatcatagcctatatgacttagacgtaagtgccatagatatgtaattcattatcgatcttttgctttttctggtttctaggtttagctaccttaaacagttcattatgaagcgcaaatggttcgtctggtgttagaacataaagcccttgttccatagatgcaacacaaatttgaatgtcatttcgagaaatggtagaacaagaactcgaaaaataatttgtattgttgcaattgtaagcatgaaagtttctactgaaattttgaatgaataagactttgactaattccaaaattttgttttgaaacttaagtttggattttcctctagctctaaccgataccatt

SEQ ID NO: 161060 - DNA, 556 bp, Cannabis sativa
cgatctggactaaatttgtacaaattaaggaagggtataaattttgatatggcttgtattattaaggccaaaaattgaaatttcccttcctaaataaagtcccacaaagttaaaaaaaaaattaaacacattgatgtggtattgttagggtcagactttagctaaaatcaattaggcatgcacttagggctaatttagtttaggagtccaaaaaatatatttttattaacatacatattttttagttgttttaaaaaattctacataattttgtaataaataggtttatattgtgattgttaatccgaaaactttccatggtgacgtagatatcaatgtttgacacgtgacatgaagaatgatgtcacggaattgagtagactcgagtcatagcagttagggctgaacatcgggcgggttaccgagtttcgggttcgcgggtttcgggttcacgggtttcgggttcaaaaaaaggaaacctaacctggacccgaatagggcacgggttggcgggtcacgggttggcgggtttcggttggccgggttgaccgggttg

SEQ ID NO: 161061 - DNA, 521 bp, Cannabis sativa
ccaagatactcgcactatccataggttcctactatgataaggcaaatcccaacaccgtcgctcacctcgtcacttgtgaccaaggtagcatgtgtggcaagaagccaacaccaaactgacgtgccaatgcctctaatcatgccccattcaatgctgtctaaacagtctccctcatcgcccaaggactcacatacatccatggtccaatcctcaaggcaccatgccctcacgcgtgttggcaggccctcgagacaagccatcaaactagtagcatacgttagacctctatctctttccagcatggtgcatctgtcccatgcacgtatgcaaattagcccacgaatgactacctgtatcatctcgtggccaaggcgcaccacaacatctcttggaggtttagaccacgttccgtgcaagcggcacaccgacaagccaatggaaatgtacccgctaacctctggcagcattcttagacgcactaccgggttggccagataatgtccatgagtattccaactcat

SEQ ID NO: 161062 - DNA, 939 bp, Cannabis sativa
  modified_base (436)..(444): a, c, t, g, unknown or other
tggagaagtgctaagaaaaccgcaatatcagactctaccatgaaggcaaaatacatagttctcgctgaggctgctaaggaactagtctagttaagaaagttcttctcaggacttggtgttgtttgtggaatggaaaaaccattggttctactttgtgataacactggtgctatagccaacagtaaagagcctcgaagcaacaagagaagcaaacacattgagaggaaataccacatcatcaaagagtatgtggaaagaggggacgtactggtggagaaagttgatagtgaagacaacttagctgatccattcaccaaaattttgactgtaactgcatttgaaatgcacagactgaatctaggattaattaaaatatactgattgttttatgttagtgcaagtgggagttttttggactttgtgccctaaataaaannnnnnnnnaatgtaatcttttatattcatttatcaataaataaacagatttattttcattacttatttaaattgttatttagttcatgtgatcatttatttatttatttatttgatttacaaatttgtctaaatccttatcatattgatattcttatttattatgttatcaacacagtggaaagtaatcaagattatgtgattaaatgtattcctatgatttatcattacacagtgtttaacagatagaataatctacaatgtagtttacttgcaccttggataagtgatatatcctttccagggcattggttaaagtaagcttgatttggaggtatggagtatgcgtcggaagggatgaattttgaacttggctaaaatataataaacttacaaaccttttgcatatcaattttgtagctgccttgtagataacattgcagcaggcaataggtctataatccacaattgaattggggcacttattttttggaataagagtca

SEQ ID NO: 161063 - DNA, 500 bp, Cannabis sativa
  modified_base (210)..(223): a, c, t, g, unknown or other
  modified_base (342)..(353): a, c, t, g, unknown or other
taaaattataattagatggatttgaaaaataaattaaattattttccatcttagtaataattttcaataaatatttcaaaaattatttaatttaagttgtgtcaagaattaattaataattaattttcaactcaaatttaattttcttgaaatatatatatttcatttcgaaaattaatgtatttgaaataaatacaattttcgaaaatnnnnnnnnnnnnnntaaaataaatcctgaaaaattattataattttatgttggtcaaaaattaatttttaacaaaaatataactttcctatataattaaatatttaacaaaattatcaaatatttaagtatcnnnnnnnnnnnnaacttaaatattaaatttctatttgaataaatataactagaaaaatacctcaagcaaatagacaataactatctatactttcattccctaattaatttattttctaattataatatattttcattcatttattttaactaatcattt

SEQ ID NO: 161064 - DNA, 620 bp, Cannabis sativa
  modified_base (185)..(187): a, c, t, g, unknown or other
tcgaggacgaaatccttttaacgatgggataattgtaatgaacgctttagtaatttggattcgtaaaggcaattagcactaaattatgatatatttttttataattatttatgaatttaattatttatgggtcccattgttagaaatgggcattagagttataatttctcaattctagagatttnnntaaactctaagtgtattatttgaattatatgtgaaatatgttatttttacaattttgctcggcgacaatggaaaatgcgatggatgggtagtttgatcacatgggtaagttagaactttatttcttaatggaatatatattggagaaaataaaataccgaggttgtgctgggttatggtttttgaccattttacccctaggtgtgaattaagctagaattaaacattgggggcattttagtaatttggtaagagatggtttggtggctgcctaggaaagtgacatgtggcttcttattatttcagcaagggaattaatttcctaagctttattcattagggaaaataaggaaaatttaaagaaaaaccaaaaaaatataaactctctctttctctctttcggctggggtaaaccagagggaatcaccctcaaa

SEQ ID NO: 161065 - DNA, 715 bp, Cannabis sativa
ctattcagtggatcaattagcagagttgtatgtcaaagaaatagtaaggctatatggtgtgccgaagtccatagtttcggatagggatccgaagttcaattccaagttttggcaaagtttacaacgggctatgggtataaaactgaaatttagtacagcattccatcctcaggcagatggacaatccgaaaggacgattcaaatattggaatatatgttacgagcctgtgttatggatttcgaaggctctcggagtaagtatctaccgttagtagagttctcgtacaacaacagttatcagagtactatagggatgactccctatgaactggttatatggaagaaagtgtagatctcccatccattgggatgagacaggggagaagaaatacctaggtccagaatcagtacaacgaacaaatgaggaaattgagaaaattaaagctagaatgcttgcctctcagagtagaaaaaagcgttatgcagatccgaaacacagagattttgagttccaagtaggggatcacgtgtttttacgagtatctccaatgaaggggatcaaatgtttcgagaaaataggcaagttatgcccttgatttacaagaccctttgagattcttgagaaggttggacaagtggcatatcgattagcttcgcctctagctctttcggcagttcacaacgtatttcctgtctctatgctaagaaaatacgt

SEQ ID NO: 161066 - DNA, 956 bp, Cannabis sativa
tttgcatttaatccatccagatatttctcctttttactgaaatcggttggcacaattcccgagcaaacctggccaagcgatcaaactgagttgtatactcagtaacactcatattttctttctgagtcaggtgagtgaattcctttctcttagcactcctaactgcttcattataatactttgcattgaaaagttcctggaacttttcctaggtcattgtagtgacgtcatgtatcatggacaccatgtcccaccaaactaaggcatcttcttgaaattgaaaagtggcacagaccactctatcatttccagtaacgtccatgaaattcaagattcttgtaatcactgttagtcattgctcaactttcataacgtccggacctcccagaaaaactggaggtgcttccttgcgaaacctttcatacagaggttccatccagtttactgcaaccaccggttcggcctgcacaacaggggcaggtgccactggcatttctagaacaggcactgcaggagcaccctgctctcttaattgccgaatcacttcctcttgttcgttgattctagtttgcatttctacaaacctgttttcccaattctgagcttcctgagtagcttgggtagcttggacaaccggtggcgggttagcatcaccccagccacgtgccctgccccagggacctctacctcggccccgaacatttaggaaaaactgagctccctgaccttcatttgatccaaccgagttgccctggctcctggtatttcgcttggcatccatctagtctgaacagcctgcgtaaccaagagctagtctggtcagatcatgatcaagagaacttactaattctgctaatttagaaattgaaaacatgcgcctattctattatcaggctactatcatgcttcctaagaggcttttcttaaatcaaactatttaaaataagctactaaag

SEQ ID NO: 161067 - DNA, 523 bp, Cannabis sativa
agcgaaaatagttaacaatcattaattttatagttgttattatatttttttttacttaatttttcattttttaaaagaaaaaaaaataatttgaactaatcttgaactgacacactaatgtagcacttaaaatgttagaaaataagattaagcgtaaaattatctctagttagaggtcattttttattagttaaggttatgtgtataataactttaaattataaggagttttgttgtaattatttcaattatttaagttaaaaaaaataattgctaaaaaatctttatttattaacaaattgcataaaattaattaataattattagtgatttaattttaattaagtttttatatggaaataaagtatcaagttataagttatttatcttaattaatcacaaccattcaacaacgatctaatggttaaaaataaatgtaaccatgatggtcacatatttgatgtaaccattgaaacatcttccatatatatataaatacatatatatatatctttcttatatt

SEQ ID NO: 161068 - DNA, 520 bp, Cannabis sativa
  modified_base (60)..(60): a, c, t, g, unknown or other
  modified_base (452)..(478): a, c, t, g, unknown or other
tttttatatatatgatccttcttgatgcacatatctttctttttggacctgccctttggntcaggatgtttatacatatgctctttttttttcgttcatactcttttttttttcttttcggacctgccttttgggtcaggatgttttacttttggcctgtttttcgtctgtccgtgtggtatgccctagtacccccctgagtggcatagaaactttgtttttaaggcgctcagttttatttaaaatacagaggctgcatacacttagacggtacaaccctttaaacaaaacctaagttacacttttggactattggtaatattttctgaggtgatcagcgttccaggcccttggcacaatggttccatcaatcctttttagcttataagtgcctgaactgattttgtcctcgatttcattttgtccgtcccaatttggcccaagtacccccnnnnnnnnnnnnnnnnnnnnnnnnnnnactcttcttaagaccatatcccaatagcaaattttctgtttt

SEQ ID NO: 161069 - DNA, 614 bp, Cannabis sativa
ataaattttaatataatgtaaaacgtattattgtttagtatagagtaaataatttatagtaactaatattataatatttaggttaattaggaattttgtcaccaactttgacatgtatcaaatcatgctgttaaagttttaagattgttaaaaatatctcctgaactattgacattgttaaatttaaagacttttatccgattttagtaaaagagtctaatatgtataaaagttcagggggcataatttgatacatgtcaaagttcgaggagcataatttggcagatatcaaagtctgtggagcatggtttagtacataaacaatcaatgaaatagtaaaaataaattaaattaaacaaaagtccttaaatcttacaatctcaataattcaagaggattttttaacggctagaaaagttcaggacatgatttggtacatgttaaagtttaggggacaaaaatcctaattagcctaatatttataaagagttcagagttggggactctgatcatggtcagggtcggccctaggcataggcggattagtcccgtgcctagggcccattcattttaggggcccaaattaaaagaaataccttttaaaaaatatacat

SEQ ID NO: 161070 - DNA, 557 bp, Cannabis sativa
ctatccggagggtcctcccagcagcagcttgagccttaatataggctaactcctgttccctcctgaagaggtacttctgataccggtcctctgctgaggaaataatgtctgctcggagtgccttttcagagtctggggtacgaatgtttgggcagacgaccttagagaggttgaagttatcaacggaatggctccccgagataagcttggacttccggcagttctccattgtgaccaagtctcccacgttaaggccatttttgtcgtaagtggaaaagaccttagcgtgttggaggaaaagctaggtaggagcagtgcgatgcagtggagggatcttgatccactccatgagaacttctgggcgatccacggcctgaaagctggaagagaagaagaaacggtggcggtactccttaacattcttctgaaaattataagggaccgggccctcattagcaggatgggcctggagtgtgaaaaaaccgttcttaaacttatcccccttcttggggatagaaacaagttcataaaagtataaaatctcagctgggctaggt

SEQ ID NO: 161071 - DNA, 526 bp, Cannabis sativa
  modified_base (485)..(501): a, c, t, g, unknown or other
cattctgatcaccggcaagcagcaccgtgggtcattggtcacattattaagaacaagtatccatcagatggatctaactacaaggcaaaagacatacagggggatatttgatgaatatggcatcaagatgagttatgagaaagcttggagatgtagagagaaggcagttatgtacaagaggggtactccagcagaatcttatacgaaattatatggttacttctacatgctggaacagaataatccaggcactattactgacattgtcagcgaggataaccggttcaagtactgtttctggtcactcgatgcttgtaggaagggatttaagtattgtcgtcctgtgattagtatcgacggaacattcttgaagacgaagtatggaggaacactgttagttgctgttgcgtacgatgcaaacaaccaattgtttaaggtagcctttgcaattgttgttggaaatttattttacgaggatcttagannnnnnnnnnnnnnnnnttattaacatcctaaataagaactt

SEQ ID NO: 161072 - DNA, 533 bp, Cannabis sativa
ttcaaagagcctggaatggcgaaaccttgaaattttattatcaatagtactcgcagtgtatcgtttatactcgctatgtatttatacttagtcaatttatttacataaatattttaagtatagaaggtatataacccactcactttgtactattgatcaataaagagtcatgaaatttttcgagattttgaaatttttctaccttaatacttattacaccaagttgtaattaaaccacaatcgagatgttataaacaggaaaaatgcgagtacccgtgtactgcgaaattgttataatataaataaatatccccgaaaggatgtaaatttgttcaaaagaaaaataagcataaatttgtctaagtacaagttgcgagtacccttgtacctcataaaaaagtctagcaaaagtaaatattaaagtgaaaattaagcttaggagcagcaggggcagttggggtagtagatccatctgcaactttgctggcagcctcgtccacgacttcctcggtgtccgcagcatcagcatcctc

SEQ ID NO: 161073 - DNA, 816 bp, Cannabis sativa
  modified_base (230)..(232): a, c, t, g, unknown or other
aaaataatttccaacaccttcaacttagcctcacgcttaagttgaatgagctcatcctccttattagctcattcatgctggccagcatcagatttcctcctcttcctcgccatggacttaggagaaaagtcctcgagatagagcccgtactgcaccagattatcactggaggtcaactggataatatccctgtcttcccccggcaaccgggcaagtttttgagctctatnnntaagagcaagagtgaggggaggatggtgatatgtcggaatctgttgaaactgagtctgggtaatgctcgaatccttcaccatgaagtactcatcagcaaaacgccctattttgctgatggccttggcgtccgtgccggtcaaccacttgaagcctagctgagagaagtagaagtaccccgaccttccttgtttgggggtagacttcaggtcaaagaaccaggcgaactcgtggggagaatgagcatcccatccttgggaagcatagaggacgaagagggcggatatatacttgatgcccttaggagtaatctgggccgggcaaagaccaaagaagtttgccacatccctgaagtatttatgcaagggcatcaacaccccttgctggtcgtgagcccccgaccaggcgcacatccccttatcagggtttgtggcacgattgtcgtgggcaggaatgtagtcgtccagctcacccaggtacccgtcctggtcgagagttcgaaggcgcgcctccaaaatcttggacggaggacttacccacctggcgcccaaggcaccttggctcctatgaggaactgccgaagca

SEQ ID NO: 161074 - DNA, 605 bp, Cannabis sativa
  modified_base (46)..(47): a, c, t, g, unknown or other
  modified_base (207)..(217): a, c, t, g, unknown or other
tttaaaatatatgaaatttatctttcattttaatattttaaagttnnttttagaaaaacacttagttatttgaaatatattgtagatagttacttctagtaattgttacattttctaatattaaattaagaaaatattttaagttaaaaattaatttattttcattaattttggatcaacttaattaaaatatttttcctagtattnnnnnnnnnnnaataattaagttgattttatacttgattatttaattcttgtattaaatacacttaattaaataaaaaattattttaagttggaaattttaatttcagaaacttaaatttgaataattttcaaatatatattttattttattttggtaatcatttttcgaaattgcattttttttagatgtagaaaattttgaattttctttgaaaaaatagattaaagttgtaaattaattatttttattaattaattttggaccaacttaaatcaaagattttttcatttatatgattaattaaaatatgttataattagaaaataaattaattagccaatgaaagtctagatagttattaatatttttgcttgaagtatttttagatcggaagagc

SEQ ID NO: 161075 - DNA, 644 bp, Cannabis sativa
tacctcactgtatgagttatgagtgttggtacggtttgttttgtataccctgagtactactgagtgatataccacacattcccagtacttctctatacttatgctggtatcacggtactctcagataacattcactataccaatacactctataccttaacagtataagtgttggtagtacaaataactcattaagcatgcatatacacataacatatacatacatttagatattgatatcacacattatatttagttcttaccttctttccagattcaagtgtgctgctgacctgaacggaaagtcttgtgtagatggatgccctaatcacattatgaaaccgggtaagttacatgataaaaccctaatcccgggaaacccgaatccataaccctaggttctattatactttctaggggttaatcaaactctggaaatagggaaacacccaaccacagcacagaatggacgagaattgaggaaatgaaaggcctggggaaccctgccaaaaccagctagccggttacctggtttgcactagttcacccaagaaatttcatttcttgctcagtcctccaccaaatgctaccaaaatgtccatagtacctaattagggtatacacaacatattccagccaataaa

SEQ ID NO: 161076 - DNA, 593 bp, Cannabis sativa
ggaacacaaaccctggtcttaaacaacagcattccactatctgacactgtcaaatctttggcttgaccagctgaaacctcttctctgatcttcactgattttggatctactaactgagcaactttaatttgttctaacagatcagattgcagcgtcaagttatgaagttttcctacaacaactcgatgcttgatctgaccatgtcctctgctaactgaggtgaaatcttaatcatactagttacctgcccgggacccttcctactcagggcatcaaccaccacattggccttcccagggtggtaaaggatttcacagtcataatcctttaccaactctaaccaacgcctctgtctcatattcaaatctttctgggtaaaaaaatatttgaggctcttatggtcagtataaatttcacatttctctccatagagataatgccgccaaattttcaatgcaaacactactgcggcaagttctaaatcatgagtcaggtatcgctgttcatattttttcaactgacgggagacataggtaattacccgatcggcctgcatcagtacacacccaagaccctatctggatgcatcataa

SEQ ID NO: 161077 - DNA, 531 bp, Cannabis sativa
aggtccaggtccatgttcgggtccgggtatgggtcctcaatttaagtaagggccctaggtcccagttccagttctagtccctgtctaagtgcaggtcctaattcgtgttctagtgcaggtcttggtctagggtcttggctcggtatggctcttggtctcggtttggttctagagtccccagtttgagtcttgagtctcgtgtctcgggtctcgatcttattcccagtctgggtttgggtctcggtcctagtctaagttcaggtctgagttttggcccgggtttgagttctagtatgggtccgagttctagtccgagtcccgagtgacgagttccgagttctgggtcccaggtccgagttcaagtccaggtatgagttttggtctaggtcgttgttttggatctcggtctgggtccatgtttcgttccgggtctggtttaggtctgggtcgtggtcccgttctagagtcccacttcagttcttgttccattttaaagtcataggtctaggtcttggttcggaattgggtaag

SEQ ID NO: 161078 - DNA, 652 bp, Cannabis sativa
taaactggggtagtttgacataacgtaccatcctcgaacatccatcaagggccaagctttggttttcttgatagaaggtataactccagaagaaattccacctgatcagcgggacgcagaaaacctggaagttatacgtggatggtgcatccaacgaacagggtttgggtgcaggggtattattaatatcgctagaaggctttaagtttcactatgctttgaggttccaatttgacgcatctaataacgaggctgagtatgaagccttgatctccgacttaaagatagcagaggcgttaaaagtcaaaaatctcatatgtcatagtgattcgcagctgattgtgaactaggtcctaagggaatactaggccaaaggcttaaaaatggcgaagtatttagagaaagtttggaagaacttggaaagattcgattacattaaaatcgaacaaattccaagagaacaaaactccaacgccgacgccttagcaaaactggcctcgtagaatgacttggatgaattgaacttagtcccgatagaggtgctgagcgagccaagtatatgtgaaactgaacacgtcgagatgatagatagctctcctacatggatgactcctattatcaattatttactcgacggacaacttccaaatga

SEQ ID NO: 161079 - DNA, 524 bp, Cannabis sativa
  modified_base (26)..(39): a, c, t, g, unknown or other
ttaagcaagcttctcgctcttggaannnnnnnnnnnnnnaaataatcaaaacctacgactttcaccaatatgatgatgaaccttgtgtttaccaactcaaggataatataggggtagtattcctcgtcctttatgttgatgacattttgattattgataacaatatcaagaaaatggttgacattaaggaatggcttgacacttaatttgaaatgaaggacttgggtgaagctgcttatgttcctggtattcagatcatcagaaattggaagaatagatcccttgctctctctcaaacaacttacattgataaggtgttagagagattctcaatgaccaataccaaagggggatgccttctagacctggtatccatctatctaaggaatagtgtcccactgatcctcaagagatacaggacatgagaagggttccttatgcttacgcaattggaagtctaatgtacgcaatgttatgcactagacctgacatatttatgcagtaagaattgtgagcaggtatca

SEQ ID NO: 161080 - DNA, 513 bp, Cannabis sativa
acaaaaccagtccccacctcatttatgtcttcaaaaactgccccatccacattaatttttaactgtccagcagccggtttggactagtgttctcttgtgtcagtgcgattagaagctagggaaaccgagtccaacctcctagattgagcacacgcccattgtcgaagagtggtacgagccatccaaacaacatcagcatcactacaacttttaccattccaaagcatatcatttcgagccttccaaattgcccaaccaaccatgacagcttctttgaccaaccccatattgcctactgccaacacttccataaaccaatcaaaaaaattggttgctgcagaatggccaacacctaacgctgatcggagccaacaagaatgagcaaaggagtattgaaccaaaacatgaaaaattgactcttccctatagttacacaacacactataaatccacaggaacatgtttactatgaagttgagtacgtgtaggcaaacaacccgaaagagcttttca

SEQ ID NO: 161081 - DNA, 562 bp, Cannabis sativa
attttgttatttaacaaaatacagggtccaattggtaacttttgtaaaacagagagtctaaaatggtatttacccttttttatttaacaactcgtgcctcttctatttaacaaaaattctaggagcacaatgtggcagtagtaaaattttggggtataaaatataatagtggtaagaaataaaattgccaattatttaataaaaatctaataaaatctaattaaagtcccataaattattaatatttaaatttgaggaaaatatttaagtcgctaataatttggctgcagaatattatttataacaaagtttagaaaaaaataaattggataaatagcagcataagaaattaaagttttgaatttataagtgtcatagactcaattatttttttaacggtataagtacttaatgtttgtaaactataataattttccttcaattttctatgttattgtcacatgggtaaataccattttggaccatccgttttgttaaatgacaaaatggaccttgtattttccaaaattatacaaagaggaccctgaactgattttttgtc

SEQ ID NO: 161082 - DNA, 603 bp, Cannabis sativa
  modified_base (258)..(259): a, c, t, g, unknown or other
aaaattcttgtctcatttactttatcattctatttgtgtaacacgtggcaagcatcagattaatacgacctcgctgtcagttgatcaatttttgaggtcaacaattttgtgcttccattgagagtgtggatatcatatctgatcaaacgtcatggttaacacgagaagaactcctgtaacaccctaagattatgaaatggattagaaaaaccataactaattaattgagtattattgtagaattatattattatatannttattatatgtgaattaatatgagttatgacatgttaagaccccattggtgagccatgggcattttagtaattttgacccgagaaaggtaaaactgtgaatttaatttaatacgtgcttatggactatattattatatagtatgtctgttttatccttttttaggtgtgttttgacaagtcggcgcggtatagtcacaaccgggtatttcaggtttagggccgaaatacaattttgagattatttattggcattttaataaagtgtgattaatctgaaatttaattgggtatatttatgttggaaatgactatgttatccttggaatgcttttatgtgttattt

SEQ ID NO: 161083 - DNA, 511 bp, Cannabis sativa
gtaatatgagggtcatgctaaacaagtcccatatggtttaaaaatcattgtgggtgatatacttttacattatatagatcaatattcttttacgttggtttgtaccaaaattagtattatttatctttcatattggtgattgataaagttaatcttgctcaattagttgtaattttttttttaaagtaaatgcaaaaataattttttgtatttttcaatctttattaaatttaaaataattattaataaaatcatttgattattttttcatataaaagttattttcttataattatttattttaatttttatttaaataattaaaattatatcaatttattaatacatgatattttattagaataataagactctttaaatatatatttttatatgtgcttatgcgactattgtaaatgttaaattttataggttatatatattttatttgttctaaaaattaatattatttattttcacatatttttgtggcatcttatgtgagttttct

SEQ ID NO: 161084 - DNA, 579 bp, Cannabis sativa
cttacccccttttgagaagacttttttcttccaattatgaaggtgacccctgaccttgtcatgcaggtaatggaacaattgcttttttgttcgtccaatgtgctgtgggagaccaagatatttttcgaaagaagatcgcaccgggatgcccataaagttggagattaaagtttgatccctaagctcaacattaggggaaaaatacaaagatgatttttggaaattaaccttctggcccgtggccctctcgtaggcctcaagcacctctttgatggtattacaagaattgatggtggcttgacagaagaggaagctgtcattcgcaaaaaggagatgagaaatagcaggggctcttctcgcaactttaaaaccggaaagggctctcctactttcttgctggtgcaagagggaggaaaaaccttccgcacaaagcaagaaaaggtagggagaaagggggtcgccatgtcgaatgcccctggaagggctgacactgcctaagactttgccattcagattgaattggaaggatgcagtggaaatgcaggcatggatcaaatggacaaacctgggggggaattg

SEQ ID NO: 161085 - DNA, 620 bp, Cannabis sativa
  modified_base (574)..(586): a, c, t, g, unknown or other
aagaaacaagatacgactctctcttcacaaacaaccgaaataactgtctgaacgatttaatggataaccactttactaacagaaaccgaccttttatatatccacaaaataagtctagttggcactaactaaaactgaaatgagactcacgtaaacaaacgttagtgcagatataacagactaaaaatccagatacgactagacattgaacagaacaaacactgccacaaaataataacactaacacagcgcatcaacacaaagatcgtgggatcattgctgaatattcctcactatttatagggcaggaaacttgaggaggaagagttttctctctcgttacaaagcgcatcaacacaaagatcgtgggatcattgctgaatgctaggatcgtgggattgaagccgtatacactgatagtggaatcgtgtgtattccatatccacgcaagttgatccctgagttatagaaatttagctggtgactcacgaagtgcttggctgaattggctgagtgttgcacattctgcacggcttgttgagtattccattatggacatgccagcgaggcatcnnnnnnnnnnnnntgatccgaccaggtgctctaagttgatgccacgt

SEQ ID NO: 161086 - DNA, 613 bp, Cannabis sativa
aatccgcacaagtgcggatatccgtattttgcggattggattagattggatcgtgcggattggattggatcaaatactttgtgaacactcctaagtttgaagtcacgtctccatggatggaaattgcgatatgtgagaacatgggtagcaagagccaatcctaaatgattgacgatgctcagaaagtatggccgtcgaatgtcttcataagtcggtcgattgatttggttttggcgattggttagagttgtttatcaagattgactgtcaagggaagtttgagacggtggaggagcaattggatccgatgaatttatggttaataaaaaaattatacttagtacacatgcttcaaacctttgccacttctagtaaaaccctgtagctgagttaattgggagctttaatagctcactgcctcacttgatagagtggatttttttaactctttctagctattttttattttattttattagctactttagcacagttgatgtgtatgctcttactacaaaaaaaatcttatttttagtcacaataaaatttgtgattaaatattaaaaagttgtgactaattataaattattattcttacgttgtgattaaaaag

SEQ ID NO: 161087 - DNA, 536 bp, Cannabis sativa
cttcgatgatggcgtttatatggcctggtcaataaatggccagaacatcaagctcgacttctacccaaaaccagtggagatgattgctaaatttcgggagaagacgaagaaacttgacgccatgctggatgctcgcattggtcctcgccttcctcctcgaattgactaggccgttctgaatacaacctagatttttcttatcttttttttttatttacagctaattctcttttatttaagacagtctttatttacatagctgttttattttctaaggggaaacaatggttaaggcttgtccccgggccctttgtatatatttataactattttttgacctgcccttagggctaggatttttatatatatatgatccttcttgatgcacatatttttcttctttggacctgccctttgggtccgaatgtttatacatatgctttttttttcgtgcatactcttttttttctttttggacctgccctttgggtcaggatgttttacttttggcctgtttttcgtctgtccgtgtggta

SEQ ID NO: 161088 - DNA, 502 bp, Cannabis sativa
gatagggtcttaagttggttggttactctgatagaaaccacgccaacttcctccccagattaccctgaagccatgtagatcttcctttgaaattcttcatcaacttaaggaggatctttgagatcgctcacaagatcaataccctctgggatcacttgtgaggatcaaccatggcaggtcacggggttcccctggtttggattggttagaagttcctcagccttggaatccattgtttccggctccagttgagacttgaagtatgtaggaatgaatggaaattggttggtgcatctgggtattatgagtctgggaagataaacttctgagatatcttggcagaaagaaagtaatccattctaaaaatggatttcaagcctaaaggtttgtgaaaaatgacatgcttgagccacccttttatacacaaagtacagtgacaagaaagccaaagattaagaaacctaacggctgggaatcatgcagaatatgaataggcgattca

SEQ ID NO: 161089 - DNA, 517 bp, Cannabis sativa
cttcactaccatatccttccacagccgcttagcaaagccctcaagaatagtaattggggggttagccccaattacataacaaaccagagacggctgccagtaattcacctcatcctctatatcagcaaagtgtattttaacttttgaagttgcaggtcttacctcaggttgctgaacagagttagcaaaactggtgttgagatttcgaacaatacctgaacgcagaatcgggggagaaatcttcttcccagagttgacatcctgagttgttctattagctacctgtaaccaatctgagaaatcatgtctgatttcacttcgcctctgaaatagggcttccgtctcctcaggcgagtaaatcctcccagcagagcactgttccattgcctcagaatactgttccatttgttgctcaagctgttcatcctgtaaatcctcctctgctatctctaattcctttactccaagcactgcatccatggatctggtcttaataaccctatccgaagatgtaggc

SEQ ID NO: 161090 - DNA, 621 bp, Cannabis sativa
gaagatggtaatcttccaaccaaaaggtgaagaaccatttgtttttgtcggattggttcggggatctcgaatcccggtaatttcaatattaacaaaaattgttacgagatgaatgtctagggtttctagccatggtattggataccacttggcctgactctgttcgaccagaagacatcaaggtggttcggaaatttttagatgtttttcctgatgaacttccgggtttaccactgcagagagaaattgattttgtcattaatttggcacctggagcagaaccgatttctaaggccccttatagaatggctccagcagaacttaaagaactaaaaatacaactccaggggtcgcttgacatagggttttcacagcctagtgtgtcaccctggggagctccattattgtttgttaagaagaaagatgggtcattgcgtatgtgcattgactaccgggaattgaacaagctaacaatcaagaataaatatcctttacctaggatcgacaatctttttgatcaacttcaagggaaggcagtcttttcgaagattgatctcagatcaggctatcatcagttgagaatccgagaggaggacatcccaaagacagctttccgcacta

SEQ ID NO: 161091 - DNA, 536 bp, Cannabis sativa
gctgctgtggcattcctgaggtccaaagtccaacagtggtttgctacgcgaaaagaaaaagctgacaactggacgaagaccctagcaccagaaatgagggacttggcattgcaatttgaaaaatctcggtatttgaacgttgacacatgtggaccttacacgttgtaggttcaccctggaggaacaattgagaccggtggcgtagtggacttgcaggaacagacttgcacttgcggtttgttctagtgcatgtagtttccttgtcctcatgcatgtgctgcagctcatcaacgaagtattagcatgtacgcactatgttcgccatattacacaacagaatattagaggagcacatatgagggtacaattatgccagttggtgacgagaatgattgggaattgcctgatgacaaaacgaacatgtcataaatctacacaccaccgctctctaaatttcttcatattgtcatcgttcacattatcaaaccgaagatccaacattttatgctcgatgttctctatcacatacatctcgc

SEQ ID NO: 161092 - DNA, 532 bp, Cannabis sativa
ttttaggttaatttttagtgtatttttaatttagttctactcttgtttggagcaattttacactttttatcttttaatcttgcagatttaaaatagaaggagactagaaaatgtcaaaggaataatatgaaaaaaaaaaaaaagataaaaaatctcacaaaaagatgatatataaaatagagagaattgtgcaagaaaataaagttgaaacttcaagctagaattcgactatgttctgattagattttggaaaaagtcagaacataaagttctagatctctcttttatctttccagaacatttttaatcgtctaattctgagcaatatctagagagttatggccaaaatactatcagtcgacgcagcaaaaaactcacctcctcaatcctaaggagaataggtttttttttttcctcaccgaattttactttatttgatcattttttggctataaaagaagtggacttcaatagttttgggggaagcaattcagaaggaaataaacacagaatacagatacgaatttcagag

SEQ ID NO: 161093 - DNA, 634 bp, Cannabis sativa
tcaggactgtaggctccagcaagaatggccaagagttcatccatgggtctggctgctgcacaataaaataagtgttagaacattcgcaagaacagtatacacttagcaaaaaaggaaataaagctaatcctaccctgactctctaattcggcccgagcaaagtcccgaatcatagcactggtttcatcgtccccgagaaagctgcccgagggaaggaaccaactagaggacaaatgggctgaatggtccaagggaatgggcgctagaggtccagaacccatccgggaccgacctaaataatggcctaaatgggagaaataatactccttggcatgattcccccactgggtggaaggcatcctaaacctacagagacgttcatcgaaccctataggcctaaggcgggtatactcacggacgggaggaacatagtgtattattaaaggggacttaccagaacccgaagtgctggcatcgggagccccagtatttggtacggggaccacgagcttgggtttgggggtcctccgctccaatggagctccaatccggagggcccttccggcggtcgcctgggccttaatgtaagccagctcctgttccctcttgaagaggtacttctggtacttatcct

SEQ ID NO: 161094 - DNA, 596 bp, Cannabis sativa
  modified_base (34)..(46): a, c, t, g, unknown or other
gaattgggaaattaggtttgctgaaatgcaagcnnnnnnnnnnnnncaagataatgagattcagagattgagacagcagggtgctcctgcagtgtctaggccagaagttccaggggcacctgcccctgttgtccaggccgaaccagtagtaacggtgaatagaatggaacccctgtatgaaaggttttgcaagcaggcaccttcggtttttctgggaggtccggatttcatgaaagccgagcagtggctaacagtgattacgaggatattgaattttatgggtgtcaccggaaatgacagggtggtatgtgccacctttcaatttcaagaggatgcgttggtctggtgggacatggtgtcccagatacatgatgtcactacgatgacctgggaaaagtttcaggaactttttaacgcaaagtactacaatgaggccgtcagaagtgccaagaggaaagagtttacccatcttacccagaaggaaaatatgagggtgacggaatacacaacgcagtttgatcggttggcaaggttggcctcgggaatcgtaccaaccaacttcagtaaaaaggaaaagtatttggatggactgaatg

SEQ ID NO: 161095 - DNA, 502 bp, Cannabis sativa
  modified_base (404)..(409): a, c, t, g, unknown or other
  modified_base (462)..(475): a, c, t, g, unknown or other
ttttttaatattataaataatataacataagcatactaaccttccaatataacaaggagtgatttttgccaaacaccgaaaaaaggaataccacaaaacctatttagcaataaaaataaatattaactaaataaaattaaagtatagtactatgtgtatatattatgtatgtaatatatacatttacatatacacatatctatacatatatatatacacacaaatatacacttttacatatatatacatatacacatatatacatacatttacatatatagatatatacacacaaatatatttttacatacaattacatatacacatatatacttttacatatatatacatatacacacatatatatacttatacatacaggttatcccaaaattggcactctnnnnnngcatcacaagaatggtgacacgtgacatctacttagagcacctggtcggatcnnnnnnnnnnnnnngatgcctcgctggcatgtccataatgg

SEQ ID NO: 161096 - DNA, 527 bp, Cannabis sativa
  modified_base (235)..(238): a, c, t, g, unknown or other
atttacattattaacctcggaaagatatgggaaaagctccagctcgctgtcaggattattgttactatctcagtgagatgacccaatgagatacactttgcaacatatctaaatccacgtcaatattgacccgataaaagcggataaatcacaggtgtgtgattttcaaataataatcgcatttattttatgtgggacgtaatcaaatcccataattttaggaaaatattattgnnnnatattaatctgattgtaattaactcccttcctatgtaactataaataggggcagaatatactgaaaaagggatgaaaaatccttaagaaaaagaaccctaattttttatcagagaaatctaataagatagactcatggactatgcagatttaactgcaaaaccacataaaaagctttaagtgctatttcttcttcttttactactattatatctgtacaaatcaatcacgaaattaggctttaatatcgttaatgaaaatctgcattaacacaagtataaaagagaaac

SEQ ID NO: 161097 - DNA, 531 bp, Cannabis sativa
  modified_base (199)..(204): a, c, t, g, unknown or other
  modified_base (367)..(370): a, c, t, g, unknown or other
gttgatcttaagtcaatatcttaagtcaatagattaagtcaatagatcttaatagatcttaatcctgatcttaatcctgagatggttaggttctagcttaactatattatttgtgtttttggcttattcgtaaaatctgaccaaatggatatctcaatacctacatcttgggagcatggtagtacaattgagtgggagnnnnnntcatagatacggaatctatagattctataatgacatagaaatgaaatggtaatttcctttgagcttggcttaacagagagaaatggaagagcttttattttagtaattatattagcttactgaaatatcatttatagaaagttaagtgttttaagaataaaannnnttgaagggtagaacgataaatttgtccatacttgatgtaaatcatccatagaggatctttgattatttggattgaaatggataattagtagcatatctatatttggaacatatagagcattctatgtaattaggagttgaatctatagtggagtcaagaag

SEQ ID NO: 161098 - DNA, 573 bp, Cannabis sativa
tgccgcggcatgctctgagcatgccgcggcccgccccttgttggtggaacctgggttttttcccaggtgacgctgcatggcttgggcatgtcgcggctcgcccttgattttcagggcactttgagtgcaacttttgaaatgcataacttttgattttgaacttcgatttgggagttctttatatcgttggaaagctcgtttcgagctctatgtgattatcttaattttaaatgccatgaaaatattttatgagcttgaaatcaggggttaaccctagttgtgaaaatcccggatttgtgtgactaggattaccagcacctaatcaggagcacccggggattcagaatctctactattgcgggacaataggtaagacagtggctagcacgtagagtatgtgcagtggcgcttatattgaaaatgatatgtatgattgtttagtaaccgggattagggttattactctaataggaacggtctaatagcctagggttattaccctagtgatacaagagtgtaaatgccatgccatgttaaatgtaatgagattcaaggattatgtgcttaaggcat

SEQ ID NO: 161099 - DNA, 710 bp, Cannabis sativa
  modified_base (433)..(440): a, c, t, g, unknown or other
cttcgtcttgagtgacacatctaaccaatggcatcgataatcctcttctgtacatgactccctctactatgatataccgtgctgccttccttctcattttttaagctttattttggtaatctgagagttccccagagttgaggtaggctgctattagcgtcatccaggttggggatgtatcaatcattttgatttcttccgtgccagtgatggtaggctcttcgaggaactagataggaaccaagttcgccttgtcacttacattactgcttgccaatcgagctaacgcgtctacagttgtattttcttctcttggaatttgtctgagactgtagcttttgaattttgcgagcagatcatgtattttgctcagatatggtatcatcttttctccccgagcctcgtattctccgaatacatgatttaccaccannnnnnnntcactgcagatttcaatgtgttcgaccttcatctcccgggctagttttagtccagcgattagagcttcgtattcggcttcgttgttagatgctttgaatcccaacttgactgcagtgtgtaggtgttgccccccaagcgtgacgagggcaatccctgcacctaatagttgatctgtggccgacgcatccacatgtagtttccaggtcagtttgtcctcaatgtgacttggctgaggtattggtgctggctcagggttactttctggtatg

SEQ ID NO: 161100 - DNA, 595 bp, Cannabis sativa
aaaatataaatgatgatcgatagtcattataaaaacctcgataaggtaaaactaaagatcacctgcaatgtgacaaatcaaatgtccctcaagaaaaattcaacaattagacaacaacatgtcatcgcaagaactagggacatgatgggggagcaattcccagagtatttcctcgcatgatcgaaacttacgagaaggtgtgaccgagacagggtctagtcgcacactatgcatcgcatagtaaaaagattaaaagcaggacgtagagagaagttagcacagtcgcaacatatatcaagtatatgcgatgagccagtgcttctcccccgtgcctataaaaagatcgcatctttacaaacacttggtccgtatgactaatgtgcacgacaactcgaccagaacccgcgagttctatgttgtcagcacacgaatgcccaatacgcgacccgtttagtcacaggcattccacgagttaagaaccacgagatgttcatacacgaatacccgatatgcgacccgtttagtcgcaggaattccatgaaataagaaccccgagaggttcacacatgaatgcccgatacgcgacccgtttggt

SEQ ID NO: 161101 - DNA, 606 bp, Cannabis sativa
  modified_base (149)..(151): a, c, t, g, unknown or other
tttggattatacttgagttggattatttgggagctccagttcaactttttgagatctgcctttcatggatctaaaaattgaagtcaagacattagtttaatgcaaattaattaaactgaattttcggttgaattttagtttcgtagtannntttctacactttttttatgaattcaaaacaagcaatgttttgattggttctggtcatcttctcaggtgaagtcgccggaattaatggtggctctctttctggttgaatttttgtttcggttgcgttagattgttgcatggttgcacgatagttgcgcgatagttgcccaggaagcatggatcctgggttgaaggtgtgtgtaagtggtatttgtgtacgtaattttttttatttgggctgtatatttatttatttggccagctagaagtatttttgtaatattgttactttttttttgttaaaactgaaaaaaaaagaaaaaaaaaaagaaaaaaagaaaaacctttaaaaaaactctctaaatattctcttacctttttttttgagatttccaaccataaattcaaattttttttttaaactcaaaaatattaggtttccaaaatggacattac

SEQ ID NO: 161102 - DNA, 614 bp, Cannabis sativa
cgccttgatttgaaggtgaacagcacaaaagagctgttactgaaggtagtctcaacttaccttggcaagggtaatatgaatgaagtgtttgagatacctaagacgagcaaagtttagctctcgctttctttcaagggggagaccgagaagaaggatgatgtgggtgtggaccaaaaggatggtgaagggacgaaggataaatccaaagaggatgtcgatgatgcactgagtgtcccttcacttaatatatcagaagataatgtcgttgttccaattgagaagcttgtttctgaagagtcgtttgaagatatcaacttttggggagaagaagtcccagttattgtaaaagaggaagttgagcagaccgtcaatgatgattttgatgctactgccttcgaaagattcaaagactctagaggaaaggtgattgggtcgttcactgtgaacaaggtttattcgaatcaacagtacgagttctttcgttacattttctctagtgccaatgatcagaggtaatctcctgtttaatgattattgtttatgtagttgatattagtacatttattgtatttgattatttgttttgtgtttcagtgaagtgttagcccattttg

SEQ ID NO: 161103 - DNA, 539 bp, Cannabis sativa
caggtcaggatacttctatttttcccagccagacttcaagtggttgacgggcaccggggacaaggccgttagcaaaattgggcgtttagttgacgggtattacatggtggatggcatgggcaccacctacacgcggttctagcagatccctatatattaccgttcgcccttcacacttgctctcagggatagagctcaaagactcgctcagctttcgggtgttgcccggaatatcactttgttaacctcgaaggaaaactttgtggagtacgggctctacccgaaggatttcattccccagcctgtgaaggagaaaaagaggaaatccagtgctggctgggctgagggagctcatcaggagaatgaactcattcaactcaagcgtgaagctaagttgaagggaggtgcgggagccaagcagtatgctcaggagcattttgagttggaagacgaggttgaggaagagtaggtaactttgctcaaaaggaagaagaaacttccagccgagcacaggcctattgtgttggaaattattttac

SEQ ID NO: 161104 - DNA, 552 bp, Cannabis sativa
ttaccgagtccaacccgattatgcattgaacacataaccctttatttcaatatacatctatatacatcatggcataacaattacatattaacaattcacttcggtaataagcctaagccaataaaccgctctctttagagtaataactctaatcccggtttctagtttctcatataaatcacattccatataagcgccattgcgcatatctctacgtgctaactactgtcttacctaatgtcctgcaaatatggagattccaaatgccccggtgctcctgaccaagtgccggtaatcctagtcacaaacccagaatacacaagtataaggttaacccctaaattcatttccacaaattataaaattggcatttaaattctagatattcacatagagcttggaaagagctttccaatgatataatgaacatcccaaacagagtcgcgagtagaaatttatgaccaaaaccaaaacccaaaaaaaaacacaacatgctaccataaaatggccgcggctactgggttaaagacctaggaaacccagtttccagcc

SEQ ID NO: 161105 - DNA, 598 bp, Cannabis sativa
ggaggaagtcgagaacgaggcggtcagcaaagtcgcagacgaatctgttcctgctgctcccaatgcttgacttttcctttaatatttgcttatgttaaactttgtttcttttttttttatttatgcggtacaggggtactcgcactttgtacttggacaaatttgcattttattttgaacaactttatatcctcgcggggatatctgtttttagtattttcgcagtacacgggtactcgcgctttaatatctataatatttcgactttaattacaacctggtgtaataagtaaaaaatttcataagacttgaaaaaattttaaacttgaagaatttccaagaattttcattatataatcaatagtacattacggcatataccccctatacttaggattttttatataaaaaatgactaagtataagtacaaggcgaatacaaattagacaatgcgagtactattgataatagaattttaggcttgcgccattccaagtttgtggaatcgcagtaccatcgagtgctgcgagtcgatatgtagcatcaccaatcttttctgcgatgagatatggcccttcccaattatccccgaagacc

SEQ ID NO: 161106 - DNA, 551 bp, Cannabis sativa
gacgtggcatcacatgctggtgacgcgtggacctgatttcccatatctgtccgagagagatgctccaagcagggcacaacatacacctgcagggacagtgtcttttcgaccgagctaaggataagccgagcaacaaatcaacacttagcaattccagactttacatcgtgaagcacaagagcaatccctataaatctgagatcatatcacagagatatgacaagctgtccaaatcctacaatctgtatattctaaatatgtaatatatattcttaccaattgtagacattgtaagcaaaagggaaaccttccctcaagcatgtagccctataaatagtgatccattctcactgataaaagggttgaaagaattactttagagagatctaagagagcatactcagagatttcattgtaaaagcttcaagagaggaactgtgttctttgttcttgagttcatataaatcaaggggagtaggctattaccgaactgcacggggttgaacctctttaaaaaccttgtgttctttacttatttgcttatattatac

SEQ ID NO: 161107 - DNA, 531 bp, Cannabis sativa
ctcatatattgaactatataataatataattcctcaattattcataattatctaattagtgttttgctaatccatttcataattcttgggtattacacccatggtgtcactgttgactgataataagctcaatggagctaactttatcaaatggagagagaacattaacattactctcattggtgaaaataccctgtttgtgttgactgaagaggctcctgagctgcgaggtgagaatgcaaccaaggtagttaaagaaaagttcgagcgttgacagaatgctaacaacaaagctcgatactttatgctgtctagcatggttgacaccttgaaaacaaggtttgcaagcactctcacgactgcagaaatcatgaaccagttaactgaactgttcgggatggcatcaatttaagatcgttttgaggcgacccagaatttcatcattgtacggatgaaacctcatcagagcgtgcgtgaacttctccagatgactagttacttccaagaagctgagaatcatggagctattat

SEQ ID NO: 161108 - DNA, 606 bp, Cannabis sativa
aaagccggaagttgaccgggattgtaactagcacttggacttcgaatcataactaaaattggacccagacctagacctgaattgggaggcggacccggatccccacccaaaattggactcgggacctgaatccaaacctaaactcagacccaaacatggaacatgactagggacacacaaccagggtcaggaccaagaacgcaccccagtctcgatctcgaacccaaactcaaaaatgggacctgggacctgaacaagaaccagatcgagacccgtgacagtgatccagatcttgactcgggattcaggcaacgaggcctggaacagactagtagtcagtgtctagatctgggactcagacaaggaccagaacccagacgaagaacaaaacccgaacccagacctagacctgggaaccaaaattagaacctgaacaagaattgccgaaccaggaccttagaacaagactaggacagtgaccaggaccctgacccaaacctgtaaccgaaccaagacctagcctcatacccaaactgagactggaactcgggcttggacacggtcgtgtacccagacttgaactgagacccggaccatgacctaaat

SEQ ID NO: 161109 - DNA, 511 bp, Cannabis sativa
agttctatcaatgagaaaaaaataaagagaaaacaaaataatttgtatgcaaaaaaaagttagattacacgagcttggcgtacaaaacaaccaatgctgttgttcgtttacaaggaggctgttttaaacactaacaaacttggttcttcgctgcctagtgttgttgtttctattttgcagcaatttgaggatgtgtttcccgaggaggtaccacatggtgtgccacctattcgaggaatagaacatcaaattgattttatttcaggtgcgtcaatcccaaaccgcccagcatatagaactaatcctgatgaaaccaaagaaatacaaaggcaagttgaaggattgatgaccaaagggcatgtgagagaaagcatgagcccttgtgcggttccagtatttctcgttccttagaaggatggaacatggaggatgtgtgttgactgtcgagccatcaacaacataacggtaaaatatcgacatcccattcctcgtttagatgatatgttagatg

SEQ ID NO: 161110 - DNA, 583 bp, Cannabis sativa
  modified_base (441)..(441): a, c, t, g, unknown or other
gtctgtgttcggttctaggtctggggccgggtgctgatcatgctcctagtcttgttctaggttcttgttctaggccctgttacccgaatcccgggtcaagatctggatcactgtcatgggtctcggtctggttttggttcatatcccaagtcccatttctgagtttgggttcgggatatagactgcggtgcggttctaggtcccgacactggttctgtgtccctagtctggttccatgtttgggactaagttcaatgttcaggttcgggtctcgagtctaggtttgggttggcatcctggtccagctcccaattcgagtctaggtttgatttggagtacgggaccatgtccggttacggttctagatctaggtccaatttcagttatgattccaactccaggtcctagttccaatcccggtcaacttccggttttggttcnaattttgggtcacagggtaccagttcgggtccactttttgtattgggaatgagttcaggggtcgggtgtgggttcgggtccttgtcagggttcgggtccaatgctttgtcccaaatcaagactatgggttttgtccaagccc

SEQ ID NO: 161111 - DNA, 612 bp, Cannabis sativa
  modified_base (276)..(285): a, c, t, g, unknown or other
agtttaagtttgaggtatagttatatttcactaggaaatattgtctttatgttcattttttttttttgaaccatgtctttatgttcattagtatatcatgaaggaaagaaaaagaaaataaacatgtggaatattaaattaagtttttagtatatatatgtttccactatactggtggtatattaatttttcactatagtatttatgtttatgattgtaaaatatagtttttatatgctattgtgtatcgtgaaaaaaaaaatcatttaatagtannnnnnnnnnagtttatggtatattcatattggtctaaggtagatcgttttgtatgtgatatgtatatcgtgaaggatagaaagaaaaaaaaaaactattaaatattaatttaagtttttagtattttttttttaattttgtacggtatatctttattatgtgctatgatatattaataaataaatagagtggtatattatttttatttgctatggtatatcatgaaagaaggagaaaaaaaaaaattgtggaagtttatttacgttttttttttttatatatatatatatttatttgactatagaattgttgtggtatattcatattactttaagg

SEQ ID NO: 161112 - DNA, 505 bp, Cannabis sativa
ctcaaaatcaaatttcaccattaaagaccaaagtttgagttcaaactccaaacttgattaaatccaaccaacaaccactaaaacctgcttaaatccacttatctgaacacaatcaagcttaagcaaacaaaactaaacactaacagcagccatagcaacaaaaccacaagcatgcataaattttctttccttacacttcaagaaaacaaagaggaggttgcaagagctttaccttggcttggattcacttgaaacttagctggaaatcccctagagctgctgaagaaaacacaaccctagttggttctatgggtttcaaaaatgagagagagaattgagagtgaaatgaatttttccttttctttaattttcttgtgaatgaagtaatggtgtttcaacaaataataccacccattacactactaaaaatcaagttactaaatgtagctaagtccactacaggacaaaatacatatggggcaaaagggtattttgggaaattcta

SEQ ID NO: 161113 - DNA, 549 bp, Cannabis sativa
aaaaaaaatacaaaaaaaattacctagaaactgttttcttcatcaagaaatttgtttcttgatgaagaaaaaaaaaaccagtttcttggtgatttttccggcgacaatgccaatttcgacgaatttccaagactttactgtcggtactgaaaaagtcactggagtagctgccggtgtattagtcgtcagagttgctatcaacgccagaaaagtcgtcagaaaaatcaccgaaaaaatcaccaaaaaactggtttcttcatcaagaatccagaaaccagtttcttggtaattttttcggcaattatgccaattctgatgacttttccgaagtttgttgtcggtgccggaaaagtcaccggagtagctgctagtgtcagaatagtcgtcagaatttgtattgtcaacggaaaaatcattcttggtgaagaaatcgatttattggtgaagaaaccagtttcttggtgattttttcagtgatttttccagcgaaaatgccaattctgacgaatttttcggcaccggtaacaactccaacgactttttcggcac

SEQ ID NO: 161114 - DNA, 569 bp, Cannabis sativa
tagtcaagatttggtagaattagcatcttgtatttctttatggttgagtagatatattttcccctcgaaaacttctagaagaacagttcaaagcgccatgtttacgttggcctgcagactcgcttacaggaagcactttcctctaggagctgcgtatcttggaactttgtatcataacctcgattccatcattactgatgccaattcttatagtgaaaataaggaggtgataagttcaatagatgcatgtttcctccagatgttcatttgggagcgttttccaaaacttgcacctatccgcaagtcactgcaacctggagaacctcgtccttgggcatgggtaagttcgaagtgttggaaaaccttgtgtaatgttacaaaggatgtttcgaattttacatttcgcccttaccttaccaataattgcacctattttaccctcgatatgtacccggaaagtgtagtaccattgacagatgaggtccgttcttctttcactacttctgctggtgaagcaggattttggtttgttgtctgccttccccgatcactgttatgtcttcgagatg

SEQ ID NO: 161115 - DNA, 565 bp, Cannabis sativa
  modified_base (363)..(374): a, c, t, g, unknown or other
atttaattttattttaataacatgaaatttgaaaagttgttagcatcattttgaaattgatatttaggtgagttgaaaacataatttttcaaatttaatagatttaatttttgaaattaattattcaatttaatttgaaattttcaaaaataatattttaatattttaatatttttgaaattaattaaattaaataaatcctatatccaactatccaatgtattacatgtgtgtgttttatattgtttattattaaaacaagttttataaaacctattattgtttgatctaaatttccatggttaacttattgacagatataatgatctgattttaaccaatggttcaattgtcaataggtcnnnnnnnnnnnntgtaacaggtaaattttacaatattctttcatttgtgtataaacctagtaacatgataggatccatccacatcagtgtgcctatgtcagcctatatgtttgcttttatttgttgatagattttattttggcccaattagtatttgggcctattcaattaataacatgtgtttattttaaggttaaattcct

SEQ ID NO: 161116 - DNA, 538 bp, Cannabis sativa
ttggtgctttcattgagaggagaatcgcagatcgctcttttcaacattcgacaggatggtgcaaactcgtagaggcctgtctgacccagcaaactcacaaatgatggatccgacactgcaggacccaggaagttcaaggattccacccgctgtcaatcctggacagacaggaagcgtggtgaatggtgggacaactactgttactgaaactgcgcctagtgtgcaagagactgggaataacagttccgcacacagccagggcgttcataacacgactattccaccaggcatcaatgctcaaacgaccattagagacgcaactgaattgcaaaatctccgtcctgcgctcggactcatgcaaggtcatagcaatactctacatcatgatcaggaggaactgcgtgccgcagtaaacctcgcgtttgacgaacagaggcgtatgttcgccaaatggagggaaaaagagatgagacattaagggctcacaatgcagagatcgaagatcgcagttggtaagctaccgtgctaatacgaagag

SEQ ID NO: 161117 - DNA, 594 bp, Cannabis sativa
aatcaggttttattttattattttatggcagttttctgacttttttgtcttaaataaattatatttttatggtattcctaatcttaggttttaatgtatttaatattgagctaattttggttaaataattttgttaactctttatttatattaatgtctcattaacttggattgacttttgttttaaattccttatttttttattaataaatagttataatatatatttaaagacttattgctcttttatttgtcaccagatcaattttatttattataattttactttttagcaatctacgtttagaagatcttctttctattttaatgtttggtatctttgttttgtgtttaactttcaaatttattttaattttcagtattaataatcttataattaatttttttaaaagtattttagattattatagaaagttttttcgtcttgaaatttattttgatgtactaaatctatcaattatttttacaactttgatgattttaccattaaatattttagtctaaatgtgagatttttagtattaataatttactatattgattaattagaatttcctttcttatattaattag

SEQ ID NO: 161118 - DNA, 545 bp, Cannabis sativa
  modified_base (366)..(369): a, c, t, g, unknown or other
  modified_base (475)..(480): a, c, t, g, unknown or other
tgattggaaaaaatggaactttatgtggaaacttgtatataagcttgatttacatgatgttgttcctattacttctccctcttgttcttcttcttctttctcttaatgctaatgttggttctaaacgtgcaagatcagatttgaaatcttccatgctttggcacaaacatttgggccatatttctagagatagaatggagagattagtgaaagatggtgtgcttcaggatcttgatttttctgattttactgcctgtgttgattgtataaaaggaaagttgactgccaaggttagaaagagtaagtcagacagatgcccagatattagagtttattcatatagatatttgtgggccttttgttccnnnngctatgggtggttataaatactttatcaccttcattgatgaattttctcgatatggccatgttgaactcattcgttaaaaatttgaatctttagatgctttcaagnnnnnnaagacgaatgttgagcttcaaaagggaaagaagattaaagttgtcaattctgatagaggtggaga

SEQ ID NO: 161119 - DNA, 574 bp, Cannabis sativa
taaactctgaaccagactcatatccattaaactccttcctcataccatgcacaaaaagctcaacacacatattctttcgaacaagattcatattcaaaaatttgaggatatggttgatcatttcatgtataaaagattcaacatacttttcaacgaatataccacaatcactataaaaaaaaatacaaaaacaacacacatttcatatcattgtaaactatataattaataaatatatataaaaagtaaacaacatagttaccactgatcttgttgtgacagtttatccacaaacacaacttccaaagaatctgtctcacttactctctgaaaatactttgtgttcttgtcaatatccgacctccgaccatagaagttcacatgagatagcaaaatagacaaaagaacagcaaaaactttcacaaaactagtgttctcactccggcaaaaatattattattaggaaagaaaatcattttaccctaaacatgattctcaggtttattaaaatatttctcccactcctataaaaacataaaaaacaacacaacaatataaaatattataaactatc

SEQ ID NO: 161120 - DNA, 501 bp, Cannabis sativa
attcaatatcatgggtaggataccactgttcatactctttcaattgcctggatgcataagcaatcactttccttgattgcataagaacacagcccaacccctgtttagatgcatcacaataaatcacaaacttttcatcacttaccggtaaggttaaaacaggagcagtaatcaacctttgtttcagttcccagaaactactttcacacttatcagttcaaacaaacttgcaactctttcgagtcaattctgttaagggcacagaaatcttagcaaagccctcaacaaatcttctataataccctgtcgatcctaggaaacttctaacttcaattactgacttaggtcgaggccagtctcatcccgcttcaatctttaccagatcaactagaataccatttttacttaccacatgccccaagaaactcacttaaggcaaccagaattcgtatttcttgaacttggcatacaacttatgctcccggagatgttgtaacacca

SEQ ID NO: 161121 - DNA, 527 bp, Cannabis sativa
  modified_base (305)..(310): a, c, t, g, unknown or other
ctcagttagcagaggatatggtcaaattaagcatcgagttttttgtaggcaaacttcataacttgacgctgcagtcagatctgttagaacgtattaaagtagctaagctaactgatccagagctaataaaagtcagagaagaggttttaactggtcaagctaaagactttacagtgtcagatagtggaatgttgttgtttaagaccagggtctgtgttcctaatagtatggaacttagaaatgaaattcttgaagaggctcatactacttcatcttccttgcaacccggcaccaccaagatgtannnnnntcttaaaccctacttctggtggaatggaatgaaaaagaatgtggtagatttcgtatcgagatgcctaacttgtcaccagattaaggctgaacatcagaaaccagcaggactgttgcagcctttagctttacctgagtggaaatgggaggatatcacaatggactttgtggttggattacctagaaccacaggattatttgattcaatttgggttgtg

SEQ ID NO: 161122 - DNA, 542 bp, Cannabis sativa
cctcccaaagtgcaccaactcatgtggcgtgctttatctggttgtttggctactaatgttcaacttactaccaaacatattcctcttgaccaaatctgtcatatgtgtaaccaggtgcctgagactattttccatttgttggtgcaatgctcttttgcacggtcttgttggcatctttcggttataaattggagtcacacgcctatggagtctttttgggattggtttagccacattctgctacaacactcaaccacgacccaggaagaattactcatggttctttgggcgatttggtttgcccgaaatgaggtggtttggcgggacaaatcaatgtcagcggcggaggttattctgttggtaagagtagtccttaatcaatggagaaatgctcaacaaaggagaatggagtctttacttgttcctacgggttcaagcatggacttagagcattgcatgaaaccggttatggaaaagattaaggttaatgtcgatggtgcaatctttgcaagtgatggtcgatttggagcggcaggggtggc

SEQ ID NO: 161123 - DNA, 542 bp, Cannabis sativa
ttaaatgtagatatttcaaaaaaatttaatattgaaaattagattaaagttgaaaattaaattgttaattaattttagatcaacgtaaatcaagtaattttcattattggtttattaaaataaatagactaaataatattatatttaattagaaaattagtaattagtttatgaattatctagatagatattttctaggtagactttttggtatttttctagatatgtttaattatataagaaaattaatatttaagttgattatgttctagacacttaaatatttgatatttttcttaagagatttaattaaataagaaaattatattgatgttgaaaattaatttatttagttttagacaaacataaattagaataatttttccagttttattttttttattttaatgaagaatttcgaaatgtattttgtttaatacactagatttcgaattctttcatatgtataattatagaaaattaaatttgagttaaaaagtaattatttaattaattggggaccaacttaaattaagtaattt

SEQ ID NO: 161124 - DNA, 559 bp, Cannabis sativa
  modified_base (524)..(528): a, c, t, g, unknown or other
ttgtacaattatgaaaaaagccctcgttgtggtatatgatcattatttttctcagtttgctcagctaagccttgattgctattattttttctatgaggaatttcatgtcccatctacaatttcttaagttctttcaaggaagctctagctagccaagtgaatttttcaggatcgtttgaacttttatttttcccaactaaaaaagctacctcttttagatgcaatggtaagtttaataaagatagctttattcatatcggtcattgtcatatataatctatattatatacaacacattcacttagatgtcacactgcatcagtaattcgaatcgagattacttgtaccaaataacggacatcaatgaaccatactagcaatcattgattaaagattccaaaactttaatatgttgatgattattttattcatggttaagtgatcttagttctctgtgcaactacaagtcacatcatcatctttgaattaggaattttctgatatatataaattattcaatattnnnnnttaataatttaacattcatgcatatatcaaa

SEQ ID NO: 161125 - DNA, 556 bp, Cannabis sativa
ccgaccgacgtacacccctagtaacaatattacaaaaatacttccacctggccaaataaacaaatatacatcccaactaaaaaaattacacaaataccacttacacacacctttcacccagtatctatccttcctgggaaactatcacgcaaccatcgcgcaaccatcttgcaactacgcagcaacccaacgcaactgaaacgaaaattcaatcagaaagagaaccaccattaattctggcgacttcacttgagaagacaaccagaatcaatgaaaatagaggatgtttcaaattcataaaaaaaaaagtgcagaaaaactactatgaaactaaaattcaacttgaaatcaagtttaattgcataaaactaatgtcctgacttcaatttttagatccataaaaggcaaatctcaaaaagtttaattgaagttcccaaacaatccaactcaagtataatccaaaaaaaaaatgcatcaatactatagtaaaatatttatcctggtgtattttgttgttttctaaatttctaatggtgaatttgttcatattaaatta

SEQ ID NO: 161126 - DNA, 548 bp, Cannabis sativa
  modified_base (182)..(185): a, c, t, g, unknown or other
attgttaagaatgtcataattgtgatataaacctataatatacacattgttattcaaatgttttatgttataaatgattttttttgtatagagtttcaatttttattgatgattgttatttagggtgagtatcggtgtagtttttttttaaaaaaaaaaattaaaaaaagattgtttaattnnnntgggtttaattattgggtttaaaggtttaaataaagattgtttaattttttgggtttaaaaaaaaaatcgtgtaagcctaatctgttaagtgtaacaatattaatattaatattttttgggtttaattattgggtttaattgtttaaaaaaagattgtttaattttttggattttaaaaaaaaaaaaatcgtgtaagcctaatgtgttaagctaatcgtgtaacaatattaatattaataatttttgagtttgatcatttttgagtttaatcattgggtttaaacgttaaaaaaaagattgtttaattttttgggtttaattatttatatatttttgaaagttaatgggaggatcaaacctac

SEQ ID NO: 161127 - DNA, 545 bp, Cannabis sativa
acccaccatttggaatagcgattgataccctcgcaattcaacccacagcatataaaaatcctaaaagatctagccgacaatcaaaagtaagcaaattttgtcaatacacgagtattcgaaattgttcatctgaatacccgcgagtattcgagttgttcatctgaacacccgcgagtattcaaggcgtgaaacagtgcctattcaagtatatcgtatgcggttatgtcaacttacaggtcatattctatgaaattacccgtttttacctaaaaaacatagcctcatgcatatcatctataaacattcatccttaaacaaccctcatgcacactaaaaacccagaaaatataatccccattcaaacagaaaacgaagcatggtgaagatttgaaaactaaccttttactttgataaatctgcttccaaaaaatcgcccttgacatcaatgtagaatcaagaagaatccacgaataaaggcgaaaatctgggcaatttacgaagatttttcttagtgttttctctgagaatgaaggaacaaagaagtt

SEQ ID NO: 161128 - DNA, 602 bp, Cannabis sativa
gaaaaggctttaagagccgagggtgcgctgaaatttcttcaggagccccgagtgactccgagtgtcggtggaacccccactttttctactgctgtctgtggtagggatggtgctgactccaccactgatcagaaaaggaaagttaccccagcttctggtggttcgggacaaagtaagcggtttcgtggaaaccaacgcaaaggtggacgccagggttactcctaccctgagtgttctcgttgcatgaaacatcacccgggagagtgcaaccggaagacatgctttctctgtggcatggtggggaatttcaagaaagattgccctcaggcaaagaaggaggagctgaaagttgaggtaaaaccggttcctgctcgagtgttcgctattacccaagctgatgctgcagctagtccttctattgtgacaagtcagcttcctgtcaacaactccttgtttacagtattatttgattcgggagctacacgctcatatgtagctacaagaataattgagcttttgggtaacccttgtgatattttagaaagagggtttggaaccctaatgcctagcggggaattggttatctctaataggcgcattag

SEQ ID NO: 161129 - DNA, 592 bp, Cannabis sativa
attcccattcacatttccattcccattcccattccctagcccattccaatttctattcccattcccattgccattctcgttgctattcacattcccattcctattcccattccttgacccattcccattcccattccaattcccattcccatccccattccaaatcccattcccattcccatcaccattcccattccctggcccattcgcattcccattccctttgcattcccattccccgatccactcctattcccattcccattcccagcccattcccattcctattcctatttgcattcgcaatcctattcccattcccattcccattcccattcacatttcgattcccattccctagcccattcccatttatattcccattcccattccaattctcattgctattcatattcccattcccattcccattcccttgcccattcccattccaattcccattcccatccccattctctatcccattccaattatggcacgtttactatacagtattcagaatcggaataaattaaaggagaaatgtaacggaataaatgaaaaataatcggaatcaatatttgtaatatgt

SEQ ID NO: 161130 - DNA, 655 bp, Cannabis sativa
tgagctcattcagcccgtccagcaccagatttcttcttcctcttcctcactggcttaggaattaaatcctttggatagagcccgtacttcacaaaattatccttggaagtcaaccgaattatattccggtctttccccggaagtcgagcaagcttttgagctctatccctaagagcaagagtgaggggaggcatccttaaagtattgatgcaaaggcatcaacgccccttgttgggcatgagcgcccaaccaaacgcacatcccccttttagggtttgtggctcgattgttgtgggcaggaatgtagcagtccaactcgcccaggtagccatcctggtcgagagtccgcaggcgcacctcagtaaccctggatggaggactcacccacctggcgcccaaggcactttgcctcctatgaggaaccgcagcattaagttcctcactgacgtagtccacgccctcgatcaggacgtcaccgtcagcatggattggctccccagcctcattgtattccccgtagtttgggggttcaacctcctcctcttcctccgcctcagaggaactgccaggacgaatgtcgtcctgcccctcaatctcctggacctcggcgtccccatcataatccacctctacctggacggctggatcctgttcg

SEQ ID NO: 161131 - DNA, 542 bp, Cannabis sativa
tgcattagattttctgtaggataattggtaaatgataaaaaaacataatagagaaaatatgaataaaataataatcaccttctcattaataaaaatcatatcaagacttatcaaatttatgctccaattatctatattagtgtagttggtaagaaaagaatactcaaatcgataagaaaagaatactctaatatgagagaagaaggaagaaggtaagtgaattatgaatttaagagaaataatttaggatataaatatagatatatatatatatatatataaagaatttagtaaattttaaaaaaaaaaaaaaaagccaaaaaaattattattcttaaaaaatttattattattttttaaaaaagataaggcaaaccaactatttatcaaaatgaaataccaagcaaaatgagatatttattaaaaactatcattaattttgattttttttttttttaaaagaaaaaagaaaaagaagaaaaaatcaatggagcaaagcaaaacgtgatattcattaaaaaaaatatcattaattttaattt

SEQ ID NO: 161132 - DNA, 608 bp, Cannabis sativa
ctcaaaattataaatttggactcttttcttgatgtctattaaaacatgataaagatcattcaaaatagaggaagttagacaattttatatgaaataattatgctatatttattaagcgaaatatttttaatatgtatgtagatttaaattaatatattgtttctgcacaaataaattaaagatattgcctatggtttatcacgagtttggcctaacaaaatataatgatatttcgagtttgattttggtcaaaattttaaattataatctaatcttcacattttatctttcacaactctaaggattgtagctggatttctaatataatcttaaccctaatactttttttaactaaaatcaaacttaaaattattatattttatcgaacagaagacttatagtaatttttaaaaattacatgctcaaaataatatatttccttttgttataaaatatatacataaaaattttactaagtatggggtaagtaattaattattattattattaattaggatttttaccctcgaactgtgacatatactagatcatatgctccttgaacttttaagatcgttaaaaatgctccctaaactattgagattgtt

SEQ ID NO: 161133 - DNA, 544 bp, Cannabis sativa
tgtggacgatcctaactattttgccatgccaccccgcttcaacccctatgatcagccacctccgccaaaccccttctaaggggctcaggtaagtttgtctcatcctggtttattgtcacacattggggacaatgtgcatctttagttttgggggagagacttaattttttttcagtttatttcagtcttttcgttttgttttagttagttagtttttgttagtgtcgtgtgttgatagctaagttggaagattgattgaaccactattattcacttgtgcaatggattaaaatcttaactgtgtgcttgactcataactgtttgaattaaggtggatgtgtattagaaggttgttcatgtagatggaaaacatttgtttttgacgcatatcacttgtgttctttttggattgtggaatgattgacttgacatggaatagaatttgtttgacatactcttttgaagcgaaatccttgacgcttgttgtttggaaaatgatttaggcaagttttctttggatcgattgagcctctcgagcctaccc

SEQ ID NO: 161134 - DNA, 625 bp, Cannabis sativa
ggaaagccacataatcattaacatcaagatcataaaccaaacccggattgagagctttgttgggatcaacatgtcctgctccatgaatgaaaggtgttgatttttcccctgatgcaagatcatcaaaagtctcaccagaattgtccaagttgtaagctgttgtcatcagagcagattttatagcagccggtgaccaatcagggtaagcctttcgaagcagagctgcaagcccactaacatgtgggcaagacattgaagtacctgagattatattgaactcaacacgccttggatcaatatccaaatctgttggaccaaccgagccagtccatccagctaaaatgttgaccccaggtgctataacatccggttttaggatttctggggtgagagaactcggaccacggctcgagaaagcagctacctttggagcagcaggggatgacccaattacagtcccccggaacagaatagtagccgtgggatcatcacttgatttaatatactgtttgattttatcaccattaatctgaccaaccatggtcgctggtataagatgagaatcagctatgagctcttcgccactgtcttctgtattagttaacaccaaagcaagaccacctgc

SEQ ID NO: 161135 - DNA, 592 bp, Cannabis sativa
  modified_base (342)..(350): a, c, t, g, unknown or other
tcctccaagacggctttcccctttccttctacatgggtggatggccgagcaggtagaccgggctccctgatatggatggtatgttcgattagcctttgctcggtcgtgagggttttcttcctttggagtggcctctcttgctctgaatattcctgagcctcatcctcctactcagaatattcttgagcacattgtttggctccagctcctcccttcaacttagcctcacgcttaagttgaataagctccttctcctgctcagaatattcctgagcatgctgcttggctcctgcatctcccttcaacttatcctcacgcttcagttgaatgagctccttctcnnnnnnnnntccctcagcccggccagcactggactttttcttcctccccttcacaggctgaggaatgaaatctgctggataaagcccgtactccataaagttggcctccgaggttaacaaagtgatcccccgagcagcatccggtagttgtacaatcgtctgagctctgtccctatgagccagtgtaaggggtggacggtaatatattgggatttgttgaaaccgaatataagtggtgtccatgccttcca

SEQ ID NO: 161136 - DNA, 503 bp, Cannabis sativa
actttcccagaatctcgatgtaaactttagatctctatccgaaataatggactttgggacaccatgaagacgtacgatttctctgacatataactcaggatacgggtcaatggagaaattcgtccgaacaggtaaaaagtgcactaactttgtaaacctgtccactatgacccacacagagtcaaactatcccgtggttctaggaaaacctaccacgaagtccatagcaatgtctttccatttccactctggtatgttcaatggctgcagcaaccctgagggcctctaatgctcagccttcacttgctgacagataagacacttagcaacatactcagggatgtcatttttcatgcctggcaaccaaaacatggctttcaggtcttggtacacctttattgaccctggatgaactaagtaaggagtcgtatgagactcttccttgatctcccttttaataccatcatccataggcacacaaacacgatctccaaatcgtaaca

SEQ ID NO: 161137 - DNA, 540 bp, Cannabis sativa
  modified_base (158)..(163): a, c, t, g, unknown or other
tttttatattatttttttttcatgatgatgttgatgaaactgttttttttttatttgttgtttttaataaaataattagtttttaacaaaaaaaataaatagtagtttaatagaaaaaacaagtttaatttctgtaaaaaaaatgagatacaaaaatnnnnnntaattgtatatatttatatatatacaaagagaagaaaaaaatagtttgagaaaaaaattaaaaaaaaaaaaagagacacaaagagaaattagaaaaaataaaataaaagagaaaattagagagagagataagagaaagaaagaaaaaaaaaagtcagaactgacttaaaaatgaaaagaaaaaagagagccaaaattaactaaaaaatatataaaaaagacaaaaaaaaaagctttttaaaactttaataagtaaaaaacactaaaaaagaaaaaaaaaaattaagaaaagtgtaaatgtaaaaatatctttgtaaaactataaaagtaatgtttgaaaaaaaaagttagtatttggtgtaaatttttcaaataaaa

SEQ ID NO: 161138 - DNA, 529 bp, Cannabis sativa
attttacccctagctttagaattccttagtttttgggttaagggtattttggacatttggttaaatagtgggatagttggctgccctagcttggtgtcaccttgcaacctttttctgggccaaagattaagtaattaattttatgtagctaaaaagaaagaggaattagaaggaaaaatacaaaattcaaaggagaagctctctttcttctctctctctcttcgaaacaagcaagaacaaggagaagggctgctgatttctggtgttttcagcaaagaaaccttgggagattcaagttaaggtaagccctagtgaaacccttctttagtttttaagtttttgcttagtttgaacttgtgaaattgtaatatgggggctgttagggtttgatgtttgtttagttcgagttctagggttagtttgtattgattttagttcatagaaacttgttttgaggtttattgttggttttatgcaactttgagttttgagttcaaagctttgagctttaatggcaacttgagtttta

SEQ ID NO: 161139 - DNA, 513 bp, Cannabis sativa
tgaaaaaaaaaattagcctaaaaaattcttctggatgctgaaacaagtctagggtgtatcaatacatcccttttaagggggtgcattgtagaatcaccaaaagttatctaaaaaaagttattatagttgtacgttaggaaaaatgtatttttttttattacataaattaaatttgttatttataataattattactgtatttgggtgtattaatttttctctaacaaatttagtattatttatctttattattatagatatatgtaagctcccaaatgtcatttgtttcacatctactctcaaccatttcgttgggctttatttttttggcctttacttatttgggctttatctttggtgaccaatttcttcttacaagtaatggaaaaaaatttgtatccaaggagggcatataattttataaaatttattttttattttttattaaaatacaagagagtgagaaaatatacattaatagtattctttttgagttggcggtatttttttttt

SEQ ID NO: 161140 - DNA, 549 bp, Cannabis sativa
ttcgctcttgttgcttctcagaagattccttgtacaccggctctctttgaagacttgcgttctctagaatcagcttgtgttctcgcagcttggcagacgtatacaataatcgccagtcgcgatcttgtacaggaaggctcctgagaacttcagttgtctctctgcgagtcgcgtcgagtgtaggtcgagctggtctatctgcgaaaataaaaagagcgagttagcatgaaatctcaaaataactcaaaaaataactaagtcaggaaacatgcgacatactaggtcgacggttaaagtcagtcctaatcccagggactttgaatatataaaaccacttcaatttccaatctcccataattgaaaccatgccttctaccccattaatctcagaggtggcccacttgttgaagcaatagaaaccgttgtggaggcctatactctttatatcgtagaagtaattaaactcttctactgtgggtgccctatgtacatactccatatacatcgcatagaaggctagggctatgcgatagctgttgggagttaatt

SEQ ID NO: 161141 - DNA, 740 bp, Cannabis sativa
gaagctccgggcgatccatggcctggaaaccggaggagaagaagaagcggtgacgatactccttcacgtgcttctgttggttaacatggattgggccctcattcaaaggatgggcccgaaggccataaaaaccgtccttaagtttatctccctttttgagaatagaaacgagttcataaaaatacaaaatttctgccggactgggagagccccagctccgggcagcatagaaaataaaaaggcctaaaagcaggcggtaagcttggggaatgagttagtatggcgcaaggccgacaaatagaaggaaattaataaagtagtcttggagagggagcatagccccgaccatcaaatgtgtctggctccaggctccgaagcccccataattatggttgggcgtctcctcgtcccgtggcagccggtgataggtctcggaggtcgaaggcttgatgcttgccaccaccacgatcttctccagctggtgggcgaatgtcaaagtagaatggagctcagtcgcttcccacccgttggcacgggacttatacccttcttgggccacgggaccgcgcatgacctcctccagggtggccaaacgcgcttcccctttccttaaagacttggaaccgaacgcggaggtagacattgtttagttctgaaaaagattgaaaaaatccagcagttgggccccaaaccaaaccctaattcaaaaagggaaagggggtcccctaatcgctggaaag

SEQ ID NO: 161142 - DNA, 779 bp, Cannabis sativa
tgatgggccggttagaacaacccggcccaaagaaaatgaaattgaaggtcctaagagactatctaaggggtattacaatttctttttaattcttttttctctttttggtgggactaatgggagtttttagatgttgttaactaagttctgggtagtttttaattttgtgaatatttgaagtaacatgttctgcactctgttttcaatttgttttaggtactttagttaacacagatgttgaaattattgttgatgatgataataatatgtatcaatgtggatggttcttgccttttcaatttataaataaaaatttacactcgtttcaaagtggtttatatgatttgcaggtgtaattcatgttcattatactcaaacgctacagttttatcccactaaaaaattttctctttgaaccaaatccaaaatgcaaactttttcaatttcacttcttgcaattctcctcctcctctgatcagtcatggtccatacctggtaagcccttgatcataccatttgaatatattatagtaatggcattatattccccctctcactcgtaatatttatattttataaaattaacatatatatttattatatatatagtaattgcagttagagttcaaactgacagagctatcatctttgtaagtttaagttatatgcgttctttttgtttataaaatttctattgtccaattcaatcttattattattctatacttatcattctaattttttaatttacgtgatattatttatatttattcttctaa

SEQ ID NO: 161143 - DNA, 525 bp, Cannabis sativa
tgacttgggagccagcattaatttaatgcctctgtctgtttttagaagattgcagttgggagaagcaaagccaaccacggtaactctacaattggcggaccaatcagtagctcatcctagaggagtcattgaggatgtgttagtcaaagttgacaagttcatctttccagttgactttattgttctggatatggaggaagatagcaatgtcccaatcatacttgggaacccattcttggcaactggccaagctttgatcgatgttcagaagggtgaattaaagctgagagtccgaggagaagaagtggtttttaatgtgttaaaggcgatgacttacccgaaggcaagtgataactgttactttgttgatttgattgatacgattgtgagtgagaagaagttgatggatgacccattagaattaatcttaattgaagatgatttgacagagctagaggaaaaagaagcaatgggatatgttaaatggcttgattcctatgcgccattaaacagaaagtactatga

SEQ ID NO: 161144 - DNA, 606 bp, Cannabis sativa
  modified_base (312)..(322): a, c, t, g, unknown or other
aaaattcaaattttggtagacttttgtgtagaatctaaattttcaattaaaaatctaattatcagaataaaattaatttttaattagttaaaattatagttttagatgttagtaggctttgaattttgaaaatttgatttttcacaaaaatagccttatggttaatattgaaattttgattactttatttattttaattataagattagatattacataattttattattaaaatatatttttttttaataatcaattttgaatttcaaaatttgctaaccatatcactttttcaaatttgttatttttgannnnnnnnnnnttaaattaaattataagatttgaaaatttttagttttaacattttatcttattagatatttttaattaaaattaattttggcaaaaataacatgaaattttgaaaattggttagtctaggtttgaatagaaattttaagatttctaaccataaaattttcaaacttattttttttataaaattggtgatatcctaaccataaaatatcttattttttaaattgtttatttttttttttcatatttgatttattaaattataagattaagaatataatattagga

SEQ ID NO: 161145 - DNA, 620 bp, Cannabis sativa
taaactatcacatgcataaagtttattaggggtttccattgcttgtcctttcttccgatgtcaagtagttaatttcctactttacgtgcgagcaacttatcgccccttcctcaatctacgagccattatcgattccatctcgcgatcatcgaaaatgatcttattttaagcacatcgaaatatatttttaatgaacttgtcatcttgtatatattttcattgcttacatgagtagttaaattttctacccacgtgttgggtttaagtattttttcaagacattttgatgtctcgtttaatattttcccttagcgcgagccgttagtattcagctttatgcgctagtcataacttttgattttcatttctcgtcagataggttataaatcaaaaattatagttgtttgatccctttctcgtcagaaaggtttgatcaaggtgtcataacgattcgattcctcttccgtcgaaaaggtttggtcagggagttataacaatttgacccctcttttgtcataaaggtttggtcgacgccccttttttttcttgaaatgatgggtttacattgtactatgtattttcagatcaattccggttaatcatacatatatgcccctcaa

SEQ ID NO: 161146 - DNA, 636 bp, Cannabis sativa
agagagcagccaaacgattttatctcttctagtctcatattttcatatctttctttgtgagaagagtgttttatttgtaaaaacctagagtgttcaaccaagttttggtttgcttattatgatcttatactattcatagaataggttgaagagaagctttgaacaagtgtgggtctttgggagaagatttttgaagtctcatttcgggagaaagtgagcatatatctttgggagaatatttgcttaagccttacttcgggaggaagtaagcacacatcaatagttgaagggagttcactacttggtgtgtttcagagatcagattagcaaggtggattacaaaagggtcgcgacaaatcactagagggagtctgaatttgtttaagtcaattgcttttgtaatctttgatactttactaattgatttcattctctgggcgtggtcccgtagactagtagtatttgaaagaagactggtaccacgtacaattttctggtgtcaagtttttaaattctacattatttatttcttgttgtgttggtcactaatagaagaatgacacatcatctattcactaatccttctcaactaactataactgttttacctaactgtctgttatgacagttaggatc

SEQ ID NO: 161147 - DNA, 573 bp, Cannabis sativa
  modified_base (379)..(390): a, c, t, g, unknown or other
tttatcatttttttaatgccaaataattcaaacctaaacctagatggattcctataaatagatagtgatggactcaaattgaaggatgatgaaaacctaagtcacatcagccttcagtcaaattttgagccttctatctctctcatatttgaatccttctctctctctttctctcttcaattttcgaaccctatagtgatagagtacgtgcccaaacatagcaagttggtactcaatcatagtgtgtaagattgtgaagaatccagttcaactgaaggagaatcaggctcagatcttggtgatactctgttaccaaaaggatacaagggttagagatttgagtagaaggagtcattttctgctgcaaccaatgtaaggnnnnnnnnnnnntatatgtgtttaaattacattgttttagaaattcatatttagggtgttaaataagatatacggtagtaaatatagatcctgatataataatccccaaaaactggtatcagagccaggttaatgatctactttcatgaaatatagatttaaaacgatgtttgtactgatttggatggtttcatg

SEQ ID NO: 161148 - DNA, 759 bp, Cannabis sativa
agcatgccatcccccaagaagcacaaagacgtgcagagcctaaccggaaaggttgctgccctgggccgtttattcccggtctacagagaagtgcattcccttcttcaacattttaaagaagtgccaaaagtttgaatggtcggacgagtgtgaggaggcattcaaaaaattaaaggagcacatggccaagcctccaatcctgtcaaaacccgttctcggagaagacctattcctgtacttggctgtctccgagcacgcggtaagtgcagccttagtccgggaagaagagaaaactcaacatcccgtgtactacgtcagcaagcgcatgataggggcggagacgcggtaccccgtcatcgaaaaaatagttttctgcctcctaatggcctcaaggaaattgaggccttatttccaagcacacccgatcaaggtcttgaccaatcatccactccggcaggtcttgcaaaagccagagacgtccggaaggctcctcaaatgggcgatggagttaagtcaattcgacttgcactacatcccctgcatctccataaagggacaagcgttggcagacttcatcacagaatgtaatgaagccgaggcaaccgcgaatgcgccggtgccatcggtccccacatggaaagtatttgtggacggagcctccaatgaaaatagatccagagcgggggttgccatgatatccccaagcggacttcgactccaggcagccctacggttcgacttttcagcttcaaataacga

SEQ ID NO: 161149 - DNA, 520 bp, Cannabis sativa
aaatcattaatgaaaattttacttcatttaagttgaactaaaattaaactaaaaattaatttttaactttaatctatttttttaaaaaaaaaaaaaaaccaaaaatatatgcattaaataatacatttgaaaatttagtgggaaatgattaataaaataaaataaaatatattttgaaaattactctaatttaagttgttttgaaattaaaatttccaacataaatataattttctatctaattaaatgtcgttgaaaataactaatatttaagtgtctacaataaaatcaacttaaatatttaattttctatttaattaaatataagaaacaaataattaagtatctataataaaatcaacttaattattaattataatttaatatctaagaaaatattctaatttagaatgatctaaaattaattaaaataattaatttttaacttaaatatatttttctaactaattaaatattataaaatataattagttactagaaagtactatctagaatatat

SEQ ID NO: 161150 - DNA, 533 bp, Cannabis sativa
atgccatgaatatattttatgaatgtgaaatcaggggctaaccctatttgtgaaaatctcagattatgtgactaggattactggcacctggtcagaagcacctggggctttggaatctgtgcctttgcgaaacaacaggtaagatagtagttagcacgtagagtatgcgcgatggtgcttatattgagattaatatatgtgagtaattgtaaccgagattagggttattaccctaatatgagctgttaatagcctagggttattaccctagtgatataagttgaataaatgatatgccatggtaagtgtatgattatattgagatttaaggattatgcgaacaagacgtaatcaggttggactcggtaatcagaaccgagaagaaccattataaggctttattgtaaatagacatgtgagagcaccacgtagctttacgccacgtaaacataaataggcatgtgagcgcaacatgcaggtctgtgtcacacagacagatttgaatggcattattgtttatattatatgatgag

SEQ ID NO: 161151 - DNA, 506 bp, Cannabis sativa
ttgtggagattgctggtcttccatctcagcagaaaaagtgagttgttgtttttaagtttattttatgttgtattatagttgtttaactattttttttccttttctggtcattagtgattgcggagcatttgtggctgcatttgccgagttcttcatccatggaaaagatgttcctgctaattttgccattgaagtttatcgtactcgacttgctgccctcttcttctcgtacggtaaaaggaaaaatgatgaaagtattgatagcgaggatgagaagcaaaacaagtcttccaagacttctaaattgaaaaagtagggtcttttttttagcgaaaatttgttgttattggttgattttcttttcagacaattgttattttttttttatgtttgtaggtattatatttggtttatattctagatctggttataaacttttaggatatttgacattaaccattataaaatgttatttttttatgttttgtatcagcatcagttttatg

SEQ ID NO: 161152 - DNA, 533 bp, Cannabis sativa
gttgttaaatcaacatacttgtaagtagatctaagttcctggtaaaataacttccaacaataaacacttgaggtcacacaagaatataacgaccgagtttattaatctaaagtgctagtataagtgtttctcctcagagcacaaaaatcaaaaggaaaagaaaagcatcatcaattacagaaagctctttagaagcaggacgttgcatccaaaagagattttctagttcatggaagaaaaccctctgagagtgggatgctaccccagttgtggtattctttcagtggctaaactcctcctaagtatgggatgttgcacatgtttagtctaatttgtctttttttatttttcctcccttaaagttttttctttaacaaggttctatgagttgaaatcatcaaaccaggttcttcaaaaacctattatttcacccctatacaaaagatctggcaggttttttcgcactacagtctgatagtgattcatcttactcatgatcataaagtgaactcatgcttgagcaccaagcacac

SEQ ID NO: 161153 - DNA, 595 bp, Cannabis sativa
atcgacactttatgctgttaatttctatgtgatatatcgactccatgttgacacaatgtcgataatattctgtgatgttgtattgggttgattttattagaatgtccacagcatatcgatggtatgtcgatatgatgtcgaacaaattatgttcttgcttactgtttgataatgtcgacagaatatcgacaagatgtcgatattttgtcgaccatttttttaaattttttgacattaacatttttttggtttttagtttttcagatggttcccagactcataattctaacatcggagcattttactggccgcgtgacatacagaggcaccagaacttttgcgaaaatcaagtctcggtttgaggagtacaacttgaataacacgacgaaggaaagccgttttggcaacttttggaatgccgtacccctgacattctccttggtgttatttcaccagctgatgctccacaaaatgaagattgatgctcaggaggaattgaggatgcagttttacattggtcggaatgctcgggtgctggaattatgagtctaggagccatctgaaaaaataaataacaaatcaatattactgccaa

SEQ ID NO: 161154 - DNA, 598 bp, Cannabis sativa
gatgagctagtgatcgatcagccaatggcaaggttactgtagttggctttgcctctcccaactgcaatcttttaaaaactaacagaggcatttagttaatgctggctcctaagtcacacaatgcatttattccttctattctcccaatggtgcaagaaatggtgaaactcccaggatctctgagtttgggaaggagtttcttctgcaatatggcgctacaaccctcgatcaatgccactatttcatagtcttccatttttcttttcttcgacaagatctccttcataaacttcacatagctaggaatttgttccaaggcttcggcaaaaggaatgttgatgtgtaaccttttaaagacctctagaaatttcgaaaactgcttgtccagattagtctttcggagtctctgcgggtacgggatctttacatggtgatctatactgattggtggagatgcttgttttggtgcaggactttcagtagtcttcttttctgttgctatcggtgcaggttgatcctgagtctcttcttccactggttgtcccccatcaggcccttcatacttcttcccgcttctcagggtaattgccttgcagtt

SEQ ID NO: 161155 - DNA, 554 bp, Cannabis sativa
  modified_base (276)..(278): a, c, t, g, unknown or other
ctctccataaaggtgatgtcgtcgcattccctcttaaatagtttctcgggccgctcactaagattgttgacattggtgaacgacttttctttggcttccctgacataccgctcttgtgacttgcgagagtctcctgcaatatggggtcctccaatgatagttaagatgttgcgaggcgttctagaaccactcgcattttggttttctcctttgtcatctgcttggggatgactttcctcgcccttcttatacttgtcgaactttcctctccgaatnnnctcctcgatttcatcctgaaagaccaaacattctaaggtagtatgaccaatgtctttgttgtacttacagaattttttggggtctcttctgtcgcgacttcccctgatggggggtggcttcttgaagactccatttctgtcttcgattgcatagatatgctctcggggtactgcgagttcagcataattgacgaaacgaggtccgcccttcctcttcggcgaggattccttcttgggaggagacttggccaacttcggacttcgctgtctccgcgg

SEQ ID NO: 161156 - DNA, 555 bp, Cannabis sativa
gaaggggagaaggatggagctatatctcaacagaaggtaggggacttgagaggccgagaggaagttaaagaatcatgtcatggagctttgatggctggggtagtgagtgtgggagaggctgaggagagttgggaaacaccaaaaagagctcatcttctcaagactaagcaagtggttagggaacatggagaacatcataaagctaagaatactttcgaaatgttgcaaaatagggagagtgggacacagggagatgggtctttggttcattttttatgaattgctgcaatgttatgtgttggaatgttagaggcctcaataaagagaagaaacaagaggctgtgcttaaagtttgtaaaaaaaaaaggaaattggggttggagctttggttgagactaagctgaaaagtgagaaggttcaagaaatgatgtgtaaaactttttatggttgggagagctataatagcccaacaatagagggaagattgttaataatttggaagaagacgtttgctagagtgatagttattgcagaaactagccaatttgtccattg

SEQ ID NO: 161157 - DNA, 783 bp, Cannabis sativa
ttttttttttttttaatttcagtattaatttaattagctttcttgtggaattgatattcgtcttccttgtacgtaattaaataataaatagagagagagagatcaagagatcattatgaagcctagcatgatgactaataatattatcttatatttttttttatcataattaaagatcgatattattgttattggttcatatgtattcatatatgtacagtatgcacttgcacttttatttaaggaacaataagaataaatagtattctacataacctgatgatgacgtggcattaattatatacatagacgtagtaatcgtatatcaatcatgattaattctagaagcggctgtttttcagtgttaatttgtagaatataatataacatacaaagcgcagcctccctcggagacctctatcgttatgttttaacaaatcaatgaaaacgtgttccaacttattaataattggcaaatggaataagtaaggcttacttagggaccccaaaaacaaaaattaatattaagtaattaatgttagtgaaagtggcttcctcatttgaagcactaacggccgcaaccattgaagccactgtcttgattaatagtttggtcttgagtagacgaactggtcaattcaatgactaatacactagttttgaaacttatctctctttttaatacactagtgaaataatacatgcttcacaaaaaaaaaaaattataaaatacaatattttatatttattataaaataatataatataatataaagtagatga

SEQ ID NO: 161158 - DNA, 1293 bp, Cannabis sativa
ttttttttttttttaaatttttgggtttgaaatggctgttttttaagtttttcaattctctttttcaatttgttcaaaggaaagtcgtgtaaatttaatttccttatattccatggaaacttttaaagcaatgtggtgaggtccaggctttaaagtttgctgttgtttccttgacatctgctgtcaattcacgttctcatgtcacttgcatgtgtagttattatcagtcatgagactaacatggtttctcctacacttgaggttgggatgtttattatgtaacagaaagaacgttgcttaatacttcatatttacaagcaaaatgtgtacacacattctatagctattttatttcctgtggcaatttttgtattggtgttgctcttacctgctagtgtattgatatattttatattctagcaattttagtttctttgaaatttgggagtcatggttgttttcggttatgagatgtgtaggtattcatgttgaggaggccctcagaggagccgcgagggcatgcggctgcaattatgacagaggttttattagatgccgagagcaaaggcatcattaatgcatctcagaaaataactcttcttcagcaaatagccctaaatctctcataatatatttttttttgttaataattcttttccggagatatagtcatcacccgtccacatacatacgtgtccagacaacaacggataggttctttcactcacagagcacttgtttagtccaaaccaaaactcagctgttccacgcttacactcccacacttgttcctcgctgcttttatagcacatacgattttttgaccaacagtatagcgttacatacacaataggtgccatttttgttactgggtttgatttgttttttttttgtttgtgtttttgctttttccatctgtataagacaacaattgctacatacaaaatagaaaatatatgcaagagttataatttttggttttgctgtacaacatgaagtttgtgcaattcccttatatatagttttcattcttcacccaggttgatttcacattcacttcacttctcttcggttgtttcttttggtaaattttaatgaaaacgtggggtctcttttgactctatttttcatacccagtttacatgctatgctactaataagatctgtgagctacctctagtggctgcaccacaaacgcaagatgctggtcatcttaatcacacttacaattcagaatatgctgctcacaatggggagggaggtacctccctctcccttttttttttttttttt

SEQ ID NO: 161159 - DNA, 803 bp, Cannabis sativa
atcatctagggagactcaacaccatttagaaaggaactttggtcgccaaaatctttagatatgaaaccttgttatagttagtgttgctcgttattggccccctacaataaattcttgactccactcgtaattagatttgactagattattgtgtgggattaagattggattcgacaaactagagggaattgcacttattatttgagtgactgtgattagtaaaaacgtaggactatacctctataataaaataatttttgacatttttatctaataaagataatggaaaatatttatattaaataatacattcgtgaagctacccattatatttaatacaaatgtaattttagtaaaattttgatataaatattcttttttgctaagtagatataaatattctttttttgaaggacaatttgattattgtccagctgtattgacaatttatcctggattaaaagtatggaacgactattttaatacttcaaaatgtggaggaatttcaaaggttatcaggaagcggtgaagaggaactggacaagctattatgttgggaccccaatgtacaaattagtcttgaatttgaaggctcttaagactatttttcgagaaaagaaaaaggaaaaggtgggggacatacaagctactgatctacatccgcataatgaaatgatcacttttcagagtgctttacaaatttttctttcgatgaagaagtctgtcagtaggatcaaagggcttgcgaatactatcatgaggtacataaattgtaacgccctaatgctaaggcacgctacagt

SEQ ID NO: 161160 - DNA, 943 bp, Cannabis sativa
tatatccgttgaattggttacaatccaaaaacaaaatttattggtgtatactctgaggacaacaatatacgtatgtatacatatttacattcaaatattgggatacatacatatgaagagagaagagtacattgggaatattaataataaatatatacttcattattatcttatttttgctttaattctttgaacagaatctgaaactatatagtgatgatgtcatattcctccatgcatagtgattccataaaattattaattttgttatatacataaattaaatatggatccatctccacggcccatgctccttaattgtttaatttacactcctccttaagaataatatatcagctatatggcatttttctgtgtttattactttaattaattaaaagaaaggggtttcttttgtttattcatgcatgtggtcttattaatttctgcgctattttcatatatatattgatccaccattatatcttacatacattatatttatctatatgtgtatagtttgttcatttttcatgattggaactttatgatgtatagagtaagtgacatcagtttcatatagttatacatatatatttatatagatccaaactttaattatgttttcttaaaaaaaaaattattagtttttagttttttaattgtgtcatgatcagttagtacttctcctcacttattaatttcgcatgtgtacacgtctcttgtgaaagaaaaagaagataattttcaagcacaattcagttttagtatacacattctctcaaattttcaagcacaatattaaattaaccatgagtaattacttgtaatatttagattaaaatagtatttaattttttcttgagatattaattatgcgaagataattatcgcatttatttgtgttgttagtgagttaagattattgtttagagtagttgta

SEQ ID NO: 161161 - DNA, 660 bp, Cannabis sativa
atttaggaccatttgctataatttctcaaaaacatttgtgtgaattaattccccacattttatttttatgtttaagttaattcaacttaatcagcccgatgagtttcatgcttcaacaattaacaactaattgattcaaactaatacacctaataaaccaattgtaataaataggtaggtcttatccatattagactccgagtaattgtcgagtggatgtgggtggtgagaagtctatttcttctaatttaattatgcaagtttgggtcagaatcagattgtgttttcgatcctaataattaaattcacttatctgttatctctgattagtagctttcgttaactttgtcactcacctcaagatagtttcccttcaacccaatcatcgtgtatgtaccgatgatcttgttttacattataaatttattacaaatattattattcatgaattatgagaaaaccatttaggaaaaactgtcaattttaattgcgttaaaagaaaaaaatctgctaactcacaaattttttaaatgtggtaagtgtgttggaaaatcaatatcattcattcttttcttatcacctctatatctattctatgtaaagtgtgcctatataacagaatgtgtaactttttatttatattaaaaagaagatagttta

SEQ ID NO: 161162 - DNA, 877 bp, Cannabis sativa
tatttaatataatggtttgttggaataattaatttataaaaaaaaatatcctaattacaattacacaattatttctaaactcaccttaaataccgaaatgatcttttaaatgttgaccttgaataaaatgagaattatagttttggtaattctaacaaattcttattaaaatattcaatttctacaatgtgtgcaatatactctataattttctagtaataacatcataatcaaagtagaccgcgtcaatttctaggacaaaaagaaaaagcagcaagaactactatgactataacttaataaagaatgaccttaggtctttaccagaagataactataattaggtacagctatatttataagataaataattttgtaaactagttgcacttaaaacggcttaggaaaacgtatttgggttgtgcaaagagtccgtgaatgttgagtttggtccacttgagtttttgtaataaacaaactcttttttgtttccatagcttggtgatggttcctagatagtataggacatagggtaagatgaccgtgacctagtataagcattgctttgttttgttttctgtttggtttgagaatctccgtcaagagcgttgagaccaatttctctcacatcaattcaattttaaaaagagaatctttaagaagaaagccaaattacttcatcaagtataaaaaagacctcatattccggactatgccaacctctaatgagacatgcacagctataacacatttcatttattgataactaagaaacaaaagccgcgcgttgcgcggttttaaaaaaaatcataagctatatatattattgaaaaaagtttattttttaaatgtgatttttttacaaagttatatcata

SEQ ID NO: 161163 - DNA, 1073 bp, Cannabis sativa
aacacccctaaaaataagtaatgtttttaatttgacttagtttttttccccaccttctctgtcactgtaaaaggtcctttctgcttcacttttcatgataaattcttaaggttgaacaaggattaatttagtaaaaattttactttttgatgattgtgatagatagtgtgtgcacccaaattttaatactgtgtatgtttcggttgtctctccttcaaaatattgattttcatatttatactttgaagtcccaatgtcccatctattaaattaaatcatataattaactacagcacttcttttaataacttttgaagctatattattcttaatcatttatacttatatttaaagtttgtacataacttttctttgaattaataaatggtgtgtgatctaatgtgagtgatcagattgcactccaaatccaaaccctagtaagttgtaatgaagaaccgtattgatgaagcaaggaaacgacagccaaaagtgtcggcagagttttcacattgccacattggtatttccattccatataattttataatacacctgaaaatataggaagatttggcctattttaaaattacttttctacatatgaaaatgtatctttctttccttaaggattgacatatctttagatttgatcattttgtgacgtgatttaagtcctactttattcggagtttactgtggtagagagtgaagagtccgtgcatttttcacagataaaagttaaagggccagacaagaacaaatgggccccatggcccaacttctggagtcttctgtctttattttttttttgtacatattataaagtttgtacgatggacagtcttaattgttttgaggtaaaatttagtgggcctttggcccataaaatacacaaataagttacttcttatgaaagtactaccaacatcttacttcccttgtcagaatgccattgtttaaagggctatttacaaaaatatgggaaaatgaagataagttttgatatatatggcataaaaactcaattacactaaatatgacatttttttaaaaaaacttacaaatatgggaaa

SEQ ID NO: 161164 - DNA, 811 bp, Cannabis sativa
tttttttttttttttgatgaatagagattataaatgttttgattactctttataggacttgttttattacgtactcatcgacaagtcaatattgaagattcattttaggcacaatccaaatattacaatatagttttatttgaatggttaccaaaccaaacgttgcatcttttcaacgaaccttttctaatttattttatttacataaatgtatatagctttaaaatttaagaatgagttgtgtgagtttttaacccatgcttcttaacaaaattgctatatattcttcatcttattattaatatatagtaatacatttcataatcaataaaaatacctcttcgcattttccaatttcaccaagagacacacctctacgtactatatagaaaagtaatggacgcatatcttaattcttaccaaattttgcaaactaccaattgacatttgggctcgatcacaatggaatttcccaatattacttttacttttttgtttttaagtaatgaatatttacaataaggaaaggttaggcttagtaataatgttatcaggactgcgttcataatttaaatgaatgaatgaaagaagaaaaaaaaaagcagtaagggaggaggtacgtacgtggcttttcaaaacaaaataatgatcatgtacgtatagaatattgatatttcgaaatataaccgaaagcgtacattgagggaaagaatgcatgaaaaggtactaccgtcttgactgtgaaaaggaccataaagaaaatggaattgagcttattagctgttagaataggagagagagagagagagag

SEQ ID NO: 161165 - DNA, 1224 bp, Cannabis sativa
cccttcttaaacccaactaacctaacctaagaaggcatcaaccttagaattaaccgaagctgataaaaacttcatacaaatgggtggtttaatcccagccaaagccaaaatagccgccggcaaaccccacaatgactcaccgcagatcaatcccgccgcaaccgacggagcaaaattctcagccttcctcttgttcaaccttctccaaacaaaaacaatcaagctccccaaacacatatcaatggcaaaatacccaccaaggaagaacggaatcgccatacacatgggactaggtactactctatatgccccatacttagtctcaaacctctgcaacaactccctaattgcattaatcgcaatagccaagaagaagaaaccgatacagagctcaagacagtgtttggggaaagacgaaattccttcgactccgatcagagcaattcctcggtacattactccgtacggggctgggtacgaactccctggttggccaatgtcgtaagccttgtagaagaaccagaaaattaggggcgagattatgcaacccatggctgttcccaaagcttgactgaaaaacatcgagcgaggtgaagctagggttaggtaccctgttttgaaatcctgcatcagatctgaagctgtagagacaatactcatcatcacaccacatgaagctaagccagccactacgccgccgttttcaaggccgatccaggcgctgaatacgataatggctaatttgccgtagtttgaagcgagtgaccaatctgtaaggccacaggcgtaggcgttgcagaaagcgaggagtggtgcgatgatgtaggccatgaggacatgataccatttaagctggggaaagatgagggggacggcgaggattgagatgaaggctaagatgtcgtaacctaggaatgcttgccatgtggggatttcgtctcttaagaagtactcatttcgcctctgttcatcgtaattttccggtgacaggttagttatttctccatctacttgttgatgatgatgatgatcttcatcttctttcttttttgagtgttggtattgtttggttagactgtttattgttttgtataacatgtaacagatgtgaaatataccatctccaagcatcatagctatggcaatgaaaacctgcacataaatcacatgtatattcaaaatcaacacatacatatattacatatttaaatatatatatatatt

SEQ ID NO: 161166 - DNA, 509 bp, Cannabis sativa
  modified_base (427)..(449): a, c, t, g, unknown or other
agccatagcagtagcggcggtggaggagtgagtcgaggtggactcactcggtttcgatctactccggtgaactggttggaggtgctactggagcatgaagaacactctttgccagccaccgcaacatgctccgttcccttcggtcattctgaagatccgtgctttgccgatgaagcgtctaggtttctacgacaaaataatttaccagcagtttttctcgggagttctagccatgtttctgatgcattcttctctaaatgctactaagtctttaaatgatgcattttcccccgtaatagcctccaacatcccttggactgcagatttgggaaacgcctcgatgatcatcacctaaccactgtagacagccaggaactttgggacaagagttcttagttcactatggactcgtttggaacgccgtatnnnnnnnnnnnnnnnnnnnnnnnattatattgaattgtattttatgcaatatttttacctaaaactatacgtggtattaaatt

SEQ ID NO: 161167 - DNA, 676 bp, Cannabis sativa
tagtcctcacttatatatggctacaatttaatacacatttaggtgttttctttgtctttgtaattttcttctcatatttaattttagattaatttgattactatgaaagttaatacaattaatttaacagatttggaaagattaaaagaacttaccttattttcaagaattagtttaacatttttgttcttaccattaatagagtaaaaccccaaataagccttttcattaattagagttgttagaaaatcctattgaccgacaactctcccaagattacttgcttcatttgagttttgattaatcattgaaaatggtatatatctttaataggggtgctttatggtcatgctcttaaaccaagtaatccttttcttttttaatccttaaaaaggtacctcatggagccatgctattgtacgaaatataaaatatacactgggagggacaacattattaacaggaagtaaaatttaattaattgagttattagtgatggaatgtgctggactaaaaatatttttttattgttgtccaattttgtgtacttatatatgaccattttaagcttatatataaattaggatagttaggattttttcctctcaactttgacatgtacaaaatcatgcttcttgaacttttaagttcgttaaaaatgcccctaaactattga

SEQ ID NO: 161168 - DNA, 5170 bp, Cannabis sativa
aactaatcggtcaccagaaaacatgaaaatcatataattgatgcaagtggatcttaaagtgatacacacaatagcttttgaatatagaactttggatgttaataaagagttgtacctgaagaaatgctgaagctcttgacttgcatcatccattaaaagaagactactactggttgttctaagtcaacacttctaattactatcttcatgaacgttcagttgaatatgaaactttatagatctcaccacaaaggagttccatcacaaatcaacacacaaatgtacagagtagatgtggaaacttggaagcagatgtcagtgtagtcaccattttccagaaaaattgattctgaaacccacaggctatgaccctaaataaatttccgatatcaacaaacacctgagcagtcctcgtgatggtctactctttttgttattatttctccgtcagcaccacattcattcaactcaaaaaaaaaagtgtttagaaagagtaaagtatcttcccaatccaggtcagcacttcgtgcttcacagaaaccgttcattcgtatcccagctacatatttcaaacttggaagatataatgtttgttactaaaggaagagcatcagtagtcatgataggaagccactaagccatgtattgaatccaactcaaagaaaaataatatccaacacattgcacaactagactataacccactccctagatcatttgccagctgtaggatccctcgcatctgaaggtatggattttccaacagcttttcattgttactctacaaaagcaaataaataagtagattacacacatgtttgcattttagcatgcttttatacaaaagcagatgattcacatgaaaataacataagctactagagttatgaaagcaaaatgaaggtctgcattgatccattgcagatctaacttttctacaagaacagagaaagtatagattaaaaatattgacattcatatttattaacttaataacttaataaattaggttcatcaggaaacagtgagcaggttcaattcaattagaacatcctgcaacaagactgttacaaaaatttggcttgctttatggttagtaagttttattatttacatttaaacatggtaactttctaccagtgtgtaagtttgtaaacaatccagaacaataatgagtaaataaataaatatcctatcttttttatactgggtatttttttccagctctgtatggttataaatcctgcagaatcctacctgttgagctctgacaacaagattttgaagcatgtgttgatatttttctggtttttctgtcatcatgcgctgcaatatacaagccttgaataattagcaatcatataaagttaatttcaataacaattaatcaactggaaaagaaagaactcttgccttcaaaagaaaagctgaagaataatatgcaacccttgaatctgtgtcatccaaaagttccctgcaatgcagttaggacaaaagaaaccctttgatatgcaaaagaacaaaagagagcataaaaattcattcactaggaacagtgaaatagaaagtcacctaaaaaaatcttcgccaccaacttctaggaaagcagcagaatctgcagtgcatttaccaattagaagcaacagaagagctgatcgaatatctgaagtagcaccaggcaggttccctcttcctttgctaccaacagctacacccaatgcaatattgtctgttgctgcaccagcaagttgaattaaaggccaatagaacaaagcagcaggtacgcgtgaaactaactgcatgggaatgacagcctgtccctgaagaagcagtgccgccattgacgctgtctcataatcaagaggatagttgttactgtggatggatctactgtcaacttctatacaacaatcagaagacttctctgattgagacacaagctcatttacatcaaattttttattttcttccatgcaaccaagaactctgccatggtgcaagtcatctccgaatggcattgcagttgccaaagggactctcaagcacaattgggagaatacgatgtcacacatctgcatataatcagtaatgagataatagattgtaaggatgataaacatatgcaaaagcttgtcaaaaggttttctgtaatggcttccagaaaaaatatatgggaaattagaaaagttgcactttacttttacatatgggaaggggttatcacaaaggtgaaacacagccagagaacaagctactcatcatgttgaatttagacataaattattaaaataaattcataacggaactcaggtttcaatcagttcatcagcttccagcactattgagccaaaacaaaatgattgcacgttatgaattttcaaacgaacgttcacaagaataacaatttgatcatgtaagcattttaacactcttaacatataaaataaaagagcaagtgcaaaaacagaacctatctgtacacaatctatatactattacccctttattctattgaataccccaaagctttttcaaaagatttcagctatgcctatttggacgatttcgtaattttttcagagattaccttcaaaatattgatgcggtcggtttcattgaactggtagacaagggtcaaggcactgctcattacatctatcactgcattagctttctcaaggcggctatccctgtgtacattcccagtatcactaccatttgaatgctgcatttcattctcatctagcaaaaatttacatctcataagaagcctatctagaacaaacagaaatccccatctgataacattgtgtcttgatttcagaaggccacacatcagccaaatggataaagggacatctgaagcaactgatgcatcatgaacacctgcacgggcaatgttattctgcagggtttttatatttgaccatattgcgttcctttccacacgaatttcagcaataagcaaatcccccaaccaaacatatccattctgccgataagcaattctttctgaatgaagcagggaatgtaaagtggcccatgcgtgtgatacattcaagtcaataccatttctcagaacttcgccttcaatgctctgcaagagcttgtaagattttgttgtctggagcatatgggaaaactcattgtccaaatgagtatatgaacttataatggtatcaaatttctctgttacaatctccagtagctgcaaagtcaattgaacttcagatagcattaacatttgatagattgttgcattaaattgaattctagaaatgaaaaggacacaagtctatgaagatgaagaataacagcaatccatttaaaaaccagtcagaagcgaaaagtaatagaagccacataataaacaaaaatttgttaacaaaaagagtagagtctgaaaatctctaatagttactattagccaacctaccatcctaagtctaataatggcatgaatttttcgtttgtcagaatttataggaaatgtaatgatataatttacagtcaaattaatttaaatattgattggacacatttgcatccactactctcacagtagtaatggctggaataaaaaatatatattaaaaataaacaaaagaataatagctcttttataataattagaagacaactaaacctgccataaacaacacttctgagacattaccgtgtttaatcgatcactgttgggatatctggacaatgtagcagaaactgatctcctcaaaatctctccaataccctcaaccccgagctttacagaaatataaaaagcctcaggtgcatctgctagagaaagcagagctgcaagaggctgtatctcatcctcactatactccgtgccccctgtacatgtataggtttcatttactccgtgcagaacaaagtcaaaaaggaccaaatacagacttctcctctcttcccttgaggttgcaagggtatactgcaccaacagagcatcatcatttcattaacttccataaagcatcagataaaaaacattgcttgcaagttctcttgaaaagtttaaaaaactaaatatcttacacccaaaacttagtaagcgcaaagaacccataaggtatgctcatgtaaacacaaatttcttataattgaggtttctttcataaccttaggtataggaaaacccaacacaacaataagaataacatccatagttaaatgtaattatagtaccctcattacaaaggtgtctttaaatctgtgattaagcttatctgaccaacacataatcagcatacctcgagaaaaatgaactcaattccaccaatcagatcaatctgttctacaaggaacaacgggggacttgctgccactgattgtccttcagagacatgataaaacatgtttgccaacatagaaataagtttgcagtgaactacttctgcccaagaattcttcctactaatttctagaagtgccttaataacctgaaaatacgtaataagcttaatcagcacaaggtttgttgacatgaaggtaatatataaaattgatatagaagatataggacaagaaatacccaaggttgaaattttctcttaagctctatattttagaatacagataagaactggcataaagatatggccaaatatacatcagcaacttgttcaaccaagttttttttcacttctaataagaaacaaatgttgtcattatagcttagtatcaaatcacaactataatgaccaaccattgagtagcataggaaaaggaaaaacactaatatccttagttagtgttgaaaaccatatagccacccaaacttaactctatcccaaataacacaagctttcgcttccatatcattgaagactattatttctttctaaaccatatggtccaaatgattgcaaaaatacccacattccactctgatattctccttcttcttaccaacatccccagtgaataagcaatgtaaaaattgataatctttcattaattctttttattatcaccactttattgcttgcaccttttcctttcttggaagatctcatgatttaacattagctgtcatcccttaatcaatttaatatctttatatattaaaagtgcctatctaacggcatttcttagtttaacattcttggtttaacagaatatacttaaaaatagaagaatattctgttaa

SEQ ID NO: 161169 - DNA, 553 bp, Cannabis sativa
  modified_base (495)..(505): a, c, t, g, unknown or other
gttttccttgattgtcaactaaaatggtatcagagcttatcgatcagtatgtttacagcttccgcttctcttcttgatttctttttcttctttctttgtttggttctgcaatggtgcgaggaggaggaaatcaaagtcgcaatactcggaatcgttcagccgaagattccaatccgttctcagttcttgatgaaacaagtaaatttctgacgatcgatccacggagtccgtatttcctttcgagtgcagataatgcttcatcgtctttagttcccaagatgctcactggagctgataattacagttcatggaagaggtcgatgatggtggctctacttgctagaaacaagattaagttcataaatgggaagctaccagctccagacgaagatgatgaagactatgaagcttggatcaggtgtaatagcttggttatttcgtggatcttaaactctgtatcaccttcaataggtgactgttggaaattattttacnnnnnnnnnnntttactaacaagtatgttggattgacaacctaatatgaattctaaaac

SEQ ID NO: 161170 - DNA, 1128 bp, Cannabis sativa
tagggcacaaaacccaacaatcgcttacttcatacatttggcgtagtttgatgtggggttgtgagctccttgagctgagggtttgttagaggattcgtaatgggcagacaattcgcataaacaaggataagttgcttcctagagccttttgtttctcactttgtgtcaaaaataatgttcccgtgacactatagagttttttagagccttttgtttctctcatcgggtcataatcaagcatcttttctatctcagtgatgtgggtctggccttgttttgatgaaaaatcaagtagatgatgatattatttggcactttacccctaatggtaccttctcagtaaaaaattgttatgtgatttgctcccttttgaaagttaaaaatttcacttggagtgtgtgtttgaactagcttcctgtgaatacaaaccagtgtcattgaggtatgcaaggttataccaattgtgatagatgcgattatcaattcaaaatcatttttatgctatgtggttttgtctggctattaaaccactttgaagctatttggggtgacatcattgttttcctaagtctccaatggagccgtgggatttcttattgtatctacatactaatcattcgaccacatgttttgacttgcttcttcctttatcttggatggtgtgggctcataggaataaaaaaagattgcatctttctaaaacccctttgtagtgttggataccctgggccctgtctcaagttgactttcaacaggtggaacctatgaattcttctacttctaccatttcaaagggaaccccaaagtcttgttggttcgatgaccaggatgaggcagttcttcttagttgcgaggcgactctcacggaaggcttacctaaatgtgtgttgggagctttaatcaaatcgaagcacggtcacatattttcggctaatgcagtttcccgtttaggttttatctcagtccccatggcggagtgccatgtgagtcagttggaggctgagcagggccatctcaaggtgtggagaggcttagggcaaaatttgaaatgaggcctttttttctttcacaaaaaattaaaataaatattatttatttatttattttttactttgagatattatttat

SEQ ID NO: 161171 - DNA, 950 bp, Cannabis sativa
ttaatgaatggtcaaaaaaaaaaataaaaagggaagaaagtatggtcgttattagagtaatcaaatgtaataataaggaggtagctaggtaaggatgttatctttgtcaccaagccttgatttgaatatacacaagcatgcagtcaaccaagttatttgtctcacctaagatagtctacaattattgctacgattttgggatgtgggtataaaggcaaaccaatagaaaaaaaggaaatgggaggatgtggcccatcggggccttgtttgtttgttaataattagtacgtggaataataagaagagtacagctatatctttcaattaatttctttaggacggttaataaaaaaaaaataatactaagatgtgtagatcaagtaaaaatgtgcgaaacgtgttttggagtttcattgtgagataatggtgaattataattcaaggcgagttagagccttaactagatttttggtaaccgtaattgcactgtgatgaccaatcaaagaaacagataaacaaagaattaaaatatcttattctatcgattaaaccaacatgggtcaaagacctatccgtttttcttcatccattctctctcccccaagcagcccttttttcttctctatccttctttattttgatctttctctttcactcctctacacaagctcgcggtgagctcagatccacaagtcggcaaaattcttacaccccaagttaatttggtggcaatcggagctgagatacaatcgttcaaaagctccaaagttttgctaacaaaattttgaggccacattgtggccaattttgacgacacttgatgaaatagttgttggacttttcatttgaggttacattaacttttattggttttattaaaatttaggttgattggatagttatttgttgtgttagtccatattgttagtgattactagttaatgggctta

SEQ ID NO: 161172 - DNA, 560 bp, Cannabis sativa
agcgcctgctgccactgcagcagcactagaaggagctcctttagcttcaacaaacctccacatgtaccacgcagcgactgatcgataaggcttccacttctcgcacaactgctccatctgagagggccgaggtaagtcttcaagattgtaaagcaattggacccctttgcgaatgccgagatcgttaatcggaagcacatcgggtctgtggagagagaagatcataaacatgtgaacagaccaagacccaattccattcaccatcgtaagcattgtaaagagcgacttgtcatccatatttacaatcgtagtatcggaaagaatcccattttgatacttcctagctaggtcgtggaggtagctagctttacgccccgaaaccccgatttgccgaagctgctgaggggttagtgcaagcacgttctcggggacaacacccgtctcgccgccgcagagagagatgaagcgcgtgtagatcgaggtcccagccttgaaagcaagttgctggtaaagaatgctccgagttagagcaaggaatggcgtatgaaagttatcgaatg

SEQ ID NO: 161173 - DNA, 810 bp, Cannabis sativa
tttttttttttttttacagaaatcaaaactgaactagcttaaagagggtgatgggaatactgcttttttccattaaagcatcagagaaaggagatgtcaaaatagaattcttactattatcaatgttgaaggagacagagttgaagatcctgtaacggtaaacaaatctttcttgtcctactatcaacactaattggggactagtgtggagaataggaaacttgtaaatttaggattgtggctcacggaccagtgataaccagttagcagtcagaattcttagtaacagaatttaaaaaagatgaagttaaaagggatgtctttagtattcgttgggttaaagctccaggccccgatggatataacagtttattctttcaagacagttgggatctagttggaaatgaggtgtctgaagctattctatcattccttcatacaggttgattgcttaaagatatcaattcaactattcttactcttatccctaagagcaattgtcctaacaaagtaagtgattatagacccatagccttttgtaatgtcctatataaagttgctagtaagctcatctgtagtagacttaaatgcattttaccagattttgtagcttaaaaccaagggggttttctttagggtagatacattacccataatataatgatctatcagaaccttataaggcactatgagaagagatccaccaagtgttaggatatttttagtatttaatttaggttaattttagcacatttttcggtttaatttaaattatggttggagcatttttacgcttttatcttttagttt

SEQ ID NO: 161174 - DNA, 1246 bp, Cannabis sativa
ctctctctctctctctccccccattatgttccttggaaaaaggaaaacacgtgtattgttcattaaactttttttttcacatttacgcaggtgataattttcagtgaagtcttttgaccatagtggtaatgctgtcaaaattgtaagcacttaaaagctttaattaatccttacctaagtatccctgccatggctttctcaaccctctccactttttcggccaattgtctacctcctcttcacgccacagctctcttcaggttcttgctttcttctttttatttttgagttttttagatttatttactcatttattttatctggccatttcgtcgaacagtttgtgttttccctttatatttcctatttatcgtttcgtttggcagtcctctcaatttgggttagtttcatttttcgtgtgtttcttaacaggtctaatgctacggagaatctcgccattgaagggagaaagttgagcttctccatctcgaccaaacaaggtcaaactgtgccaattcttaaggattgttcacttaccattcctgtgggacaattttggatgcttcttggtcccaatggttgtggaaaatcgacccttctaaaggtacattacaaatcctaaaagaatgttctttttagttcctaactatgatgacgatttctggattctcagagcttgttgaattcatagatacaatttcacgtaacacataggatgtttaggtgtttttgagtatttgatttgagctgtttactctaccactaaatgtgcagattttggctggtcttttgagtccaacaaaaggagctgtctttgtggaaaggcctaagagttatgttttccaaaaccccgatcaccaggtatttgctatatactcaagtctatgtttcattattccgtgaccttgggtacaatatcttcattaaaaatttaatcctatttagtccatatcccaatgaaactacatacaaaacttgatgtcattggctttaggcaactttgcacaaggattggtggcagaaagtgcattattcatattttgattttgttcagaaaacatgtgggccatttggaatgataatacacaactaaaattattggactatgcaagtagcaagaaagaattataaattaatgtgcatcatatgatgcaaaaaaggcgaccatttatttgcttgtccccgggttggtgtgtttgttgtaagaaaagtagtgaagaagtgatgcatttgtttttggggtgtt

SEQ ID NO: 161175 - DNA, 609 bp, Cannabis sativa
  modified_base (581)..(583): a, c, t, g, unknown or other
tccaattctgacccatataagtcggtccactatttttgtaacatctctattcagcacaatatttttataatcttttcggcccaatttcaggttgagttcgctacttttgagaatcagaaaccagtcaaaaactaattaaagcactaacagacatatgatttcatttctaaaaaactaaagagcataatagcattatgtatagattatttcaaaaatgattattctaaaaaaatgatttattttcccatgagatacaaacaatagattacttacgcagtggacggagtatagaaatggtaatctagctcaggtggaataaccaaagtgtccggactatggactaccgtcgccgagagagaagaccgtgaaaccaagtcggagggagaaccgaagagaaggaaagtcttggaatctgactatactatatatttgagaggtggaatatttgaatttgaaaaatcaagaatttgggccgggctgggctgggcctactaagcccattagcttttttggattggagcgttgaatagctataaataagagcaaattacactcaataccctttttatattgtcctcttnnntttttaccttcttttttaaaatctat

SEQ ID NO: 161176 - DNA, 538 bp, Cannabis sativa
tctcttcaacccatggttctaacttctgatgaaaatatggtctacactcttgatgacataccaactgaaactcctaatgatattactctacttcttaagatttgtactttcaaacactttagccgtctctctttaatcaaaactctttctcaaatctagtcttctcagtgtagatttcctattattgtgtctgaacattcagatggtctttttctggtcacatttggctgtgaggggaatataagcgtagaatcttagatggctagctttggtattttgcccaaagtctcacaatctttgctgctcttgatagctcctttcccataaccccagagtagttgcactatgttcctttttgggtccaaatttatggtattccatttaggtgtaagtcttatgatttggctaagctcattgtcaccatatcttaattccttttttttttggtaaaaaaataggggaattatttcatatactattttttaactttttttttaatttacggtttgggtttctaaaatggttgcagcgctagttg

SEQ ID NO: 161177 - DNA, 682 bp, Cannabis sativa
ttttttttttttttttgtaatcagagatttttcttattagaatatttggattgataatttaaaagtttttttttttatcttgaagaaatatataatttaaaaagtagcatgtttcttttttcctctaaaaagtggcatgtgttaggtacatattgttcacgtaggataaagttttgttgttttgagagggttcacgataggttagtgtcgagaatggttaggtaattatgtaatatatgtgtcatgtaatattactactttgatacattcaattcactaccaatacaattcgaattgaatgtaaacaggacttgacgaagatatatcagctaacaaattgtatgacataaatttttactgtcaacaaaatatttagatataatttaaaaataattgagatacttgtgtcatcattatcttatttgaaaataacattattgttttctaagttccaataacatcactttgatagtgaaatagcagagtcaaatttgatggaagttaattttgtaaaattttattattttatttgggcggtgtgacctaaatagttgggaaaaaaacagaaaaatataataaagaaaaaaaaattacaaaaatactatgggccggcccattaaacatttatacagtccacatataaatatttacaaaaaagccacatgcactaagctttcagctg

SEQ ID NO: 161178 - DNA, 604 bp, Cannabis sativa
aatagtcctaaggtgttagttaaaaatcagttgggagtgagttagcataaaggggctgattaattgtaaagatttaagaattgatttgtacaaagagagtaaaacttactcagggagatatccaagtatctcgaaaagcttggaaatttaaaaattcttttgtgatgtcaatgaagagccgatactctaaatcttttgaaaattgaattggtactctatgtataaaatggtataagagtagacgactgggagggcagaaccaaagaaaccagagaaaaatgaccatgaaaattctgaagaactgcaggaattggaagaaatggtcagcgtcaagttcagagctgttagggatactgaaatagaataattcaattaaattggtactaaagtgtaacaattcgaaagatactgaaattttcagtaaggtttctgtccttaccattttttctaattttttttggtaaatgaactttaatcttcctctcgggccaagagggatggggcgacatccaatccaatctaattgaaccgatccaatccaatccaattacaattggattagatgctaaaagttggattctaattggattggatcggttattgg

SEQ ID NO: 161179 - DNA, 684 bp, Cannabis sativa
aaaggaacagaagatttggctccatcttcgacaacataacaatcatctcccttggagcggttgtcacatccttgagctactccaccattgtctaattaactctctctgcaacggagttgccccagatatgacttatgggcacagacctttaacttctttagcggattgggagatgttgccttagacttcgcgttagaaatccaagctaccattacaccccggataagccctccaagaagcccatgtggaaaggggttctagtggcctatgcggtggtggccgtgttactttccggtggctttggttggttattgggtttttggtgacagagtgtaaattatgaatgaggaaacgaataaatagtttaacatagttttccttcccctataaacagaatgaataaatcaaatccatagatctttcacatatttgcaataattgtacaaaattaacagcaacatgttgaagagaacctgaataatcataggcttggatttgccagacaaaccgatatgcattctattatcggtatccataagctcatgtcattggaaaatatcacataaagaaagtagttattatatttgacattgtagaaaataattgattgaattcatagcaacaggataacacatttatatagctgcaaatggccacttccaactagaagaactggtgctcatc

SEQ ID NO: 161180 - DNA, 811 bp, Cannabis sativa
tggagagaaaaagcatgaaatcctcacagctttgatgaacagcatgtgaaaaatcaattggtaattgcaccaagttccacacttctcttgcccgtagacagtaaaagagtgcatgacatatagtttcgtcgtgggattggcaaagagtacattgaggattcgtagcaatgtgtcgcctatgtaactccgctgcaactggtaaaattccatggaaagatttccatacaaatattcgaatttttgatggcagtttcagcttccagaaagtaagccaccaatgttctaaggatgagctacttcccatctcctcttgttcagctagatggacagcatattgatatcccgatttaacagtgtacacaccatggaacgactcattccaaattagcatatcattcaaaggaaacaaacttaatggaatattgagaatacggtcaatgtcaggattgctgaaattctggtgcaaagcaaccatatcccattgcctattcggagttatcagatcagccaccatgaggttcggattgggaccaatgaaagcataaggagtgaagcaagtacgtcctggaatccatggatcaactttacagtttatgtgttctcctgttcctactttccatctgaggccctgaaccaacaaatcttttccccaaactatacttctccatgtcagagaaggagtagtgcccaaagtagcagtaagaagagtaccattgggaaagtatctgtgtttgaaaattctgccaattagagagtgaggagcttcaaaaagacgccaagcttgttttgccaataaagcttggttgaagtg

SEQ ID NO: 161181 - DNA, 649 bp, Cannabis sativa
ttaaataaatacatattttaatattaatattaatttcgtgactccattattaatgcctccaaaatatggtgtttttcatcatcatatgtctcctcacatcacatggcctttacaatatgagagattgtagaggatgattctccactagagaaacctgacaaaagggttttaacacaagaaacttgcttctaaaatggcgaccgaccctaataactacatagaaaaaataaagaaaagaaaaggaaaaaaacaaagtcatatatttgcagcaaactaaatgccacatgtaggaaccgactgttttatgagttagaaagtgtgaatgaatgtaaagaagcatgctgatatataaagctaatcctcacataggccctacttcaccacacacatgatattataactattaaatgccattgtcaaaattatgatcatttcagagctgactgtttcggtgtttcctgtggcttatgtatataatatttttattacaaggtactaagcatattgtaatattgtccttgaaaaccaaagatatagttgaaatggtaaaataaaataaaataggaagacatattatattaattagggatatttacggcaaaagtccccaaatagttcacgttgatgcagattaatccccaagctccaa

SEQ ID NO: 161182 - DNA, 670 bp, Cannabis sativa
gaatttgataaacctttattttctggttgtttttgtgacttagctacaggagtgaagcaatggattcaagtgaaatatgagagaataggcattttctgttacttctgtgggtgcctcgggcatcaacaaaggggttgcaaactttcgtcgccggtgactatgtctaacagtgatggcattcccttccccatgtatggcccttggatgtccaccttatcatcgtactcgacggttttctcgggtcctacctctactgtaactcgtggagcctctttgtcgaccctgaggaacaaagatggtcctttgctgacgttgccggcgaccatggatgccgatgctgttccccagaggagttcccatgctctgcctgctcttcgatcgaagcgtcctgtgaaagggacggctcggagtactgctggtctcgagacaaatcagcgtgcggtgtggttccataagaaccgtgtccttggcgatgcgaggtcagtttccatatctggcttacctgatgaggaacatgttttgtgcttggaaaagggacctgcgaatttacctgttttggggacgaaaggtaaggaccaagaggttttgaattttgtatccgttggagataataagggaattgtgttggatattattttaccaggatcttagatctagtcacaagtatgtt

SEQ ID NO: 161183 - DNA, 674 bp, Cannabis sativa
tttttttttttggattaagtggaattttgaattttaatttgagtagatagatgcttaataataatgttgatcatcatttatatgaaggggtgtggtgtgggacatgtgaatttgctaaagattgcaatttgcttttttattttgtaactttgctagaaacttctctcaaggatattatgtgaaacacctaaaaattttgtaagttgactgattaatagctgatttgactgaactacttagctaagtacaaccattttgttctaaaaaaaatatataataattccatttatttgttacttaaatatatgtacttgagatgattaacaagaccctccatattatcttttgtcatttgttttaaaatttcttttatgttttgttgccttttagaattttgattttgcaaatcttagaaagtgcacaagactcctctttagaactgcacaatcctagtaaccttttttcatttcttttattttctttactttctaaactatatgtatagatatatatatttcattccaaaattgcccaaaacattttcagcattatcaataagtaattaattcttgtgaaaattacatgaaatatgagatttcataacaaagttagaaaaatatggcatttttaagtttgccactcttctatggcatttttttacatttaagattttt

SEQ ID NO: 161184 - DNA, 911 bp, Cannabis sativa
aaaaaaaaaaaaaaaaactaccgtaatgaaattaaacttaggatagataaagtctaaacactcattattatgcatacactaccctaattttctttaaataatacactataatttttattttttttatacactattataactattctattataactattcatttatctgagtacgtctgctcacatttacacagacatatcctaaaaatatacaagatatcaaacaaaaacttacaacattgaaaattttttcctaagagacgatcacatatctcatccaaatctctattaagtttgtagataaaattaaaaaaaaatctctcaaattaactattttttgataaacagaagtatcaacagaacatttccattcagatacataaaataaatcaatttcttgccaaaaattttaaagaacaccatattctataatattgcgttacagtaataaaattttgttggtattccctaagctgagattttgagctcaaagacttgaaaagaattctccaaatctgaaaaaggctcgtggacaatattccacacttcttgaacagtggaaagaaataaataagtttgtcgatatcaacttccatggaattatttgaaataaaatggatcaaagtcaggagaaagcaaaagaaccattcaagtaaaccttccatggtaacccaagcttgtagctataagttggaaaagctcttcaaagggaaacaaaataaatagttgagcaaatggagatcccccaatggatattctttttcctatgaagtaaattttcaactaaaagttgtttattgtcatctaatatattcaattcaattagatgtcgtttggttggaggtaatgaaatggaatggaatgaaaatgaaacaattttcattctattcatttgtttggttgcattttaaa

SEQ ID NO: 161185 - DNA, 605 bp, Cannabis sativa
aaaaaaaaaaaaaaactagtacattacattaactaatttatctttttccttattaagtataaggaataaaattcagctttcttcccatcattgttgagatcaaaccttatgttgtagcaactgcaagagggatatctattctttggtatattagctcagaagaaacttgagattaagttaaaaactattttctgcaacaggttcaaggtttatggaaggcaaaaaatgagaacatgtcaatcttgtgtgatgaggtgaagaaactgaaggatcgatttgattctttccagatcgaacatgttttgagggtgagcaaagttgattctgcttaggttttgtacttccctaagctgtctttcactatgtgttatggtttctgataatacttttttatctgtacaacaatttattacaccgaacattcctgttacaatttatcatctaatctttgttaaaacatctttgaactaggagtaaaggtcattattctcataaattgattttttcaaacctcacaccactaaggtggcgtttggttggaggtagtgaaatggaatggaaaggaaagaaaacaattttttttccattcctttatttggttgcat

SEQ ID NO: 161186 - DNA, 686 bp, Cannabis sativa
cattgagctttattggctagattagtgaatctaactccccttctgaaacctcccaaacatgaaggtatttctctaccttgagattcactcaatccaccaaaatagtaactcgagttagtgttgactccatgagaaaagcttcctcgatagcatcctctattattagctagtaggttaactcagcgttaccaaagttgtggtattgaggagtatgttgaattgcaaaaacaactagttttgtttgaaactctagttaaggctcgcaagattggcctcaggatgatcgatcttagtggaagcgccacatgagcactgagattaatctctttcttagtcttctcaattttggactcaaatgctataagagcatcgatctttttcatagtataactttcaattcttatgttggtggagatgaaaaacgtgccatattcacttgaaaggcctttaaataaggcaacaatgtgattttgagcacttagagcctaaccaatagatacaagatgatcaatcatatgttttcccttcaacaagtactcagaaaaggaaagagagccttttgttaggtttcgaagcttcttgcaaaacttcaagatttttgttgaaacttgaagtgtaaattatgttgggttttatgccctaaataaaaactcatttcaatataattagatttacttattaatata

SEQ ID NO: 161187 - DNA, 502 bp, Cannabis sativa
aaaaaaaaaaaaaaagtaccaagctagctacaaactctaaggaattcagaaactaattaggtagggtcgtttaagtttagttttaaggtatatacatatatatcttaatcgataattaataataaataatttataagggaaaattggaaaatttaattttaaatggaacaaagaaaaaacaaaaataaagccatcaaaatcagggaatttaatatatttaaataaagggtcatctttaacattaaattaaggatcgtacgttggagacattaggtggcaatgtttgtgatgcatgtggaggaaattaattcagtaccacaacaaggaacatgaaatatgactaaaacatctacttttgttgaggcagtagtgccaaaatatgaagagaaaattacacctacaaaccaaattttaaaaggaaatttgattttctatgcttagaaaatcaaaaaatttgatttataaaccaataattaaaaccctaaaaaaactataccttttt

SEQ ID NO: 161188 - DNA, 561 bp, Cannabis sativa
agaacacccaaattaaagtcaataatctacatttttaaatagataaaatttaaatatatatgaacttcatgaaatgcttctttgtgctaatatgctatgctaattaggcaaatctttcttaactcaaaagaaacaccttttctttgtaatatatttatttctttaattatagtaagtttcataaaataataaaaaagaacaaattcacctttccagctagaaatttgataaattcgactgaccccatttcataaagtgatataaaaaatcttttgaccataataaaatatagcatataggaaacccttatcattatttttatcaatatcttgtgaaagtttctcatataagtcatagtatttaattatttatagttttgttttatacaaatgggataatcgactttaatggtaatgtaatcgatttcacaaaaagctttacttttttttctttttggtttcattaaggttactctaataaaataaaataattgttataaaataatataaaatagtataaagtagatgagaagaaagaagaagaagatgaagagagaaagag

SEQ ID NO: 161189 - DNA, 509 bp, Cannabis sativa
aatggagtggctgtctcggcagttggttcttcgggaaggctggctctgttctggagacaagggtgggatgttcatgtaatgaatatggatactaacaagatagtggttaagtttgggggagatagattctcctcggattgggtgggttgcttaacttacgcccctccgaggagagcggaaagagtaattttctggaacaatcttggaggttttatggatggtttctcgattccttagatggtcatgggtgatctcaattctgttctgagtgctaatgagaagagtggagggaaagaggtgactcgaggggaaggggaagacttgagaaatttcatcttaaatcatggggcaattgatctggttggagttggggccctttttacttggaccaatggtcaagaagctgaaagattaatcagagagaggctggaccgagtaattgtctcccgattggtgttacgaacttttatgtttattacgcaagtgtacgcaatcaagtagtatctcac

SEQ ID NO: 161190 - DNA, 608 bp, Cannabis sativa
cgacagttagctctattaagagagttgatcacccccttaaaatcattttcaatgataacaaaattgtatcatttctcggctgccatctccagagctaaagaacaagaaaggcctcgctacaaagtgcgtccgtaaagtttgatctcgtcgtagccacccatatcaccacactctaatgatctttatcaacaacaccaatacacgtgtacccattaaaaaaaagtagatggtcatataacaacatacaagaatttatattaacaaattgaggcgggatgatgaaaaaacacaattactagaagaaagatgaataaaaaaaaatccaaacgtaataattttaaggcatgacctattaattaataagaaatatgtattgcctttaacgaaaaaaaaataacaatataaatacgtgtctaacacaatgttttcaacgaaataccacattaatgagaatttgtgaaattagtttaagaaaaagtggttaatttaattaacaagtgaatgatctccaagtttgcaatgttattaattaactttagatattgaattgctttagatacataaaggttgtcaaacggcaaagaaagaactatgtacttaagaaaact

SEQ ID NO: 161191 - DNA, 943 bp, Cannabis sativa
gaaacttaatttttaaaaataattagttgttattattctactaatatttattagttgtgtaaaagcctaaagaatgaaatgtcaaaatcttataggcccaaaaaaggcccaaaatgcttcaagcagaagaacaggaagagcttgatgcagtcacctgtcggtgaggtcagtcacgaatggagactaactaccctctcatcttcttcctcctacagctgctgctgcaatagttttcaagggacctaatttctacacagtcgaagaatcattctttgattcggcctcttctcattcatcagtagctacgatcagccagaaaaggtccttccttccatggggtatctacaggaagctcgtgaaaatcacgtcaagaagaaagtagaagaaggtaacaaaaacccttaaacccctaaggttttttaatttttaaatatctttatatatagaaaaatatttgagtttgtatatattatatgagtgcagccttgaggagcaaaatgaaacagaaggcactgaaagagtgtgacgattacgctttgaaatacgcggaatgtgctacgggaagaacattatccgttgtttggcaatgtcgtaaagaggccaaggaattgaacgcttgccttcaccaatagtaagccctttttcttggattccatggaactcttgtttgttttttgtttaaaatgcttgggttatatggattaccataaattagtgcttgcaagtaggacaacattgctattttgttaaaatgataattgatttgttagtgttcgtaggagaattgcacattggagtgaatgactccattagtactaattgttttaatgatcttgtttataggagacttgaaaatgggttagcttcaaggctaattaagattttttttccccgaattttgacatataccaaatcatgcttcttgaacttttttggccgttaa

SEQ ID NO: 161192 - DNA, 531 bp, Cannabis sativa
gagagagagagagagaatgaatttgatggggtataaatagttgagtctggagtcaagaaatgcggcagggtttatagttagatttgtatctttgcttagcaatgtgttgtactcatgatgagatgccttttacctaataaatagtgtgaaaggagcaagttcatgaagtacaagaatgcaaatgcagtagttgggagtttttttttctccttttttttcttattgaacagcagtagtttttttcaagggagagtgacccaaacaattacaaagaacatgcgtaagggtcacttccagaccaatattaagtgtcaaccaacccaatagacatttgggcaaagttgtgcgcatgtattcctttgtcgatcattgacgtgcgaaattaaaggaaacaatagggaaggaatagctaacatttttttaagagcatcaataagagcttcatattccgaaaagatgttgtcttgagatttgatgtctttgacgagattcaaacagtctgtcttaggggtgttcactaagtatccgatc

SEQ ID NO: 161193 - DNA, 981 bp, Cannabis sativa
cccctgccgttaccttcggattggctgttggtggccaaatcaccatcctcactggtatcttttactggatcgctcagcttcttggctccattgttgcatgcttccttctcaaattcgtcaccggaggattggtaagtcttcttttctattatcattaatgctacgtaatcgtaattagaattatttgaaatgacaataatgttcatatctttataaacaaaaacacagagggtaattatgagttttcacatccttaattataaacattatttttttataggccgttccaacccatggtgtggcggagggagtgggtgcgattcaaggagtggtaatggagatcatcatcaccttcgccttggtgtacaccgtttacgccaccgccgccgaccccaagaagggatccattggaacaatcgctcccatcgccattggtttcatcgtgggcgcaaacatcttggctgccggcccattctcgggtggatccatgaacccagctcgatcatttgggcctgctgttgtcagtggtgacttctcaggcaactggatctactgggttgggcctctcgttgggggtgccattgctggccttgtctacggcaatgtctacatcaacagtgaacaccaacctttagccagcgattattgaaattgaaattggtgtggtttttattgatttgtctttgtaataaaagcaaattttctttatgggattttcttttgttttattattgttcttgtaaagagtagctgttgtcaactttcttttgctttattgagttaatgcatgaatttgatttgcagcctttctgctacctgatccatctctctttttttacatcaagttttaattttcgagaaaaataatgctacacgctacactactttttttcttttaaaaaaaaaagagtaatttgcggcaaaactccctcaactatcaatttacttgcaaaaaatcatccaacctcatattttggtggg

SEQ ID NO: 161194 - DNA, 925 bp, Cannabis sativa
ggtaaaataaattccaacaagcacctcctgagccaaaagagaacattctacaatccattgaccagggatgaatgcagactggtaaggagaaaccaatctatcaataatatattttagctgatctgtcaagatacaggatatgatcttgcagaagaaattacataagctaattggctaaaactgatcgaacctagtagcatttgtagttttaggaattaagcacaaaaaggtacgattcagtcttttacttacattgtttcccgcaaagaaatcctttactgtctcacaaacttgagctcccacaatccgccaatatttcctatagaaaatccctgaaaaaccttctggtctcggagccttcaaagggtgtaactcaaagaccactctttgaatttcttcacaggtaggggttcagcataagctggcattctcattatccgtaacaaattcagtgaagagcgtttccaagtctttatcgatgtcaggacattgtgattcatacacctcgccaattttttccatcatcctcaatacttacaatcatattccttctttttcttaccaccgtggatgcatggaagaattttgtatttccatctcctcgactgatccaattctcccgaggcgttttcttccatatgcgttctatattgctttccatttccaaaatttccatttgcacactcgcatcctgttccagaatcttaggagagattgaggcattttggataatggttaactcctccttgagctttcagagtttattatcgcagaaaccaaaagaatctttgttccataacttaagttctctttttgtaacaccaagttttcttgacataatcatctcgctactacctgtgaaaatagctctccaggacctgtcaatatcgcctagttgatcgtagatcaaatgttcttaatcctg

SEQ ID NO: 161195 - DNA, 911 bp, Cannabis sativa
aaaaaaaaaaaaaaaaactgcagtcatttgtccgtaggacagatgaaaccaaaatcagtactcaattcgaaagttaaggccttgtctattttcatttcagtacaacatgcctcaacgccttcttctctcatccaaatattttcttcgcctcaaaccagatcttcgtaatcatcatcatcaactgctaatccatttcaatcctagtactcctattcacttctcaacttcctcactctctctcttctccccctaccatgagttgacttcttccatctcagtcaacgctctcactccgaggcaatctggtaccgcatcaaattcaaaacaccaactcttcgtccaaattcttgccctctgtaccttttcctccattcttctgtttcttcggctcatctctgcagttcttttgcccgattttcccagtcggtggcgtaatttactgactttttgcgaagaagctgaggccagaacgtgtgcttacccttcacacgtgtggaaagccattgtcgcttatgaggacaggcgattttttacgcattttggtgttgacctagttgggatcgctagagctacggtgtcgttttcggctcttggcggtgggagtaccattacccagcaggtacgattttgtagactttttaatctgtattgataaatttaataatgcacatcttgtgtttgatgctttgactccatcaaacacgttttgtgtttttcttatttttgagttttatatatggtataacattattgtatatatggaagatgtttgtatagttatatttttaatgtacatgctataacagaggttgcggttattcaaataaatttttatatatatattttatcagtggcggacccagaatttaaagtgagggggacgtaaataaatttaaaaagaaaatataaag

SEQ ID NO: 161196 - DNA, 645 bp, Cannabis sativa
tattaatatataggagggtactaggcacactggtccctttagcatttttctttatattactacaccatgtagttgtaaacttatgttatgttatagagagctctccattttttgtgggttggggtctgtgtgggtcctatggtggggttatgaagagccctcatttgtctgatgtgctagctaaaattctagtactaattaaagcaaaagcaaagttgtgaaagagatatcataatattgttgtctttgctgtgtaggcaaattcttaataaagataattccgaatctctggctggtagatattgatgttgatatcttttggaattcattaaattaaactatctatgcccatgtgtttatatattctagtatgcaagcattaccattacaaatattttgtggtggtaacttgatcttatctatatataattcgtgtacaaataaaagctagcttacaaatgagtttgatagggaatttacaataaataaacaattaatgactaagctaagcacaatcaaattaaaatatagaaacaaacatgaaaatttgtttgaaaattttggaaagtgttttgttttaatgaatcatacttgggagtgggaccacatatatatatttgaaacaacttttttttttttttgaaa

SEQ ID NO: 161197 - DNA, 565 bp, Cannabis sativa
ataaattaggaaatagtttgtcattctttttccttaatagatatttgttttgtttaacgagtttttcaaaaattaatggaaaagatagggcataaattaaagaaaaaaaattataattgtaatatggttgggacgttaatgatacttaatttacgagtcactggtattgaacttgtcacaattgagtttttatagcttttgtctcaagaacactctctgtaaattctaaatgttcgaaccattttcatggtgatggcgatgtcctatttataggttgtcatgcattatgggtcaaatggattcagacttgattagggtttatgcacataaaatgtcccaccgatgggaaaaatacaaaatagatgcttgataataggagtactgggccttgtatgttcagcccaatccttgaaagtagtagtcgttacagttcattgtacctttgacagtgacatgatgtgcgtgagctatagtttggattacggggaaagtctgtgtcagagtagtggttgtgctaactgttgggttttgtgccctaaataaaactctttacaatctgattagt

SEQ ID NO: 161198 - DNA, 1777 bp, Cannabis sativa
ctctctctctctctcatatatgtatacggagttatatacatttctctcaatacctctatcatataatcatctagttttgtgtttcgtcgttctgggtttaggttttctgcgctaatttctgcttattatgggactcgtgcactttttatttttaaattttttcatatgtgtatctgaattcgtggtctgcgttggaagttagcaatttgagtttctagtttcatgatgtattatacatttgtttcttgatttttaagcatcgcgctgtgctgtgctgtcctgtacttttatttatttttttataacagttcattgttgcatttatggttttatgtataaagcttggtcacactcacaagttatatatatcatttggctttggtttgcatttgggggaaacttttattcgaacagagcagaacatgtaagctaattttaggtttctaggccatgccatctcctacacatagaatttcctttaatctagacgaaaactaaatatttcatgttttcatgacatttattggatatgcaatatcatcatatgttgcaagttggaacacccccgatgatataagctaattaatatcaaaccattattccttcatacagttttaatacaattcctttgatgtttacatgttttattttatgtaatgcaagtccctagtcttatttcttttaggaattattcttattgtattaatcttttgttagcacagttttccttcatgcacctctgtctctttttaaaaaatggggcaaaaaataagtaacagtttctaccaataaagtgcatttcagtccaaccctatcccagaattttccggaactttaggaattccgacatcagttgtgtactttccaatgtagcttttgtctaagatggtaaagattaccttggatggatgtttgattagtctaagaattctgaagaatctcggtacttttaatgactgttctagcgtcctgcctaagtttcttattcccttacaattgcttgaatttaactttgttgaatagtcaagtcttttatgattttgtttctaatactaactttacatccaggcgctgtatatggaacatacgaggctattaggtataaggtacataatctgatcctgtcttagacttcaacatatgatattgtagtgacttcaaagttggctcttttttttatatattattttgcattgtctattgctacatatacttccatatttgatgttccgttacttctatgttcattgttctgaattatccagtctttcagtgaagattcttacgttatattcttttcagtgtaaagcctttttattagagaagtaagaggaatggaatgtaaccttaaatattcagtctcattagtcttcaaaagattacaaggccgaatttacatacaaagggtaaagaaagataatatacaatataactcaaaccctatgacattgacagctcataatactctaactaattctggaaactacaaacatggttagatagaaaaatgataaagtatcatgtaatacttccccccaagatggagaataaatgttgtcaaccaattgatgttggtttgaaacttgcaatgtcatcaatgttcttgcttgcaacttttctcgaaccatgtgggtttctatctctttacgtttggtgcgctcagaatgaataggagtaatgttgtgaaaattatattgctttataattgcgcaagtgtacacaatcacaaacaagtaatacaatgataagtaatcaaagttcgtctccacagggactt

SEQ ID NO: 161199 - DNA, 1195 bp, Cannabis sativa
agagagagagagagagagatagcaacacttacttcttgcagaaaatctgctacattctttctgtcaggacagctaaatcccatagacgcgaagaaatcaagagcagcttcacgaggaccctgatatacaatctggccttcacacaagagaatgacatcatcaaacaactcgaaggtttcaggagcaggttgaagaagagaaataacagtggttccatcaagtgcgcgggtggaatgcctaagatatttgatgatttgataagtagttgaactatcaagcccgtttgatatttcatccatgaaaaggactctcgctggacctacaagcaattcacctgcagaacaagtacgctctgttagtattgaactttcacataccattaatacttaacattacaaaaaaattgacattcaataattctgtttataatgaaagtagctaaaattgatgccaattccaaagttatttgaatcaggtttggctgtccagcaacagtaataaattgcagaacatatataaaaacactgtagaaattgtacctgtagtaagtcgcttcttttggccacctgagattcccttaagcatttcatctcctaccaatgtgtcagcacatatgtccaaccctaaaatctttgtcagatatatattagtactcttggttaaccttacaaaagaacttagactgtagacaacccacatttcaacgtgtagtatattgctatttgtttacaaattacaaacatcaagcaacatgtttgagccgctaaaaataagcagaatatatatgtatgtcgagtatcacttttgactttctactttctagagcagttcacgaaaaagaaatcacttaacaaattacacatttttttcaaaaaaagaaacagtaacgaatattattaaactaaacacagtatgactcatgatctgaataacgatgcttattgaaacagaagggaaacattgaacaaactaaaatttaagtgagactgtgctgtttcctaatttctataaaagaactagattcgaaataggcataacttttacgctcaagagattttgcccaaaattcttcatacaggtacagatcggaagagcgtcgtgtagggaaagagtgtagatctcggtggtcgccgtatcattaaaaaaaaacaaaattttcagtgcaaaaacaactgcggccaattctaaatcatga

SEQ ID NO: 161200 - DNA, 632 bp, Cannabis sativa
ttattatagtaacattattaatcattatcgttttataaactttgaaaatcaaaggcaataccgacaaaaatctcaattcaaaattcaactttccctcttattattatagtttgtccacttgaacaaaatatctgaaactttctttgaatattttcttaagaatctaaagcattttataataaaagataatatggagtggaccgtccatgataggtccaataataagccgagtttttaaacgctattaggctttagccactcacgttcattttctctagaaagaccacgttaatactatggacccgcgacacactggataaacttactcaaggacgtgaggaggaccagctctgccaagtgccaaagcttggaccgcttcaggattcgctactatttacacatacggcatagatcatgcgcgcgtcacgatactttagaacctcgcgcgtgggccagagttttcaaaattgaaaacgatcaagtcaaaaacagaaagtaataaaaataataaaataggatttcataattaaaaaaatatgacatttataggtttgttactcttttatagcattttttcacatttaagattttttatggtatttgatatgccatattttatgtttttgttttta

SEQ ID NO: 161201 - DNA, 505 bp, Cannabis sativa
atatgtgtccaggttcggccgctttacacttcattactacttattctatacaacattgaaaatttacttcttttaaattgactcagtttaccatacttttgacattagatcgaccgatcgatacggacatttcaaaacagaagattggtattacatgggtattgataataaacctctaatattcatgtacatttgagattaaagtattgtccaattccatatggctttaaattcatacaacttaataacatatttaagtttaatatgttcatttgattaatgaaatctttgttaatattacacacactcgatatttctggccactataatataattttgaaagtgacatttacatatatttatgtatactaggtgagttagcacgtgtgatgcacgtgctagctctttttgttccatttaattttatttttgtttgcttaaattttattttataaataattgtaacaaaaaatataaaatctaattttaacatcttaattgttgt

SEQ ID NO: 161202 - DNA, 520 bp, Cannabis sativa
tttttttttatcaaagaaaaagattttcaataatcactagagaaaactttttctgattacaccaaagcagacaacctgctcaagaaaaacaaggctcaaacgagcagacgaaaagctttgaacttacccgatatacttgctgcctgtaggttgttatcactgaaatcaagtcagattgcacaacttcctctggtaccatctggtatcttggggcagcttataactccataagttttctcctttcaaataaattgtgtttacccatttgacccataggacatcatactttggcattattacctaaagaaacttggcaagattagcacaattccacttcgatccatttctgaatcctaagcctccatatttcttagacaaactaaccttgtctgaagaggcaatatgaatcttacttctattgccattttgaccccacaaaaacattctgcaaattttttcaattttcttgacaatactttgaggaagaatgaatatgttcaatacataaagaatttaaatt

SEQ ID NO: 161203 - DNA, 701 bp, Cannabis sativa
  modified_base (627)..(641): a, c, t, g, unknown or other
aagttacaaaggttgtacccgtgagaagattcgaatcacaacaaggattgctttgatagaagcgcaagatggactcgacccccagaaatcagataaagattaatgtcgatgctagcttttcccatagctagctgtcgtggtgtagggattggtgtagctatttgcgactctttgggcataatggtagctgcttctcaaacctttctccttgtctagtcttcccttcttggtgccgagttgactgcaattgaactaggccttaatttggctaaaccgaaggctttcctaactgtattctggaatcagattgcattcatgcaatcaagttggttaatgccaacaacattggatgcacagatttcaaccctaacattggatgcacaagttgtaatgtttttaccttctcaattagagaaactaatgttgttgttcatttattagctaaaaaaagttttagagtctaaaactttagttatttggaagaggattactccctcagtgattagtgcagctgtgttagctgacttaccccttcttgtgtaagtttcatttggtatgaatgaaacttttccgaaaccaaaaaaaaagtatacaaaatggaaaatttgtctttcttttttttttttnnnnnnnnnnnnnnnttttttttatgttttttttttattttactgcgttgagggttggtgttccccctgtccatg

SEQ ID NO: 161204 - DNA, 889 bp, Cannabis sativa
tggctacaagagatttgatcaggaacgaagcttgctggcttacagtgaatggaaggagggcagatttgtggcactccccttggatcacatggcttgattggaatatgtctagagatgcctttaatccattgatagagcaaaattcggttaaggtttcaacattgattggttcagatggtgagtggatacccagtttaattaacaggtggtttgtcccaagtgtcgtaagctctttgaatcttattaagcggcggcctagttcttaggatgatatgctggtgtggaaagatgcaactaatggtttcttttcccctagtgtggcttataagtcaattatcaagtgtcgctagggtgattctgatatgtttttgttctgtatttggaagcttaagatcacagagaggctgaaattgttcctttggaaactctgcaaagatatcctcccatttggatgtcgcctcgaaaggatatttggcaatagtatcagctgtgctatatgtggcgaggcgaatgactcggcccaacatatgttctggagttgcccccttgccaaggctgtgtggtttgctagccgatggtccattagaagtgagaccctttgttttgatttcccgagagagatggttgaatggctttgatcccctgactttttgcatggtgctgatgaaggagttattgatgaatttaatagatttggtatctgcttggttgatgagctatgtacagctcggaatcgtgcatttcatgatcacgttaacccatcttggaggggtgtaatgggtagagttaagaaggcagcctcttatcttcttgttgcatgggatactcaagctaattctggtgtgatgcagcgtgttcacagggagatttattttggcaaactggtttt

SEQ ID NO: 161205 - DNA, 726 bp, Cannabis sativa
atgttagatttctcaattatcacaatatatggctaaatgcagatagtatattaggaagaaaggtttatattattaaactataatggcaagtgttttccaggtatttgtttttctttcttttcctacacaaaaacatttttctacccagaattttagttacacaaaatgcaatcattagaatttagaagcatagataaaagtattaaaaggaaaaaataaaaaagaaactggttgttcatgcctttcaagtacttcttcacaagtttttagttcaacaacatttgcttccttggtcaaaaataaactagtgaaaataaaattatacattcatgattttgaaatataaaaggctcaaaatagcttagtaaaaactttcactcagaatcagaatcggaatttacaatggaggttcttactgaacggcgtctatcttcatgatctccatcgtcttcgtcgtcttttttcttctcactaataacacctgcagaagaataatgattttagacactgcaatggtgggatatgtaccagaaaaacacacaatgaacaacaaaaagaattattaccctttttgataagaagattctcgagtgcccttgtggtgaaatcgtctttcgctcctagatcttgaaacccaaccaccctgtctactgcaattccttttctgaaaagagaaattcaatgttaataatcagacatgcattcataagtaagacacatcaactt

SEQ ID NO: 161206 - DNA, 678 bp, Cannabis sativa
  modified_base (574)..(599): a, c, t, g, unknown or other
aattcctgcaggttctgtgtttttggggccgtggacgccagagagcgtgggagattatgcaagcggtacgaaccatgtccttccaacatatggttatgcgcggatgtatggtggtgtgtctctagactccttcctcaagtacatgacagttcagtctttgacagaagagggcttgagaaagcttggtccacatgtggcaacaatggctgaagttgagggtctggaagcgcacaagagagccgtaacccttagacttaaggacattgaagccaaacaagttagcatgagatgataatttgtaactgttcaccaatgataaatttatcatttgtgttttgtgttgttgtatttaaggattttatattttatggaagttttgttattttgttttttgaacatttaatgtaataatcaatgacactacatgatgtagaacattggccttcaattataatggtcggtgtcaacctggattatgttcataacctttgctttcactgggagaaacgaatataaagtgaatcaatcattatgaatctatgaattggtgttcatttagggctcgtttggaacnnnnnnnnnnnnnnnnnnnnnnnnnnttgtattatattgaattggattatctatcatatttttatataatacaatgttaaactttaatttatactaaaatattat

SEQ ID NO: 161207 - DNA, 516 bp, Cannabis sativa
  modified_base (468)..(472): a, c, t, g, unknown or other
tggtaaaatatttccaacagttcgagttttgaataggaaaaattgattgcatgtgagtataaggtttggatgcgtagtgtctgggctttttagaacttgtaggctcgttttgctgcaaatgtagattaggataagaattcagggatttcagctcgtgattccttttttgtgttggtcgagttcaaactatgcttgaatagaatcgtccttacattctattgtctagagctcttagggatatcgatgaaatttttggattttttattttattctttgagttcccaatttgatcatctagaagtattattctatgaaggctttactttcagatggcgggtatggaggggacctctctaagcagtttttagggaggattctctcgtgccctttctattttttctggtatgggaataaactgcttggtttttcttattttctttccagtgaaatgttgggttttatgccctnnnnnaaactctatttcaatgtaatctattttattcaacatcaataaag

SEQ ID NO: 161208 - DNA, 627 bp, Cannabis sativa
acaaaaagggttcctttgtttatggacaatagacaaattacatttgcgtaatccagtttaggaatcactatctcttgcttctttattcagttgaagaacgagaatattattacacttgaggtttttcgaaactctctcggactttcaagtgttttcacttgcaaacactctcacccgagctaacactttcatacagttgtgtacaagttcacaaagaattcactcaattatcaaactttaacttaactttacaagtgaccatgagcatagctctgtttatagacttaagaaataatggaagcttaagcctagaaggctgttatgacagctggaatcataacagaaataactgaataagttgattaggatttggaggagaatattttaggtctagaaggctgttattacaatggtatttttaagtcttttcagatatgtatgtttttttgcagagaaatttgggatctgaatctgatatttatgatgaatatttatgtgtttttcttgttgtattgttgccttttctactttaaatgttatatatttgttgcatattcaccagggtctctttattaaagggtggtgatgtgttttctcttgtgaatccaatattgatttattgaatta

SEQ ID NO: 161209 - DNA, 678 bp, Cannabis sativa
aaaaaaaaaaaggaaagaaagaacaaaggcctaatgaaattgcttctttttttggtgaatgtgcattactgcatattgatgttttcccatatagaccccactgttaaaggtttaatgtgtgcgtcccacaccatgttacctgggcttcaatatattccaacactgatgcccataacatctttcaaccactaatgcctgtcatttttttaggcccatttcagatgtggcccttatcttactcaattaaaagctttaaggtctctcattggtttcttcaatccaagaagaaatatgatcatgaaaacactcaccatttaaatgaatgaatgtaaaaggaaattatgtagctttaattggtagatatgtgagatctactatggttttggtttgtacagtaatttatcaccttcggctctcaggaaccacacatatccctgttttaaaattcaacacctttggccataccagacatgtgaaaatcccaccatttcataattgctttacatatattattattattactaaccccacaacaagatatttgctccttattaagccaccttaccaataaattggtcaagaaagattggtgaaatcaggcccgtctcaaggtgttgagaggcctagggcgaaatttgaaacgggtttttttttacaaaaaaataaaataaacattat

SEQ ID NO: 161210 - DNA, 576 bp, Cannabis sativa
gcttccacagctcaatggtgtgaatgtgttcttctcttgtgatgatggtaacacgtaccatatagccaaggctctcacaaaccctaatggggtgtttaaattcatcattaggccagggctgagaaaaccctagaagacattgtccttgatgagcctggtaaatgtgatgtaattggtagacttcctattgcagctggttgcagagtgttttcatcatctaataacaatggaattattcgtgctcctctcatccacacactaccagtcaccatgatcatcatacttatcactataatgttggcaagttttactactatcatacatataattaatcattgcatatactttgttgctttaattatcttaatgaattattatttgagttcttgttgttactatattcttcattatcttgtttgtaacctcattatctatcaattaaatacatattccattttataatataatatgtacatttcaactcagttaaatatgccatcctttattattattattagtttattgtttttttttttttttatgaataagaattttattgctccaaacaaactatta

SEQ ID NO: 161211 - DNA, 536 bp, Cannabis sativa
  modified_base (468)..(507): a, c, t, g, unknown or other
aaatgataagttttgagaactccaaacattaattctgttggtcattctttccactaacacctcactctctgaacttgagagtctacagcaacaatgggaattcccaattatttaaaagataaagtgctcctagaaaaatctgagacatccaaaactcgttgtatttcttgttctgacatcccataaaaataaaagacatgtttgttctcactcgaatgtaaactcagtgttcgagaaaaatgtttaaggccttgtaacatcaagtaaatagacttagagtcaccatggaagaaaagcaatatgtcatcggtaaaacataagtgaatcaattctaattccttacatctttcatgaaactaaaatttttctttttgaccaatattcaccattgttttttaaatgcattccattccaagaataaaaaagagtggagatatagggtcacatttgttgggttttatgccctannnnnnnnnnnnnnnnnnnnnnnnnnnnnnnnnnnnnnnnatagattagaaataacatttaatgttgca

SEQ ID NO: 161212 - DNA, 859 bp, Cannabis sativa
aaatctccaaaagtgaaaggcgaagttacaagtaagaaagaggtgctccatactctcaatcccctccccccacaatccatgcataaggcaccgactcatatcaatattcatacgttgagaaagctagaattagatgggaagagtattagacaggatgcttcattatagactcttatggcgctataaaatcttactattccacttccacaaggaaggggaaacatcacaagggagcacagtcgaaagcctgaaccaagtaggctaatttacaagagaacataccattagtttcctttgttcaaatccaatgatcctcactctgactactaagcttaccccctttacgatattacacatcgttttagaatcaaagacgaagtaaagcaacaagaggttccaatccccattatcttgtaacaagtcaacttcctttttgaatgcctgtaggcaggttccccaaaggacgtggataaaatattactagccttgaatattaatttgtcttttcttttagctaaatgcaaacaaaaatataattttcatagattttgacattttaagtaatgaatcatttgagagcttttttgttttcatggccaacaaaatgttacgggacaagggtattaatttgccttttcttttagctaaatgcaaatagaaatataatttttatggatcttgacattttaagtaatgagtcattttagtagctcttttattttcatgcccaacaaaatgttacgggattgggataacttatagttaaactatgatgatgatatagtgaatggatcatgcatatatatatatatatatatatatatttatatatatgaactcttaatgggtattacccatg

SEQ ID NO: 161213 - DNA, 573 bp, Cannabis sativa
  modified_base (498)..(529): a, c, t, g, unknown or other
tattttatactatattacttttagtactcgctatgctaagtgagtacttgcatgtttatttttgggtgttcaaatacctttgaatactcgcatagtttggtattatttaaatttttctgacaacatttgacactagaaggaagatattccaagctttccaacaatattcctgtgatttttggaggtgaatcatggtggagaacaagacaatctacaataattaccttcattcaattagacacaaataataaaaaaaatatgtgagtgatttctcagccccccatgtatttagagatcatccaaaatcaatacaaatcttcgttcgagattatcaacatcattgttcaaagaaacacgaaaattcttaaaagaaaattcacctcaacaaagcaatctcatcagccccatgcctggaaaaaatccagtttagcaagaagaaacatatacaatacattcaatgaagaacgggtgactcttatgttgggttttgtgccctannnnnnnnnnnnnnnnnnnnnnnnnnnnnnnntaattaataaagatcaaaaattgcattttatgttgcatggttca

SEQ ID NO: 161214 - DNA, 647 bp, Cannabis sativa
  modified_base (539)..(543): a, c, t, g, unknown or other
tttgtttttttttttttttttttttttgtttttgggacatatgaagtatatgattcttagttataataatgaattaataaccaagtttaaaatataatatccatcatttggagaataatttgaactttcaaataatttgtatcagtagaaagatacattccaatttgataaagaagactttttgggagagagccactaaatttatatgtattgtggaaatatacttagttattgtaaaagtgagagaagactccaagacttttccactttttgaaaatggttattggaaatttctagtcaactcaaatttttgagatacagacaattctccattgacattagcataaaaatagattttttttcattatttttaataaaattaatcactattctatttaaaaatatttaagaggaaagactactcaaatataagatatgaaacatcaataatggactttagaagcctttatttttgcttgaaacttaataagggacggccttagattgttaacccgcactataaaaaattttacttttannnnnaataaaatttgtgactaaaaatgaaaaaattgtgactaattataaaacatgattattatgttgtgactaaaaggtccgtagctaaaactattagtcacaaaaat

SEQ ID NO: 161215 - DNA, 786 bp, Cannabis sativa
aaaaaaaaaaaaaaaaaccaagtgggctttcatttccttactttatttacatttgtatagataaaattacaaaggaaattttgcatttcgggtctgcattttttcttctttttaagtacttttgttttgttttcttataaaatgacatagaaaaagcttcttatttgatgcaaaaaagaagaaaatttccaacccatatttatatttggtcaggacacgtgcttatttaaacacacaaaaagctcaatgtttataattgattaatattactaaaaatagtaaatgcaattttattttttattactgcattatcatattttgagaaatgtgttcacctttatttcctttttttttcccaaaggtcataatatattatgaatgatgtgccagacataataatttaaacgagtaaccttaattgacaagttataccacctcttattattaatataaatatatgtttattcatataattatactatacattaaaaaataataaagaaaaaagatttggaattcgaagtaaaatttcatgtttgcctgtttctattttttctctttgatctccaactcaaaccccattttgcctcgataatgaaaaataatacggatgctctcttttttatgtctagttcaaccttgatcctatccaattttgataaagtaccaagtaatttttttttttttgccatgcactctatttaggtggcatttagttagaggtaattgttggattaaaaatccttttgtgggcacatatgtataatgtatatgctattataaagt

SEQ ID NO: 161216 - DNA, 692 bp, Cannabis sativa
atttatcccaagaaatgcttccttttaaaccaaaagttttgaacaaaaagagttcattttctgattatgacttatgagggtgcttcttaattgtttgtagttaagagtctacacagcctcaaatgttagagaagaattggatgaagctaggagacagtttcttcaatcaaacgtattggtaaagaaatcaaagaaagtatttgtaccaaagatgcttgaaagatatgcaagagaatcatcgttcagctcagatgatcttctgaaatggatcactgaaaatgtggacaagaagctccatgactcgatacagaaatgtctcgaatgtaagcccatcaagaaggcatctcagatcatagaatggttgccttacagttcaaggttccgatatgttttctcgaaggacttgaccgagaagccatggtggctctgacttttttctaaaatacttgtagaaccatagaagcattctaaactatcagagccattgacaacttcttggtagtaggaactagttatacattaccttcctcttctttatatgcttcattcatctgatctttgattttctcagctgccactatgtaacctatatagattccaaagttgatcctggtgtggttcattgtaattaactaaaatagtttcaatattgatttgggctttttttcattttttacacttctaaacatttt

SEQ ID NO: 161217 - DNA, 770 bp, Cannabis sativa
ggatgtctaccaaaaacaaaaaatgtcaagtgacggaaattaatattaccatttcttaaataaaagtcattaacgtaagttaccttccctttgggttggatcgccatgttctggatttcggaaacaatgtccatcgagttctgattccgtcgattccggctgcaaaggcttaaaaactgccacatcacctttgtgttcaataaatgttgtttccggcagactgtttgacgaaaagtatgttgtacccttcatcaatgatgggttgaacctcatctcttcggccgtcactttgcgaaatttctgcgccggtccagttctatactcatcagaggaccctgagtaagtgtcagatgaatccagccactgactgtgtgcaggtgactccggtgggagtgactttacttccgacgagcacttagaaatgcccttctcaatcattctaattgcagcactaataacctaaaaataagaagtatacaatgtaaatgtttaggaatttgaaatggttagaagtatctcgatatatatacataaaatcctagctaaaaaaaacaacctatggaccaatattaacccattaacttgaagtcactattttaattaaagataatttacacttattataccaatttttttagagtatttaatagaaaagttaaagtgaatgccacatgtcataaatcatcaattctcacaataaatatattgtagtataaatcgaaaaaaatcaagatttggtctctgaggtgatctcatctaaataaggatca

SEQ ID NO: 161218 - DNA, 709 bp, Cannabis sativa
cactttgattacttaaaagtgttgaaggtgaataaattaatgatattgtgtaattctcaaaacaaaatcgcacatattaaggttgaccaacttatctgtatgaatatttcactgctagaaatggctaaagtttttttaaaacaccaaatactgaaaattacaagtgcagtgtaagtacagatataccaattaaataacaaaattacattatttaaggataaaaacaaattttaactaggcattatttgcttcataagaaaataataattagtcatttaggttattaactatttgaacatgaatgatcaatcaatttaataggataacaaatcatgaaatataagaactgcataagcataatttaaatgatataaaaagaggccaaacttcataaacagtaaacaagaatatcttacattccatataagtgattttcaaatttcattgttatgatgaaaatcttttactatagacattagtttatatatttgctctcaaataagatcatgtcccatatacaaataattgatttattagttagtaccaaaaaacaatgtttacattcacaaaatatttagagtttcttctttcattgttatttttaagaccttttactacagacattattaaatataattggccaatatttagataatgtaccatatatagatgactgttataaatattattaattatgtggatgtccaaa

SEQ ID NO: 161219 - DNA, 571 bp, Cannabis sativa
ggagaagaagtggcggtagtggtcgggtgattgcgagtgcaggaaggagtcgatggcggcgcaagcgacggagatctgagaaggggcggaggaagcgaggattgtggcggcaaggtcttgggatttggataaggaatcgacggtgtaggagtgagggtgcatggtatgaaaggtgagcgcgatcgcatgagaatgatttgagatgtagaagaacaaagaaaggtaagctagggtttatgagtagagaaagaagtagaaagaaaaagaggtttttgaatgttttaaatgagaataataaggcaaatggcgctcttttatgggagaagatagaaattatacaaataccttcgtccacgtggcggtatcttagagacttcttggcggtaacggtggtctactgtgttactgtgtagggcctttctatcctaaattgccttaacttacactaattacagtagaacttaccaagtaaattatattctaattgggaggttataactaaatagagttacactagaaaaaaaaattaaaaaccaaaaaatatcaatgtaataataataacaataaataa

SEQ ID NO: 161220 - DNA, 606 bp, Cannabis sativa
atgctggcttaagcagctaagcaataggtggcagggtgagcataattttggttcttgtggtgccacttcttttgttattatattgcattattgtcttacatctttccttgtgctagatggctttgatcattgagatgacttccaaagaggtaggagtcgtggttgtggagcttgaccgggttcaatataggaactggtctttatctgaagagaaacaagctctatcctctaaacttgaaaggactaagactgaggccactactaaggtggaaaggatcaaggcaaaggtataggctatgatggcgagggtccaaacaaacgctgaagctgatattaatcacattaagggtgaggtcgcggattatcgccaaaaggcattcctggaggcctacaaaaaatatcatcagatgtacctcgatcataaggctaaggatgatcaagagcatacggatgagcatgactgcttaaactcttagataacatccctcaccaaagagctccgccatataaaagatgaaagagacaaggctgaagctcgagagtttatcaagaacaacaccaacattgagaaacttaaagagatcagcagcttggagttccaaatca

SEQ ID NO: 161221 - DNA, 576 bp, Cannabis sativa
ttacatatattaacataagaagcagttggaacaaactaattgtcagcattgcccattacagttatcttaccacagctatccacaatcaatcacctattcccacaagtcatgtagatcaaatcaaaataatattcaaatcaaaagtgtccctccagttattcgccaacagggctataaccatattttctagacactacattttgaccaaagcttatcaagttttgaatgtcaatacatgactatgccccatatttagatagctcatagcactattgccaagagtccaagaccatatgttaaatgtcgaatttattgctaagagatttctttctaattttaggtttattcttacaataaagagaaggatctctaagatctgaaatctgattgctgatttgatgtgattaatttgttatttaaatacgtgatttaagggattatttgaccatgtaataatggagaactactggcagatttcctgtcaaacttctcttataaataatgtatgatagcctagtctaattagtagaaataaatagagtttttcctctctatttcttcactctataagtgatg

SEQ ID NO: 161222 - DNA, 4538 bp, Cannabis sativa
tctttttttaaattaaaaaaaatcctacattccaatttttgaattttttttacacaattagcttcattcaaatttcaaaaaatttaaaaataaacccaataattaaactaaaaaattaaataaaccgtatattggaagagtacattttaaaaataatttataaaaatatttaaagaggaagaaactgataattgtgcaacgatttcttaatttgaatttgaactaaattaatctcttttaatcttaattttaatttccaaataaatttttattttaatcaaattaattcttctttaattttaattctcttttaattttaattgtacattacaaacttaataaaattataaaagttttaacacacgtgttaaccaactagtatatatagagagaggaaatgctggattcttttatgtaaaaaaagatatttgtccttgttaaaactgttacactatgaaataattagtaatttgtaattggattgtaaaatctataaatatgtaattagatacttattaatgaatatagaatgagataataaaattttagttcattcgaaaagtgtaattattagtattttcattgagagaataaattaaatttgaagtgtaaataaaataacaattaagagagtttagccgttaaaaattctttttttttttaagaaaatttacataaattactattttcggcaaattttttacactttttccttttatttatttttatttatttttatatttttacagtgttcataaaaacaatactaaaacaataaaaaaactacataaaaataacaagaaaacaacataaaatacaaatgacaaaaaactaacaacaaaataataacaagagtaccaaaatgaaatctaaatttaaattgacttaaggaccaaaatgaaagtttttctataatccaagtctctaaaagtaaataattcaattttcaaaagagaccaacgtatttataaggccttctccttcttcgtcgagtccgtctgttcaaatttcgcgccaaatcccaaaaccagacccaaatgtacaagcttttccagaccaacaatggctatctttgctctactctcagaaatcacttcagaaacttgagaatcttctcacccatttctcaatttcacgacggtctgaatccgaagcttgattttgtattgggggaaattaaagagattcaatcatcgaaacccgtgacagtcgttacccaatcggaatcggactctgatgacgctcgaatccttacagaggcggagaatgtttcttttgagattttgcacccgtggccggagtgggtggatttgatggagtgcttgttgaaacgaggctacttcgaagggagcggaaacccatttcgaaatagtcaattgggtcacaaagaatcgaaatttattcggactgcgtgccttaatttcgcccgagatcattttaatctcataaggtagtaaagattatatgctttctctatatgcagacaacctgtttgattttagacctgaatgaaatatgacttctttagtcctgtattagaattcagattagagtttcctatgactttgaatggcttaacattcaaatcaagtttctggagagagaatgcatgaccccatggtatgaaaattgagctagctagatgtgaacaaaaaccatgaaatgcttgatgatattagctgagctggagtgagcttttgtatacttgcagaaaattgtggatgatttttgttctactaattctaacatctagttttctactatgttttgccctatattatagctatttgatggacatgaagacttgtttttattttctttctatgggctgtaaactgtaaagtatctcattttttttcaaacagaaaattgactgttatttgagttaaactgagtgaatctatttgtattcctttcttcaggttcttatctaagaaaaatatccaggtcatttctggatgtggatgtccaagtttggatagaaaagttgtaaactcagggaagcgtttgagggcatacgcaggcgtcaatgaaggagatgtaatatactaaagtctttctatacttgtcctttttggttaaatgaacctattaaattaaatttcctaagcaaggtttttatataaatatattagttgattttgatttctactataaggaacagtattttttttcgtccaactaatcttggactgagatagagacatagatatgttagttgctcttcatcatctaatctaatcagtcattttggtagacttgcagctcctgcaatttgaggggacattgtgagagagcttatgtaaaggctcgtgaagatgaaggtgggcgaacagtggatgttatgcgtttcttgttgacatatgggcttgatcccattgctggtacggtggaaaacatgccatgtctaaacaaaatggtcaaagaatcggtaagaacactactcaaagagatggtagaacatagcatgaggagtatgaataccaattacccaaagttaaagacagtagaaaagtttgtaccagttgaagatccaaaaattccacaagaaaaaggccggatacatgtcccaatgaagcaaggcgactggctgtgtccaacgtaattttaaagctctatcatgttctaatttaattttatgttccttaattttagtttcactctgattcaccttattgttattttgtattccagatgcaactttctaaactttgctaaaaatatcaaatgcctgcgctgtgatggtttgttcgaagaaaaactgaagcaactaagagagaatcaggataatcttccattgaagaagggagattggatttgtgacaagtaattgctcctggtgtcatttaacttcaccataccttatggtaatttcttattgggaaattttaatttttgcagatgtaatttcttgaatttcgctaagaacacaaaatgcttgcaatgcaaagagaagcctccaatgcggcagctcaatcaaggggaatgggaatgtccatcgtgagttgttttaactgcataatttgacaacctttacattcggtctctaggttttagtaacatacttataaatgattttatgagtcgatacatttcataaacttatagtttaatgttgtgcttaggtgcaactatatcaatttcagaagaaacatggtctgtttaaaatgtgaccatagaagacagaaggcaatgaattcttcagaaagaagtgaccttgaaaatgtgcggtactgtaatagtagatcaatgaatgttgaaggtgacaatgctgataataatatttgtcgaaacaatagtgcaaacatgtggagatttgtggaagaagagaatgaagaatgtactcatccaaagtcaaagaatgaggcttctggttttgttgattttccaattgctggaggtaagaccgatttgtctcaaaatgcagaaaagagagagagatggaaatcagaaatgctagagagaagcaaaggtacatttaaggccacagaagacgatggtgacgagttaagacctgcccgtctccagagaaggtcagagtttgcatattctgctgacgatgaagaaatggccgaatggttcggccctggaaagttggaaagaaaagggattgttcatggacatgagaaaattcaagattgaagattagatctctcctgtcagattggggtggtcaaccatgaaaagcttgtgaaatcagcattaaccacaacaaccactctcttcttgagtttctaaacccaacggtgaagaaattctattaccccaatggaaacaaataaatgccaaatgatggtaagtctttgaagaactcgattactttaaggttagtttttaaaagcttacacaattttcgtagatgttcacattgagagctgtttctctccatttattcttgtatttgcttctgtttatgagcattttatgcttcaaaatcagagtttgtttcttctttgagttagagcaacagttacagttcgtaagatcgatcttcaaagggtaacagtatcttctgtctgtttacataacacaaacatacattatttacttgatagttatgttttgacagagaaacttcattagatgaagtaagacaaagtttacagaaaacaatacaaatacaatagtgagaaaatccagaaaagcttgtgtaataataaatatatcataggtttgagtgaaatcaagtggtgatcttaaagaaattctttaaggatttctcatccaattccttggtgaagaaccttcgcaagaattctgtcaaggtaaactgtcgatacaattgcggtttttctttcgatgttagctctggcaaaggaccatatagttcctctcttttacttggatacaagaaaactgcagtagacactcttggttctctattcatattagccaacactctgtgatccacgcttttgtatacatcatttgacataatctgaaattgtgctaatattaggctaaaatgaatgaaacaactgtaatatccagattaaaatagtatttaattttttttttttggatattaattgagcgag

SEQ ID NO: 161223 - DNA, 4795 bp, Cannabis sativa
agggcataaaacccaacactgattcatgcatctgcaaatgtgatacactacaacagccaaacctgtaactatcacctgctgctaaaattttgacctcttggatcgcctaatagctttaagcttctaggaagattagtagttgttgaatgcaactcaagccaatcttcgacggtcgcaagacacttcttgctgaaatagcaatcaggaaacaaatcattactgcttttatctgcttgaacacaaataacacactgcttgtctgaaactataataaatctaaataaacgatattttgtttgcagtcagtttaaaactgccatccacataaaaaatcgatgcttaggtaagtattcttccccaaacttccccataaaaactttgttcttcatatttcgatgtgcgaagtttataaccctgcataatcgagtatttctactgcagaaattgttgttggcttattcgactcttgattaatttcctctttcactccaaccacttaataacgccaataccaactgtgtatagaacttttatagtcccaccaataagagcctttgatatacacattatgcacctatttgacccacaaattgtcttttcttgcagccactacccacacatattttcttagagtcgccttattccaaagtaacacatcccgaaatcccaaacttccttctttccaggttctacataagtctttctaagatatatacctaagaccctgaaattttgatgtacctttcaaaagaaatgttctacaaatagctattatttctttaaaaattatttttggaagcaacattataatctgccctaataagattggactgctgccaaaacaaagtaaattagtgttacccttccagcaaaggaattgtgtcgagaactccaaactctaatcattaataccatcttttcaagtaaacctaaacattctacttgggaaagacgacgagagcaaattgggatctcaagatacttgaacgggatatgaaatccagatacatctagcaccctctgaacttcagtagcactcatacctgtacaataaattctagattcctattcatttcggtgatggcgagaagtttacaagaaaagtttaagtccttgacgaagtaaataaatttatttaatatcactatgacaaaaaagtaatacatcatcaacaaagcataaataataaaacataagaatccgacatttttcatataacttgaaatctttttttctgcctacttcattttttatttttacaaatagcataagacgaccccataaactttcatcccactaataaaaatattaaataaattgattagaataagcaaaggtcataagcaagagaataatcaaactacttctttgatggttcaattgtaaagtagttaaaattagagggtgcgagattagaatagtatgatgatctcatctatatgtgatggaactggtacgtggaaattcacttgatagttgatattaattagctagctagggaggacatcaatgtctttccttaaaaaataagtgtggtaataataaacgtaagttgttctaaatggaaaagatgtcaggaagaagaaaccccattaaagcaaatattattattaatataataataataataatttaataaataaaaaataaaaagtaagtgaatggaagactcaaaatgaacagtcgtctaaaacaaagtggtggactgaaagaggcacagagatagaaagaaagagagagaaaaagaaagagagagagagtgagagatggtcatatgaggtctgacacagccaccacccattgacaaccgccaagctaccttctttaagcagctacaattagccgccgactctgttctataattttcccctgttgtccaaatcacccgaacccaacccaaccacacctaaacccttctactaaactttcttattcttcttcatcttcttctactggtcaaaactctgaactttaaaggtggagctaatagcctctctttttggacagttatttttcaggttattatctgtgatttaattaaatgaaactaactcattaaatttcctttgtttcttacttttctttttatggaaattaatacatatattctgttaattattaatggacaataattaaattttgtcttgtgtgtttcttaattttctagaaaagaaaaaccattagtatccatagattgctacaagtcaaaaacagaaacactggttcaactaaccaggtcaataaaatctgagagagttaacatattgctatattaatattaaaatctggcaagatattgttgttgggttttgtgtaagatgatgagtggtacatatctggattgttatcagtttcattaggtccatatacatatggtgtttaatgctgattttttatttatttattaatttttttttttaatttcttcttttttttaatttcttctgatttttgtttttgttttctttgggaaactaggtggtgagaaaacaatatagaacgggcggcgcatgcagatgccagtaacgatcaaatataaaagcatccttcgccgtttgttttttcagattctgaaaccccaaacatcgacacgtacgagtagtctctcttctcataaccatatatcgaaacgctccaattcaataaccttcctctcttgttaaaaacgcttctctctatattatatatacctatacagacaaaaacccatcagcaagaaaaaccacacgacaattttgttatatatatgttagggagagaaagaggagatgcaatcggagaaagatcaagaggccgaggagatgatgatgaagcaaaaaaatggtaacagtaatgataacaacaataataataatggtaatgaaaataacaaggcccctcagaaatgtccccggtgcgagtccctgaacaccaagttttgttattacaacaattacagtctctctcagcctcgtttcttttgcaagacctgtcgaaggtactggactcaaggtgggaccctccgtaacgtcccagtaggaggcggttgtcgtaagggaaagcgagccagaaccacaaccggcgccgccatcgcagccaacatggccagcacatcctctacgacgtcctcttccgaaggtggtggtgaaaactactctaggcagttattagctcaagcttcagtatcaggtggaggaggaggaggagcgggagatgtactgccacgtcatcaaagccagacgaataacccacaaactataattggttcgggtctgatgatgaggcctgttgagccgtttggctcgcagttttatcatcagagctcgtacttgccttcttttgcagatatgaatcaacagttggcggggatgatcacagctccttcttcttcttcttctgcttcgactttgagtcttctagagggattcaacttcgctgcctttggctcacaacaacatcagcagcatcagattattccaccctctcatcagttttttgatccgtctgacgatcatcatcaaacaacgatcgacccaacaaggagtgtaataaattctaataatcatgaccatcaatactggcggcctcaacatcaaagcaactttggatcagctcagcatcatcatgtcaacaatgattccgaaactattactactcctactcatcatcataattccaccgtcgattggaccgttaatggcgctgccaacgtcgacaacagtggcgacgtcgtgcctgcaaacgactcaaatcatcactggcctactactactactactcatcatgatctttccgggtcgtacggacctcctccttgatgatttgctcttcacttgattattgctcttgtcctcgggatgtgtggtatagcacataaatttaattttacaaatattattcataagtatacagaaagaaaacgcatattgaaatgttatcatcatgataaactatatgttttttatttttttattttttttttctgttcctacttctagtagtgtaaatactttaaatgccttttttttttgtggttagggatataaaatgtgacttttatgaaaacatcatatagctataagtacatagtgttttgtggtgtggtgtggtgtgggtatatatatacatgtatctttttattactgtaaaggtgaagaaaagaatatggatatggagaggctatattgatcaccttctttgttactttcttatatttattatggcggaaattaataatatctgggttgggttgggttaggtttcaactttaagttgattgattaaaagtctttcgttcgtgagtgacgtgtggtaaaatgcttgtgctttattaagcctagttgctttgcttttttcatatagtgtttctttttgcttaatttatttgcaattttatatatatatatacctttaaaataacatagagatatgttatgtggtgttaaattattaagattgtatatgagtgaacaatcttaaaatttagaataatattgtattaaatatatcggaaaagaaagctcgagtagtgcaagtataggaggagctatataattgagaaagaaaaaattagaagaaggaaaggaaaaaggaaagcttagaagaggttgatgaggtgttttcttgtagggaattaaatttagttgggtgggcatagaaggttgggcttttatgcatgtgggtgactgacgattcaacagctttaaaaagcatcaactttttcattctacttactttttattatatgtaacatatatattatatattaatatcaatgtttactttagtctttcttagttttttcttttttcattct

SEQ ID NO: 161224 - DNA, 2475 bp, Cannabis sativa
aatacgatcataggctttgctgagatccaattttagagccataaaagtaagcctaatcatgcctggtgtttaaaaaaggctatctacgatcttaaacatgctcgtaggacttggaatgagaagcttaagaccaacttgcttcagtggggggtttcaagcttcaaaattagactcctctctatttgtatatgggctcgaatcaacattgaacattcttcttgtctatgttgatggtattttagtaataggatccaatgagacactcatctccaaactagttagtgatctaaacaagcatttttctctcaaaaacttgggtgatgttcattaatttttgggagtataaagtttttagagactcatctggtatgtacttgtctcaaactaagtatattgcagatttattggtcaaactgcacatggaaggagccaattgctgtcctaatcaatcaagtgcttctactaacttttctctacaggaaggtgaaccttttgatgatctaacactttacagattcaccttgggagccctacaatatctcaccctagctcgactagatgtagcctttattatcaacaagctaaatcaatttattaactctccaaccactatacattaggaagcttataaggttgttgagatattaaaggcataattttagatggattactcattattacagttgttgccatgatcctcaaaagccactctaatgcagattgagcaagttgtgtgagtgataggtattctacacgtggctatgttgtgtttttgagtggcaatctcatttcctggtcaggtaagaaatagcatgttgtggctaggtctagcactgaaagtgagttccgagctttggctaatacaactactgaactcaaatggattacttcacttcttagtgaacttcgagttaaattagctcactatcctgctataattgataattaaagtgctactggtcttgcggctaaacatttcttctatgctagattgaagcatgtcaaaatagacttgtaatttgtcagagattaaatagttaagaagaatttgtttgtttgttatgttccatccattgatcaagttgcatatgtcctcaccaagccactatctatcgattaatttaataatttaacgttcaaacttcaaatggcttctaccccttttaacttgttagagtgtattgggttgtttcaattaatgaagttctaaacacaataaagacaaatacaaatggtaatgctatatttacaaatataattattacctgtccgtaattcaaaactgccgcagatggactcaattgaatgttggcgtatgaagttaggcatcccttttcaaaatttccatcattggagcatttcatcgaatacatgtaatcagtcggcattagaccaaatccgagcgtatctgactccatctcactccaatcatcatcgctacttttaatccacaccaaaattatttaattagttgtagttatcgtaacttaatatttatatatatttgtgttgtattgtatgtatacacaaaaatattaaaccgaatgtgacttttagaaagtcatcaaagaagttagcattcgtttaaatcttattttgaatgttgtgtttttgtaaaagttattgattgatcttactattttggtaaatgataaattagactctatattttttaaagtagtacaaaatacgatcttaatttgattttttatcgaaataaaatttaataataatctgatctagaggttctatgacaagactgagtatattttttgtatttatttatcctaaaatttttctttaaattggttatattataaaaaaaaaaaatcaaaaattaagctcagagtagtattttgtaccatactgaattttcttgctcaaaatttgcatccaaaaacacataatgaatattttttttattcttttttattatgacggtgatggttatagaatttttttaaataatttacagtgttgaaaataagtttgaagtctttctaacacgcatagtaaactagaattcatgaacgttgtgtaaactatattcataagtttttgaaattttgcaagttttgtattgtaaatgaaatgaatatcgtcataaaataagaaaatagagaaaaaaaagtattttgatgtgtattttcgaagacgaaattaaattgataaaagaatattgaaatatgaggttgatatctacccattactttctactatctttttcttttcctgaaaccaatttctgctgtcttttttttttcttttcaaagcagcttctcttaagagtaataatgtttagtacctattgtaactaactctttttgttaattagtaagttagttaataggtaaggacaatttagtgcatgtttggcatcataactaacaaattattttttattttataaaacacaaaattgttttttgaaaacaatttggcttgtttggccttgttttttaaaaacagttttca

SEQ ID NO: 161225 - DNA, 9743 bp, Cannabis sativa
aaaaaaaaaaaaagtcaaatttggtgttctattatttaactgtacatgagtaaattaatgatatttcacaaattttgacattttgttttcttgctcctaagagtaattgtcatgaatcgacctcatcaatttaaagaattatttattattatctacaaaattatcaaataaatcgctcaaaagaaaaaaagaaaaaaaaaggttcaataaaaactggtgaattaaaatacacggagtcactaactctagtctttacttgtattaatatataaataattaacaaaataacattactataataaataaaaaaatacgaactttagttccatcagaaaaacaattataataaaataaaaagtagagatatatcatttcacaataaagattttttttaaaaaaaaaattaattatgaattttttattaaaattagctaaaataatagttctccaattagacatcttcctcgttattaacactaggattagaattagaaaaactagtcaaataattagccgtctaattctcagatcgtttaacaaaaaaattaaaataaaatcagatgaaaaaccttaagaacatatatatattctgtttcatctaccgctcataagacacaacagtaaagctgttgcataagttcattcaatctagtaacttgagcacttaactattgtgttaggtatgtaattgcactacgtaccaacctctttagttgcacggaacttgttatttccaattactaacaacgatttgatggcgagccattgaagaacagagaaaaaccaacaacgagacaaaataaaacaaaaccatgtcacatagacaagattaaaacactcaaaattatatcagagaaacaagactaaaacactcaaaaccatatcatatagccaaaactaatcatagtagcaaaaatcgaattgcagtagcaaaacacaactccgaccaaaccgcacccaagcccaaagaaaaccggcaggtttgaccgaagaaaaaagacgacctccaataactatagatttaagaatgagaaacttctatttttccccactcacaataaagatattagagacatgaaattgagtaacacggcattttcttcgacaataaaatattcttttagttttaattagatttttcattggcaagcatggaccgttattatctacccaaaaaaaaaaacgttttaaaagtatgtaaccctgatcttatgactttcgagactcaacttatttgggattacagtaattaacaattgataagtcaaagacaggaattcatgtcacatgtcataaaaatcctaagttttataaattcaaaagtcaaattaattatcaattagagcaaacaatgtacggtactagaagtgctccagaagaaaggaaaatacttttttttcttatttttttttttaaaaaaaaatgcattatcattcaactagatcatgtcatataatttacaagatacacctttcttcacattatggttcttgtttaccagttctatctttgagagttgagttgagctgtctatttttaacgttgtaaccacgatcgaaataaacactacaagatcacaactactttactcacaagtcacaagtagcgaagtcaatatatgtattatgtatatatgtatatatacttccctactttttctattatctctttctcactctgttatgttggggttagctgatgacgagtaccattaccatacatataatgtatataaatatatagaaatcactggtttagttaagtttagttaggaggaataaaaatataagaataataatgaaataagaataagaatagaataaaataaaatttaaaatacataaaaaaaaataataaaaaattattaaattttttcttatactatattaaaatagtctttctttctattttaaaatgcaataattattccatcaaaatagtggaacgtgtattacattggaatcacattctaatactttcaaaaacaaccaaacaaatgaatagaatgaaatttatttcctttctattccatttcatttcattacttccaactaaacaacacatttgtttcttgttatcattggtgtttctaagccagctatcaattgatgtcattattgctgtagatgatcataagtgtcgacgtatgagatagacgggttttgtggtttgtatacaaattttcagttgattttggttttagttaataatgtgttggcatggaatagtgaaaaaagatagtgtgtgcattagaaatgtatacagtggaaatgagaaacttaacccttccctctagactcaaaaaagtcgaccctcctcctcgttattaacttttgtatcaaacatattaataaagactctaaaaattaaacgccaaagatgttgtagttagcattgctataaagcaccagtggtacttagtaccttctcgacatgtcgcgttgcgattggctagcggtacttcctaaaagctattatattaaattatatgaaacgcgatatttagttagaccaatagcgatattgacacatatgaaagtgctaggcaccattagtgccctttaacatttctcattaataattaactcgtgcatagaaaggataaacttatataaatatatattatatgttatatataatcagatggtgtgccatgaatgatgtagtttgtgcatcgatataattagaggcaacattattccagctgaagtggacccacattcatggctcatagccagtccacaattcccagtcttcaaattatcatttgattttacctttgcaaacttatcttaacttacattggaaaataccactcttccagaagacatgtcacatacaaccttaattatctttctgattttattattatttttttttttaataaattatctttctgattttaatttaatattataataatattaataatagtaacatagacaatgacgacgataccaaaagtggacccattcaagcctcttcctccaagtaaatggaggagactaggtttatcattaatttataaatatcttggaaccaaatattttctccttatgcttagtttggttggaacgaataattataataataataataacaataataattaaaaataacagtaataactatttccctctattgcaagtaagtcaaactagaataataaatatatatataggaagcttctataggatctcaatttttcaaagcttttgattgaatacccctttgcttgatctggtcttctaaaggggataaaatccatttatatatataaatatataaatatatttatctaactcacctattactctctttcaatcaaaccaaaaccacaacaaatcatcacaaattcacaatcccaactctcataatacatgttgaaacttgttatctgtggtagccctcttcacccttcttctcatcatcaagatcaaaatcatcatcaggaccaagtacccatgagccagctgagccgtagcgccggaaccagcccatgttgtacacctaaaaagtcaagaaaaacttccttcagccggagccataacaacaaggagaagaacccctatgccacccgtggtctggaaaagttctcagctcttttggttgatctcgaagagaaaaggcagaagatttatgagcaaagtgcagccgcagaagacatatcattcgtcagatttgtttacaagaactccaacgacttggttccaatcatcgttaagttgaaggacagcagccagaaagaagcagagaacataactaataataacaagaccactactactcatactgctgctgctgctgctgccaatgaagacttgttattagtcaaagaccaacaacaatcaatccaaaactactcatcagaaataacccatgatgataagtttcctatgatgaaagaagtaaagaataagtcacagagatcggaacagagtagtagaaaagtcacaaagaagttattattacaatcatggagaagcatggttaatcttgataagttgagacgaccctcgtattacttgccggttgtagtgatcatgatattgatcttgttggtattttttggtcgatccattgcgattctatgtacttcgattgggtggtacgttgttccaacgttaaacgacagctcctccaaccgaaaaaggtcatcggtggtacacaagaaggattatgtgaagaaattaagtgaaagaaagatgatgactgaaggagtatcttctcctcggatttacaacaaatctggtcatcagagaagctggtgaatctgattgacctttcttcttcttttttctttcctttttggttctatttccatgttatttttctgggttttttcccctactgattactacctgtatataaatatatatatatatatatatgtatgtatatcttctctttttttattatttttggatgtttcagtaatccatgaaaaatttactcgaaaagtaactcttgttttgtaagaactgaccgcttaaagcaattaaattgtatataatatctcacatataggataatccaatcattactgagtaatttgcaaagtgacataatggtctttttcttttaatttgatgcagcatgcttccataatcttcaaacaagaatcatcaatagtttttcgaaactccaataaataatttttatttatttataaaaatttgttttgttttagatgttattatattagtaatgattgaatttgcgtgccgtcgtgaaatgatgaagtaatttctacgatatcgtcgtgggtcagattagtcaagtcagacagacagattatatgataagatttatagagagattcaaaacaaagaatgaaaaggaacattcggtttaaaacccgtgaatttggattgttgatgcggctggttgaaatcttcaaataagcattatacatttgtggagtttgatattcgatcgaatcatgaagatctaacacttcaatatattcattaaactactcgtatcaataatttaaaaccttcttattattagaagaagaagaaatctattatacccgcaaagataggagataaaacaaatatcctcttaaaaataaataaaagttgcaaaatttaaccatcactgctagttatttgtacaatataccaccagcagcctaaaacatccaattattgttacatatggaaaaaccaaggcttggtcgtgatgcattgaggttttacaaagatacaatcactcgtaaaaaacaaggacacggtagtcagtcctgtactgctgctgagctaagtgataaactcgctttcactagttccagcacctcaataaacaattcagatgttccgtccagtatattcaaattccttagtcctaaaacagaccaaaagcatcaatatcagcatttaaagagaccaaataaaaataaaaagaataatttgtgataaaaaacttcgagactctagttaaacttaaatacttgagtaaatttttttattctattacagttctagaacttccttaggtaaagggaagtaatgtgaggtaagtgtccatgtgtcattctcatattattccaaatcattaatttttattttctaatttaaaaattcatttaaatgttaaaaaaaatatttgaaaacccatttatataagtaaaaaaaataataaattaaacatgatttattaagcaacattaaactgaattaaaacctaaataatataacaaaattaaaattaaacttaccaaaaataccaaaaaaaaaaaaaacctacacattctctctcgccttgctctctcttggttctctgggaaattaagacgaagctaaagaagacgaacaattgaagcagaaatcaagctccaaggttgcgacacggttaagggttagagctagaggagatgcacctgcgagttctagggttgcgacaagatttgggtaggcattagcgtgcgccggatctggtttgacaatgaagaaggattcaatggcaacgagtttgacgtggaagagcacgcgaaacctggtaattgcaagtgcggactgtttaggtctcatctttcgtttaaaagtgtggtgtgtctaggtcacaaatggggacataatcaaggggttggcccataatgggaagcaattgttgaggacgacgcgccgtttctggggacagcaaaggaacagggcaccaacgacgggggacgggaagtggagctccaactcgaggccaggtacgtattctctccctcccattttgttttctcttgaaaatttgttggctgtcaggaaaatgcagaacaaagaaggaaaagaaatacaagattttttgggatttccaaaaaatgcagggaaagttttgtaagctatgtttggctgctagaaaaatgcaagaaaatgatgaaatcgtagctccgtttggctagccaagaagaagagcgatggtccataaataggattaaactttgtaacatttattttcgtttgaataattaagctttgtactcggttttttggtttttacctggatgtatttttgtattgggttttctttgttcaacatggcaaaattttgtaggaatttttgtattctttttctaggttttgtattgggttatttttgtattctttttttaggtttgtattgggtttttctaggttttgtttaatttcattttgatttcgttgtgatggaagctgatgaatggtgaaattctggcctgtgattgatgttactacaagtccacgttgaacaatttaggaaggggttaaggaaaaggattgattgatcatggacatagctgagttggggttcaaaattttctgagttaagatttttagttttgtttactattattttaattttagttttaattttaaataatttgtttatgagattttcaacattttttaattttcttatatatttaaataaaaaataaagatttattaatctgaatcaatcagagactgccacatgaccattaacttagcacttaacggcaaagtacccatcgaagttctagaagtgtaaagtattaaccttcaaaaaattaaacgtatgtatttgtgtaaccgggagttagagttagatatttatgtcgcaaattagtctttttaaaaaaatatatattaaaaaaagacaatttggatagatctatttatttagtaaaatcatggctagcagagcagtcataattttaagatctggtccttacttgaagattatgaatgctccgctagttcactgacattcctattaggcaaatatgtatatgaactttaaatcatggtgagaagagccgtcataactttagacctagccattacgtggttcttaccttgaatctctttcggcgcatatcatcaggactggtacgtgaaatctgttcacgttgatgtctaggtgcttcacttctgtaatgtgctgctgctatttctcttatcccacctttctcttctaatctacttctcgtgttttggaaaaagccatctttgtcccaagtaacttcataatccgccctcaatcttgatccttcctgctcaatagcaaacagttcagtcatcaatcttattgatgttcattatgttggagagaaggtactagctaaagaatgaagatagatatattatatatgcctcttttaaagaacaaagtagtgacattccacctaagccattgtctcatccgattcaattatatcaacaaggtcgctattcattactaatagtcttatttcatgctcgttctataagcttgttcagaggccaatataggttatattatctgcttcttgcatcattgtcaggctatttacagaaattcaattcttttactctgtttccacaatcttcagtcgataaatcaaaacacagaactcagataacatgctctccatatatcctaatattgcacaaagtttaattttaaaaacttgatactgagcctggaggactcataaggatgaaatagcatgatgacagaataagaaatcccaggttaaggttccaaaactttgttagaactagaaaagaacttaagaagtcatagtaccttctgcatagagcggcaacataatacttttaaggtattgtagaagtccttgtacttctcgaactgaaccacaatcatacagtgaaggcctgaaattataactgaatcatcctcagttgcgtccttacctagatcatcgtcctcagcaacattaagattcctaaagagtgttgagttaaagaggtaaacacggcggtgcaatagtacatgattggctaaaaccgcacaataaatgcaaacatgatctagtgcaaatgcaaaatgaaacaaaacatagatagagtaaaagagaaaaagaaaggggaaggagcatccaaacttagaaaacagaatttgaatatatcatattttcacatttccaaatgcaaacttacaagcttcctaaaactacccatactgttgtgttttgtcaaagtttaataaaatcgtagtaccagagaagctagtataatctctaattctaaaaaaggtttccataagaaatgcattattgcccgttgttgttcttgatattacaaatctcacaacaaacaaagattaagtaaaatattgcataccttatctttccaaatgatgaaaaaatggtatgcgtaacaagcatagaaggctttgatgaaacccgcggctcagcaaaccaccgtgacggaacacccctcagaactattgtatcaggctcttgcttcccacccctcgaataccctgttcgaaaaggcagcaatttgaaacaaaaaactcactctcaagctcactagtcactaaacagcgagccatgaaaggaaacaaactaacaataataacatacctcgattcccaaaaacgaagaagtcctcccaagctttcttcataccttggaaatcatcagacacaggaacggcgacgtttagcttgaacttcaagccttcgatattcaattcgattccatccatcttgtcagcaatgtaccttctccaatgcaagaacttctcctccatggccgtcaggtcctcctcttcatctttattcttctggataaaactgaggtcgcgaatgaataggtagccgaaagccaaagggtcatcacgctttcgcttcttaaggtccttgaaccgtttgatctgaagatcttcctcgggaacggtgatgggaactgatagagaggtcttgaggaagtctattaaggttcgcttcaccttccactcgtcgatgggtttcgtcaccgaagggctcgccgggaacaccgtaagtttcaacctcaagcgaggcacaagggagagtccgttttctatttcaaaagtctcagttggcgtaaccaaatccaatggtcgaatactcatacctctctctgtcctctggaaattagggttttgcacttttgcttcaacttcgcctaaatctgaaataaatgaaataagattaaatgtgggtgaaataacgagaaattacatctagatactatatacatatatttatattttttttttttttttttgcaaataataccctaaaataatttttatattaacttaatatattgaaaaaatcagtgttatccaaaaaattatcttgatggcgtgacacggaataatgtgacgagtgatagtgctctaaatatgggacgggttttttgacacgacacgtaacccggcacgagtctgagaggcacgagcacgatctgacacgaaaaaatatgggcttgagcacgacacggcacgatgctacaaattagcacgacacggcacgaa

SEQ ID NO: 161226 - DNA, 9956 bp, Cannabis sativa
ttatttccgctggaattacaacagaaattataatgaatattgtcatcgaataatatcactaatattgtaggattttttgcattaatttacttggtgttcaccctcactcaaaagctctcttgtcctcttttttcttttccatagtcctttggtgatagagctaagttattaattcaggttccctagagtaatgaaagtagtgaattcttctactcatgattagtcattgtatcttgaaaagtggtttctcacgtatcctctaacgtaccaaataagtaaagaggggaaagcgtatttcacgtgtctcgactttttttttttcaattattgattttgtatttcataattttgtatttatattcttgttattcaattaataatatattgttatgttcgtttatcttcttctttctctatatttttatttaacaatctcaaaacataattttagttcttgcggagaagacaaacggatattgaagggtattactatttgaaagatggaaagttctccattaataatgatgtacctacacaaagattatcgtcgggtattgatcgaagaagtcaatgtagagaatgcactcctcccgtgtcccatagtcgaagattcattgacaacagtaggtcaagctataaaatgttacgtagcatggccgaaagactatcttacacctgttggaaaaaacttggtatgtttcaatatgtttacttaccttattgtgtttattcattaatgacggtgcaaactttactattttttttccatatatatagacacagccacccaccaagaaacttcagaagcagcctgtgaagagaagcagacaagccactgaagatttactcggtcctccaacagaacctcgaaaacaccaggagaggccgagtaagccaacaagccatggtcgttgtgtcaaaccatgacaaactagctcaatcattaccttctagaactccctcaaaaggtggtcgaagtcgtccataatctaattccaggtttcttatgatctatttggggttgaagatgactctatttggcttgttaaaaatgacattcacgaattgtgcaccatgcaatacttgggagcccaaccaataggagtttgatgcaagtatgatttctaactattaataataaacttaataatgttcttttgacagcgacagttattaattattactttttatcaggcacatgaaagaaagactgttgaacattaatgggctaatcgagtgtatgaatttctaaatctgggcgcgattaattgccaccgatgcaggggttgatagtaatcgttgtcaggcactagtcactcgtatgactaggatgactaattcaaacaaatggcttattgccccatataataatcggcatatgtagatttaaaaagaataatttcagtatttataactcttcatatttattttattattatgtatatattaacagttttacacatatttattcgtgtaggaaaatatttcatgggatgcttgtactcatccacgtgggatacttggattcaggcaacgacgacataccggatgatttgaaattcatcatattcacgtaagttctatatccaacatcccaatatttaagtgtgttctatatttataaatttatatatatatgctaacattactttttgtgtatatggttcactatatataattaaatgataagacggcctgatcgacctatctagtggatgactcctatataacctgaacaaccggacgacaaatagtgtggatactacgtcatgaaattcattgaaagtttcatgaccgtagaagatccaatacacgtgttgacacaagatgataggttctccattgcgtacacaaatgacgagattaatgtaatgcgtgatcggcggattcattacatgaaagcaaaagcggagcaacaacagttgtcgtacgtgctaataagtgtgtgtatatctcgatttattgttactatatagatttgtaaatatatttacataattataattaacgttaacttatttatagatttttaaatatatttagatgattttagcattagtttaattattgtcactatacagattttgaaaaaaaaaaaaaaaaattaatgtagggaaaaaaattgcagaaaatcttttttttcctatattcccaatgtaacgactcaaaaccaccgtcgctgaaaaaaaattataataaaaaacgtaaccagtaccataaggcacgatttaagatcgtcgcctataacagggtataggcatggttttaaaccgtcaaaaagttcacattagcgacaattttgaatcatcgcctattctgcccgttttgcgacggtcgtataggcgacggttatagaattcgacgaaaatacttaaaacggctgtttaaaaacgtcaagaaaaaccagttttatagtagtggtaattaatacaacttgaatatgttcatctagagtcatatcttctaaaaaaatctcatgtgcgattttctaaagctcgtgagattggacttccacaaatttatcgtccaccattagatactttaggtagcaatatacaacatatttttttgttcttgtttcctctgtatcatatttcttttgtaacgtctcccatatttattttgcttctttgtttgaattataataattatgataaaggtcataaaacaaattgttaagaatacaattcttacagagaaagttatattcaatccaagaatccaattctttttgttccttttcatgtcaaacctatttgtccttgtcggtcaaaggttcaaggagaatcggttagacaacattggggaaaaatgggaccctcttcgtggtcagatagaacatcatcttttgtttctatctcttaaaatacaataccctcaaaacgaaaaggcttatcgttagaagcataaccagaaaaatcatcggtggcagtcatagcagaaaaaatcgtcttaaaattgttatatcgaaaaaaaattagaacaagtttactaattgataattctgactgagtcatgaacaatatcgctttcattaagatgtttcgcggctctgcccaaagaatgcatgacagtctatcaaccacgacgatcctaggataaaataacctttgtatacgatttcatcatgcatcaaacagaattgctcaattacaccccgaaatataattactctgagaaaacttgtaaagtttaagaagagatatattttgtgagtgtgtgtagagaagatgtcttctgtcgttggtaggatacaacttatatagatgttaagttgatcaaaataaaaggattagaagaacgctagttcgattgtgggaagatcgtggctcatacgcagttaaaattgatcatatttactgcttcagataaaaaacatgttacaaatcagtaaaaaataaagtgacaccacaccataccacccacccgccagctcggcacacgatgatgacgctcgtgtggtagtctggtctgtgactcctcacccatgcgcacaaaactgggtggccttaaggcccaaacccaaatcactaggtagcacctaatacttttaaaaagggtgttcttattccatgttgaactctttacactataacacacttcacttctagtatgactttttgtaaaattaagtcgaaattccaacaattagcatataattatatttacaaatattaacaattcgaaaaaatttataaaccactaaaataggaactgactatctatctaacagctttgttcctaggtctgaagaaactaatcttgactgaatattttttctttttacacacattaatctagtgtatggctataaactgaaaaaaataaaaatcaaattaatgtattctccttttttcgtacttaaaaatgagtagaacatgtagatattaaattgtaatacctcgcctaatcgagcccgtgcacccatcacaccaccaataacagctgagaagagagtataccatatgtgtatgtctatgagatagatctgaaaaaacaaagaatagaacaagtgcagatccactcagtatattaaagtgatacacaacctggtgaagttttgagatataacatagctacaaggtgttagactactcaaggaaagctaaaaagtgaatcaagcaaagtaattaggtgtcacagtcacaaaatgtttaatatacacatcggtaaaatttaagagatcaagttcaacaaacttcagtctactgcccaccctatgctaacacagattaacttaaaaaatagttcgtggtcagcgacaaggggattaaatagcgcaactagagagagagatactcacagccaccactggaccccaaaggcaggctatggtcatggcgttattattggctacaaaaagcaaaaataatatattagtaatacacagcaactggttaacagcacgagaaacacaaagaaaagtggcaactctttcgactctaacaaactttgaaagaaacatgaagctagttgaagaaagggttcctgaaacccttcaagtggtgcatgccaaatagatgcaatgatgactttatcattcattttgtgttttgaattaagctaagaaaatgatggtttgagaactaatgtgtattagtttaaatttgaataggtgaatatatagaaataagtgtttaatggtaattatggtaaggtagggaagtagtgatgttgatgagtagttaatagttatatgagaatggtttggtttggaagagaaaattgtatgagaaaaaagtagtaagcttttgaccttttggtgttggttaaaatttgaaacccttgtgggtatgtatagttgctagtcttcaagcttttgtggctacaattgtttgctcaagatccttctacttcaaggaatttatccatacatttgtacatatatttcttaagcatacataactagaaaattatagagtaatgttttctataaatgcttatgtattctattgtatttttcacatgtcttgaaaattcttaagtattatacaattatctaaacaatttagagtacgtttttctacaatgtgtagaatattctaggctaaattgagtattgtagaaatgtgtaacaattttggtaactctaatcatgtctcgtagtacctcgaacttgcctcttggtagtacttttgtgataatatttgctaacaaatcatcagtcttacagtgcttgagttctatttctttgttcacttcagtttcacggatgaaatgatacttcatgcttataaacttggtcctgctgtgaaatacaggattcttcgctatcgctatagctgatttgccatcgcaatatatttttagctcctttttgtgattctcccatgtcttcaagagttcttttgagccatatagcttgacttatagttattgttgctgcaatgtactctacttcagctgatgattgcgcaaatgtttcttgtttctatgatgtccaagaaaatattcttgatccaagtgttaaagcatattccgacgtgctcttcatattgtcaaatgatcttacccagtcactatttgtgtagccaatcagtttttagtcacttgtaactctgtaccatattccatagagttttgttccttgcaagtaggatttgcttggctactccgtaatgaacttggcttggatcatgcatgaatcttgatagaagactaactacatacattatgtttggtcttgtagcagttagatagaatagattgtcgattagacttcaaaattttgattcatcagctttcggcgagtcatcttccttcttgagtgctttattgttgtctagtagagtcgagcatccttccattttaaacttcttcaagagtttcatcgtgtactttttttgtaagatgaagatcccatcttctttttgagttattttgatctcaagaaaatagtgctttactcccggatcaatcatcttgaaactcttcagcataactcttttgaatttattaattatatcctcactagttcctatgtagatgagatcatcaacgtatacagagacaatcaatgtatcttttgtatcttgtgttctgatgtaaagtgtagggtcatttttgctcctcttgatccttgctcagtgaagtagttgttgattctattgtaccaggctcgcagagcttgatttaggccatataaagccttttttagtctgacaattttatcttcttatccttgcatcacgaacccttgaggttgcttcacatatatttcttcttcgagagcaattgagaaatgttgaattaacatcaagttgaaatatcttctatttcttttgtgcgactagagaaattaaagccctgatagtgtcaaggcatgtaactggagcaaatgttttattatagtcaactccatattgttttgtcttgtagacccacttgaatcttatggtatctttgtcttgtggttgatctataagcttccaagtctcattcttttcaatcttctctatctcatcattcatagcatttctccatacttcttattgttgagctacttcaaagctttttggctccataagcactaagttgcaagtctcatcagctagcagtagcggtcttgtttgccttactagtgattctggtagggacttaatctgtgttggttcttgtgttgttggttgagttggaacttcattttgatcaagttcttgtcttggtagtagagagatgttgacggtctttcaatcaacaccttgtgttttccaattgtatgcaacatctttgtgaaatctcacatgtcgactaattatgagcttattagtttctaaactatacactcaataacctttagatgtagagtactatagtctaagaagattcctttcccattcttctcaccaagcttggctcttttatcttttggaatgtgagtaaagcatatgcagctgaagactttgagatgttttgctgatggcttacatccacttcaaacttcaatcgatgtcttattctccacagctttggttggacatctattgagcaagaagactgcagtgcttgctgcttttgcccaaaatctttttgggagacccttctacaagagcgtggttcttgttgcgtccataataatcacgttcttcctcttagatatgtcgttttattcttatgtatccaaaagtgagttggtgctccatgccttcatcttcacaaaacctgctgaattcgttagaagtatattctttgcctctaacacttataattgtcttgatgttgtgaccgcgacacgggtttttgaattttttaaaaatatcaaagacttgcaattttttttttttttttgcataaaataaacccatgtgggaatagccccataaacatctatatgaaccaactcctatggctttttggctctccaagctttgccggatggaaaatgttgtcgatgatgtttcccgagcatgtatcctttgcagactgtgttcatctctttaattgtcgagaagtctcgtatcatattcttctacttgaggatatttagcccgcgaaagttgaagtgattaaaccttctatgccatagccatgactcgtctgtttgcgcttgcattgtcatattgcttgcgtatctccgttgtatagaaaagcatctgttgttactcatttttacctttgcaatttgaaattattaatcatgcttatcatagattttgcaagaatctccttcaaaatgcaacaagtaccctttttgaatcatttgacctacactaattaagttttgatcgatgttgggtaccaggagtacatcattgatgtatctcttgcctttcttagtgtcaacggctatggtggctttgccaactgcttccatgaagtcatcattacaatttttgactttagtcttgattttttcaagactacaaaagatgcttttcgttttctgtcatgtgattactggaaccacagtcaagacaccaaatatcttggcagtctggaagacatagaagaggttaccttaattatttttttaatctaaaacaattgcttaatgggatttctttaaacgacaagctttttcggtgtggcaaaaattcttacgattttggcactgcgggcttcctttaaaccagtaatctttctacaagtaattttttcttttacaaatgccgcatggaggatactaatagtcattttcattttgtttttgtttttttttttttttgtgattttcccatcaacttttggtttttgagaccgcagattcattttagattgaaaagcattttcatcttcattttcattacgcctttctcgtctactatcatatgcttcaagagaatgcattagttcagttggtgacagagtttctaaatcttttgttttctctatcacaaaaattactgaatcatatttttcagtacaagaaattggtatcttctaaactattttcttgtcagaaattatttctccatttgatttattacttctttaatttcagagtagtaatcttttgcagtctcataatttttctttttaagatttttaaaatctcttcaaagctttttgtagtctaactatgtgtaccacgggtgctccttgaattcactttcagagctagagcgagccacaacatgttgcttcttggcagatcatgatacaagattccctctaaaaaacatgacatatccacctgtgctctttctatcatgaatacatgatgcccaatctgcatctgaatacccgtgaattgttaaagaagttgcaggagttaaatgcaacacatgtaaaattgttcctttgaggtatctcataaatcttttgcaagcttcccaatgtgttgaagtgggagcatgaatgaattgactaagtttgttaatgatgtatgcaacatcaggtctagtgagagtgagatactgtagtgctccaagtgtacttatgtacaaagttttgtcttcaaggggatcaccatctgtaagggacagttttgtgctggcactggttggattcgagcaagctttggccccctccattttcaacttgacaagaaggtcagtgatgtatttagtttgagacaggtacatcccagtggcatctctgaatatttctacctcgtaggaagtagtggacactgccaaggtctttaagggaaaatgactggtgtaggtcagagatgaacttattgatgagagtaacattggggcctatgacaagaaagtatcaacatataccaacaaaatgattagttcgctacctgaaccataaatgaatagagagttgtcaaacttggatggagagacaccccattgagtaagggtgcctttgagagtttgattccaggccctagaagcttgtttaaggccatatagagccttatgtaatagacacacatgattaggtttggaagggtcaacaaaaccttctagttgtaccataaacactctttcattcaatgttccattcaggaaggcattgcttatatccaattgtttagttgtccaattcaaagacactgcaagagtgagaataattcttacagttgctggttttaccactggagaaaatatctcttcatagtctatcccaagtgtttacaagtaacctttagccacaagtcaagatttaattctatttaagctaccatcaacatttaatttcaccttgtccagccacttgttgccaataacagtcattctagggatgtagggcacaagagaccaggttccagctttaaactcatgttgcatagttttgaaccactgaggatgtttaatggcagtagcagtcaatttggattcagagggaataagtgcttctgctagagggaatttagttgccaagtaagatttacgtttggtaatgccactttaacttcttgtcctcattccatgagtcttgatggttatattggtgtgtgattcaggggcaacttcagtaggtagagtatgctgagaggtgatgggaggttggtcagagatttgtggtatgggtgggggggggggggaaggcatgggtta

SEQ ID NO: 161227 - DNA, 10607 bp, Cannabis sativa
tatgtacttttagaatttttggatacatgataagttgtaattccatttttttacatgacgtcaaataatgcagttacaatggacctttcacaaatttttaaaatttatgaataatttaagatgttaaaatcaggacttgaacagcttgttgcatttgaatcttaatttcagcattttaaattatttgaaactatctaaaaatttgtaggacgttccctataattacattaatacacttgtcatgtgaaaaaatggaattgcaatatatacatgtaccgaaagtactaaaagtaactataaataatgattaaaaacaacccctacctaatcgttttctatatgtatgtaaatattactacacagcacatagtggtcaactatcctattacatagctacagtaagaaaaataaaatacacaagttacaattttatagttcaattcaagcatgtgttgtaagtttcaatgaattaagttacagtgctcctaacctgaagaattgcttcccgggtactcagaaaatctgggttcaattgctttgaagagcttgtagagagtacttcttttagagccttaaatgcaatggtgaaacaaacatttatgtcagtaaataaaaaacagctagaagaaaagcttgccaatttcacttaaatacaacttgtgtctctttgtactacctctttagcttcgacctcgtcattttttaatctgcacagaatttggcaagctcttttctcaagatctccaatcctggttttttctgcaaaacaaagtaaaatagttcaagataaaaaagtgcatggatacatacaggtgcattattatatcaaatcaaacggctaaataaaagggctataccagatttcgacaatcctaaagtctcaatatctctccaaacattttgagggatcaatgaaatatcttcaggagagctgtacagacaagcgccagcaataagtgccaatgaaagtcgtagcaatgggccctcacaagttggttgaccaagctttcccagcccatgaacactatccgctgctgccaggaaagattgtaattggtgcctaggagcaaatgggagatattgcacaagaagggccattgcacagttcctcagatgtaaagacacgtctgatgatgccaccacgataacatgatcccatgtacttgataccatataagtaattgcagattcgggaatagacatgaccaggccaggggaaagactattgcaaaacctaaaatcttgcaggtgagttcttccattcatatcttggccaacaagttttcctaaaagctgaagtgctatgaatcgttgttcaggctcagcatgacccaacagtgtacagaacaaattaaccagagaagcctcacattcattaacggcatggagatctctagccagtaaggtcgatagccatttatccgtctgcaaacgcaaagcaatttttggcgcactgcatgaattattttttatggcagagcaaataaaaccaatgacatcactcagcacaaaacagtggggtactctgagtagacaatcaagcatcacagaagcaacttcccagcaacctttttcttgaagggtcagaatagtttcagaaattccttcaagaccaaccctccaatgaacaaggaattggtcagctgacttggatgtgctagaggtttcactgtcaatgtcttgcatattatcagctttctgtgcaactgatgacaaacaccttgagtacatgaaacattctgctgatgtaattgtaagcttcttagccagttgatgatgaagattccaacatgaatcaattgttgggttaagtttaataatgagaacctctaagtctttagaaaattcttcaatttcctctgtggacaaattgagaactttctgatttacattaccagcgtcactgctatcctccaacttaatagggccttcgttaaattcgttttggtagacatcacttaaaaaccctaaatgtgaatccaagttgttacctaggagtccaccagttgatgactgaagtggaatagcaccaaataactgtaacatctgaactaacagaagtttgcaacttttcataacattctggaatgcgacaagataatcatagaaagaacttgttggttcgaacgcagtaaagttagcccaggacagcaaggagtgcaacatctcccttctacgtcgaatagacaaatcaggaaaaatagaagccaaaatgaaaattgtcaatcctctggtaaatggatcctcggtagttctgtcctgatttctatcagatttaatgttattgaaaagttcatcaaaacacaatgattcaaaattaagacacgagtcttcatgtaatagtctttcctcatcagacaccttacttaaggaatatgaaatgattggcttcaacaaacacaaaacagagtcgataaatgaaacgtcacaatatgaagctctagaaagagacagaagcacttgcactactctagggatctcaggcaccatagcctccatgtgctcagttatgatggcttctagtacataaaggacaaccaccttagcattctttgcaatgtaacctttcaaacaatcataattgctttctgacgccatttgatccacatgataaaatggccacaagcacaactcagagaaccaacataaaatatctggcatggcagtggaaggaagggatctcaattgtgacccaacagcctccaaaatggtttccccaaaacctccaaattggtttttcatattcggaaagaacttatatagatcagggtaaagaacatggaaagaatgaaaagacttgtattcatgtcgttggctgcaaaattcttctaacttcacattttcgtatccatggttgataaaattatccactacagcaagctcatcagcaaatatagataacaaatctgtcagctgttgcagatcagaagcaaggaaaattcggtcctgtatatactctcttgcattacgagatattgccatccagccaagaaaccgaactagaggagatgtgcatctagaaaatgaagagattctatttgtccaggctgaaggaggaatcaaatttgtatagctgaaaccattgttcttattgatagcaaattctgccccttcttcaccactgcttgaagccactaccaatctctgaaggagtatccatcgacgttgtatcccatgtattgtttctggctccagattaggttttccttcttttaattggtaataaagggaagttaacatcccatttaagcactcagcagatcgtaatataatatcaatcacatgttcagcactgcaatatagctttgtggccgagtgcaacaaaaaaacaagactctgcaagagaatttcatgcaatgagtgatgttctcttctcaacctttcaattaaaaagttgcacaacagagattgattttgtcgaaccaatgtgatggcatccacagcctgtgtatcaagtaaagacaagttcacaacttgttcatcagatatatcaacataacacgaaacatcatcgccaccagacatcttttcctgaaatttcctgtctaattcagcagccttgagcaaaatttggagaacaattttatctcttttcttttctagtagagctatggtttctaagtcagttctagactttccagagacttttctctcaaaatcgtgttctttgagagccctagtctctttgatgttgatctggttctttaacttcggaccatttttgaaggacatcataaaaaaggggttgacatagcattcagcagccaagagcaaagcatctattgctgcatcatggctctccattgtaatcttatcttgggaatgcaaatctaaggccaaacgctgaaactcagatgctctaagctcacaatcttgatagtttataagttgaaagtaatcttcctgtaagttgaagtattcggcattaaaacctgtatctattatcaagtcaacatgagactgcttgggaaagattttttcagccaccagctttggttctgaactggcacctccgaggttagagtcagtactttcattaaaatcattatatacatttgtaagtgagatgctacgtagttctattggagcaaaaagaatattgacatcttcaaaaacatccattttagtagcactatcagcgacacctgttttgccatcaagttcatcttggttgtttgattttaaacaaactaccccaaggcaaggattactgggattggataaaccacttgaagattcaagttctgagggcttcaaaatagaagctcgaaggtctatttcaggaggtaattgcatgcgaggttccaatatagccagaagaacactggaataagaaataaatacgtatgtttagttccatacaacataaattatcttagcgagtttctctttttgtcttattctttatctttatgcggttaggttgctctcctctgctgttttattttaataggagacaataatttttattgattaaaaaggtattacaggaaaaaggaaaataaaatcaccaaaagaacaaaactaaaaatctatttagaaaaaaggtaacttaatcatccaagagaaattaagggggaaatccttaaatccttactctttttcagttgttgtctaaagggtagatggggtttcagactgttcaaggtaaaaaaaattaatggtttctgaggatgattgtctaaaattaagttctcacaagacattttgcaatgttaagcaaactaggacattacatagcatgatcacatgaataatattacctaggagcaactgagccacgcctccattcagattccaaagagggtaaaactgccggcttttgtactgctgtacgaatcacattgagagcaatcacacaattgctttcttgtttttcaggataagtagaagagagatgtccaaaggatattgtgctcttgaatgaagcaatggccggatcaataaatggctctagcatctccacaagaaagagaattttatgcttgacttcctgaaacagtgaccgaaataacaaactaacatcaccattctgcaatgtctacataagcactgttttaccaataccaagaaattttactcgttaaggatcttatcacttcacacacgtgagctgcacaatattacgcatttttataaaaaatatatgtttctcagtcagagaaaaatactcagtttgccaaatcatgtccttttttctgcgacaaatcacaaaaagcaaaaagctttaccttatacttccccagaatgtcgtccatatgaccagaaatagccagcacaatatattttaaagcagcacgagcacgagccagggaatgtttatcctaaagtacatgacatgtcaaatagaagagcaaatactatgtttgaattaaaaaaaaaaaaaaagcaagagccaaggataacatatccaccaagaactctaataactgctgcagtgtaatgggaagaaagaaagtacttaattaccattaattgagaaaatgaaagcttatataacttcaaaatgtgtacaatatagctccaattgaataggtatactggtatagccaaattttcatttatatttctctttttaatagggttttttttaaatatttcttttaaagacttttgagtttaggtatttgacagcattttttagacaaaacatgtgaccactggccacaaaagtatttgttttgtttgtagagaatagacaacaatacctggattgtacccaaaagatcctctagaagctccacagttagatcaacctgtaataagcaaacttgcagagttaagaattttaaagaagacaagactacacgtattcaagccaaccaacaattcattacaaaaatttgattgcagaatgttcagaacataaatatgccttaggtgaacctttgcaatcacttgagccatccaaggcgctagaacactacagcacaggtcaatcaggacactagcagccttgctctgtaaaaggagttgctaattagtcaatcggataaacataaagagttccaccaaaatgaaataatttaattcatacataaaaattcaaacacttttagcatatgtaaaattctgtggttcacatctgcgcagggtagtacttatagaacagacgtaagttctgaaccaccagatgtttactctttatcaaagtgagaaaaaaaacttcaatctgttaatggaggacgacgataaattaaaccagcagcacaatacgttatccacttcagtattaccaaaagccatcgtgcaatactgaaacaaggctgcatgccactttgacaagcatgaatttacattctggatatgtagtgtcaataattttgcatgctcccccacatgacatattgttcaaaacctcttttatagacattttctttatttaatttcttctttttcaaaaaaaaaaaaaaagatagttctgttgttgttaaggtgcttcttcttaatgttcttttgcatttctacagttccaccagttttttttttttttccttatttttggtagcttggcttcaatcgaatgatatttaagtttgcatgaaaatatatctctattcagcaataatcagcatagtagttattggtaaaagtatacacatatatgtctatacatataaacacaaaaacagccatgatgaggattaaacaaacaaacaaaaaaactaaatgaatccagagaaacgaacatgggattgagaaaatgatgataagtagccagcacaggcatggagtagcggacggtataatgatgacgacgaagttattacgatctgcaatcatagccagaattgtcagcaagctattctaaaagaatctaaattatggcttacatccaaactaaaaagtcaaatgcaacaattggaaacaaacaaaacgaattcacatgacattgaacgtaacctgagatatggcttgttgtaccataggctgtctccattgagaaaaattatcatcaaccatgtcagaaggactactcactaaaggacgaagtgctacaaaaccaccaagaacaaagaactattaaactgccaattctaacaatcaagccaccagtcaagtgacaaaagttttggaaggggcttaagttggactcaaaaaacttatgtggccatccaaatctttcgttttttttatcatcatcatcatcatcatcatcatcatcattattattattggataagaaattaaattagtacattcatcaggagaaaaagaattaccaatttcatgttattcttagctgctcacagtaatcactaaacacatcatcttacactaaacaatttggcactcattcaagtagaagtagccatatatgatatatgtaagtgcttcatcatgtgatactcacctggcagcaatgcttggaccaatggtaatgcagaccagaattcagaactgctcgctgccaatttactgcagagaacaggctgagaaacataaaggtaaaacaagaaataagtagcggaacaaccagattgtgaaaaaacaacagaaatcagaaatcacatatgttaacaaagaggttatatatccatgttcatgtaattaacctgtgacgcacaggcaaaaagaacgtgtaaaatcccttcttccacagcccctaaatccaagatgttaagatagttggagtcccacagatcatccggtagctggaattcttccccaaataaatttgagtaatcaagtaagagaatgggattaagtaaatcagatttgaatgattcatcccctgatgttgcttcactaggagatgctgatgtttcttgcacagtaagaggttctaaaagcttttgcagtatacgagaagcctgagagcaaggtggaattacagttcaaaagtaaaataaaaggttgcaatctctgatcaataagaaattagattaaaagatcaagagagggagaattaaaagaaataccatcctacaaacaattcccatatcagaatctttgcatgcctttctcaacagcatgaatatcagatctggacgaaacaccatagaagtagatgtggataagataaaaggtgtactgcgtaatttccgtggctgtatgaagataaaatgaagatgattaatatcaagatcatgatgaacattcagaaataatcttgaatatcaagaacaaaactcaacgtatttgttgaaaattcattttccctttatctgttacaaaatatcagagcataaaatgctgaacatcaaaattaatcctgcttgagcggatatgaaaaccagattcccattattaaatgaaaataggataaaaattactaaaagaacttgaaataatgtacttgaataacctaatatctgcagcacagaaggtataatattgggtaaggtaaagtatgctaagcaaaaattacataagactaaacattacctcaaagttagatgaaacagtcaaagctgaagacagctgactattcctagaaacttcagagtcagaaacacttcccgcatactttgttgtggccctacagtatcgaaggtagttagacgatttggtggaagaaacatcacagctcaaacaataggacttaaccacgatgcatcctctgacaaagaagaaaacagcttggggaaaaggaaatgactgcatgaaatgaggagaccgttgtattccatctaaataggcatgtagtagacaaattgtagaaactatagattacttgttaagcatattattccctttcttacacatatatgtttgttatgctttttaaaaagctttcagaaagtgaggacactttttgtgattttctttagaaagtcctcatgaagtaaaaaggacaagtgtttcggatgtgcacctctatgactactctgtcggtcccaatactccatcatatgcacgcattaatttgtacagatacagaatatagcccaaaatggataatcgagggcgcatatcgaatgttacaatgatacatttgcatgactctgctacaatagcattaattatcactagtactagcagattacaaagggtactttcatcataattttgtttgattgcaaagtttcaattcattccgtacaatatcttgaaagccatcattttagtggtcttgtttctcccaatgattcaaattccaaaacttggacaaaatcactttttgcttattatttgtaggacgtcctttcctttgtgcagtattaaatagttagcttcccagaaaactccatagcatattctatttctaaaaactaaaagagagttctcaattcttagaggaatgatgaatatacatacctttcatttatgacataaagaatcggataaaatagacccgcaagcatagcaagaaaccgtaagttaggttctgcagcatctgaaaagctgttgagctctgcctatagagttggaaaccggaaacataaaaaagatatgttatgacttatgatacaacatacaagcggaagaagcacaagcaagaaagaatctatataaatacctcaagttgggggaggaaggcatgtaaccgactggtcatgtcttgaagcaactacatagcgatgagcataagatacaaaaatgttaaaaaagagtaaagagcaaagcatagttgttgcatataaagtgatccacctgaagatgcatatcatgagcatcttgtttatgggaaatgatttgaggcaacaagtggttcacaacaggttgaaactctggttcaaggccaataactgaaactccaatcagctgccatgaaaggattgattttattgtgtaagaaagaggagtttaatattttaaagtaaacaaatttgatcaatattagaaaagaaagaacctgtatgaaaaaaagagcaattgggtttcctcgtaaacaagatattctgacataacgacatggagtgtagttcattgggtacacaatgtctcgtcgaggagcttcacaacgcgggcgtactttgacaaatgtctcaggctacttagcataagcattagaattagaattagaaaaacaggagatgaagatgaataagctgaagtaaagtagaggataatgatggaaaccttgaagcgcagaccaagagaaatttcccattcgagaacggacttgttgtgaatccgaatatgagagagcaagcaaggttcctgggaacgaaaacagaaacaaaaaaacccttaaatccaagagaaagagatgattatgagtgttgaattgaaaagtgagagaattagggagtacgttgagttggagaagaatccactccttggtgttggtagcagtagaccagtgggtgcgaaggtcagcgtcgaggacatgagcagctttctgagagggggactctctggatgaggccttgactttgaaaggcagagcctttactcgcccttccatttccatctccatcatctctctcttcttcttcttcttccacttctgagttctgacttctcccccttcgttcccattttacacttacagtttctttctattcaggccaatttacaatgtcagtccttcaagttagccaaatggtatatagtacccgaataaatattattttggaccatttgttttgtaaaaattaccgattagtttttttattttgttaaatgataaaatagaccttgtattttttaaaatagta

SEQ ID NO: 161228 - DNA, 1319 bp, Cannabis sativa
gtttgaagtgtgattagctatgggtttaaagtcccttttatagggaatttaggtggaatatataattattggtatagattattaattagttgtgtaattaattacatagtttgcactttgcacgacattatatcataaattaagaataacaaattttggtgctttattatgatatagttggatagctaatatatagacgtgctataaaatcgtgcgtgtgacatatttttgtgtgtatattatatatatataaatatatatatatatatattagagaattaattgtgtacatgtataacattatatattaattagagtagttttatgtgctctccaaaaaaaataaaatagattagttgtatgatataaaacatatttatgtatgtatgtgtttgaagatttcaaagtcaaaagttagaatatttcatgtagttgatacataaaacacaatttttgttttcttttttctttttttgttttaatagtgttcgtaaaatagaaaattttacaatataaaaattaataaagataaaaattaaaagaatacagactaagaagagaagaggatccatactaatgaataaatagccatgtgtttgcaatgaggtgaaagtaaaataatcaaaatataacaaaacaagtacataagattttattatgaactctttaatgaagtttcatttaaaattatatattgaatccttagatatcaccaacgatgacattttaaaagagtgttgaaaactttcatattacttaaatatatcatattttattttattttttttccacattattttttatattttttgttttaaaatgttccaatgataagcaactctaaaaattattaaaataatattatattttacttaatatatattaaacaattaaatttttttactttatgacgaaataatcgtaaaaaaacaaaaaaaaaagagaataaaaaaagttattgcatagcattctgttttagtatttttttcaattcaatggtaacatttattaaaaatgctaaaaatatatcaatatcatcaagcactttttaaaacatctccattattgacatgtgattgattctaagggtgatagattagtggcttggttctagggttcaccaatatctctcctttttagatgaattcaacaacattaactacatatgtcaattgcaatgtaaatgtaactctttgcacgagcttaatgatgcatgtagacataaaactatggtgaaagggaagtgtgcgtgtgtgttggagatcctgggttcgagtcccaagttatgcaatgtaatatataaatgcttaaataaaaaa

SEQ ID NO: 161229 - DNA, 9316 bp, Cannabis sativa
gagggattacacacaccaaatccaccgtttgctgcctccttgcacttgctcttaaagacgagtatccactattcccaacaactattcttccataattgattacatcagcactatagcactacatgataggtgaacaaatgtactctgtaaccacagactgagttcaggtctccttgaaaaatgtacggaggttaccttgtcattagattaaaacataattgccatttcaggaaaaaaaaaagcattaaatttgtcaattaaattgctattctcatattcatatggtcactcacttactcacttaatttgatagttgaaaagtgcttaatttcatcagcaagatacccgcgcatggtaggtggctaccttaacttcagtcattactctcaactacccgcctttattctttattcttttttaattattatttttatttaaaaaaaaaatcatcttttattaaacggagcaatatctaaagaaacacaattctcctttaacatataagatcaactaataaacgataacaaaatgcgcaactcgatggcttgacaaaaaacaaaaaaaacatatattatgaagtaaatgcaatataatatatataccttacgatcctcaataatcaacacaaacggagagcccatccacaagtgctttgaatagactccactaccaccaagctatcagtttccaccgtaactaaggaatatttgttcgattttagccaactcaaagcctctttaacaaccatggcttcagctgattccaccctccccactttacaccgagtttgagccaccgtcaacttcccaaccatgtcttgaacaataaagtcaaaaccaaactttcattcttcttcaaatagagtcgcatggacatatatatcgagacgcttgaaactagtttcgtcatagctcattttcatcatctgccgctagcccacataatagaagaatatttcccctaccttgagatttaacctattgatcaagactaaaatcaacaaacgtacataacctccaatgcaccccttctccgctggttccaaaccacgtcattcttggcagacgaaatcgcccacaacaccgttaagaccagacataatctaatcccatcaatcctatatttaaaagggtaactatgattacgtcaaatgttattatatttagagtaatgaatattattctataaatgtggaatataaatattaaattaaaaaacctttaaaatgaagaaagagtttaaagcatactaattaatttagtgtatttttaataatgctcttaatatatatattttcttgagtgctctcatagcactctcaatgacttctctattctatccttaaaatatattttcaaaattatatatattttttttaatttacacacacttttgtattacacgatacattaacttctttaaaatacatcactaaaatcctacttttttgaaattttattatatttattcatttcaaatatataatattaatatataaatataccagttttttggtaatttttccggcgattatgcatactccgatgattttttccaaaatttgttgtcggtgacggaaaagtcactagagtagctgtcaatatcaggaaagtcgttagaattgacattgttaccgaaaaaatcaccaagaaagtggttacttcatcaagaaatcggtttcttcatcaagttggtaattttttcagcgacaatgccaatttcgacgaattttttggcgtcggcagaaactctaacaacttttccgacaccgaccactattccggtgatttttccgcaccgacagcaaactccggcgacttttccggcatcagtaataaataaaactacctaaacaaatgaaaatattaaatatgggatttgaaaacttaatttacatatatatatcatatcaaatactataaaaaaatttaaaaataaaaaataccattaaatttgtcaaagttaaatgtgtcatatttaaaattagtaattgtaatttgctctataatattttgtgtaatgttttttaaatataatgtaaatgggcctggacaggcgaataaagcccaaacctgtaggagaaaaagaaagaccacaatcggcatatattcttctccccgccatgatctactttctacaggattcatctctatttccctccatctacagctacaacacaatcacccgcgttctcccctttcaactccataagccctagaatttgaatctaccgtagagagtcctcacaatttcacaggccctgaacaaacctaaatttagctctacctatatttctcggcttctctagggctcttccgttgattcgcttacttaatttcggtcatcagaaaggtacataactaaattataagtgtttgtttgcttatttatattggttaatcttttagccctttctttttccttcaatcctttattgattatgagaaaaaaaaaatatgaataggaggggtaaaatgtcgatggatctgatactgaagccaacgtgtagtggatgtggatcgccgacggatttgtacggaagtaattgcaagcacctgactttgtgcttgacatgtgggaagaaaaaggctgagagccgcgccacatgccctgagtgtggcgccactgttacccgtttaataagagtacgctttctatttatttttcttatgttacccaatatgctcacgaattcacctgggttgtctttacaatgtaaaattagccctttcatagtcttggctattgttttcttggacaagcggtcgtcgttttgcaaccctaaatttacactatgcgatcatctcacctatttttttttactgtgtgtgcgaccacgcgactatcacagtttaaattcaatgtggttattttgcaaattttacactagtttgtcaaatttctcttctatttaggaacttgtttgttggattaagttttctactgagacagaacttatcttcaatctaaataaacatgacaatgtatctgaaccccggtgctttccagatggtttatggaagctatacattgtcatgagttagaatttcattttttttattattgcagtatattgtgagttttgttgtgtttatttatacttttttggggccacaggtttatccatttcttggtcgtttccgtgccaggaatataatgttcgagccagtaccagcaatgacaagaactactttattggtagatttgtgactggcttgcccagcttttcaaaaaagaaaaacgctgaaaacagatggtctctccagaaagatggattgcagggacgccagcttactgataccttgcgggtactggatcttctctacttagtagtcactggctacttatttaccgtttgtagttatggagattgttagactgccatggacttggaataattttcttcttaacttataatctggaaaatagaagcgttcttgattgtatatatatatatatatatatatgtatgtattgtggattaagtggttgattgttagcatctgagcaagtttggatttgtttatcaatttctttaaaagtggtcatgtcatggttaatgtcaatgtggaacttattctaatgtacttacttaccgagctagagcaagctagcaactgaacactttaaagattatcgtggagtataatttattcacctatatttgtttaacatctatatctatagccctttgtcagtgtgattattgttgtcttcctttcaaagttgggatttccattatactattgtctgccatttttttgaatacacctgtatttgtttaacatctatacctataacccttgtcagtgtgattacgttgtcttcctttaaaagttggatttctgttaccctattgtctgccatattttttctttcttttaatatctgcatctgtttgggcttctcacataataaagtaataaatttctttaaataggagaagtacaagaataaaccttggcttttggaggatgaaacagggcaatttcaattccagggtcatcttgaaggtgcacaatcagcaacttactacctgctgatgttgcaggggaaagagttttctgctattcctgctggctcttggtattatgctctttgatcggatctggttcttacatattagtgctattttgtttttctccctccttatttggaggcaatattgaattccatcatttgataggtagaagcaacggacaactgaacctcatctattccactttgttttttctgtagttattattaaatttttggtttctataatattatcatcagttatggtgatgatatatgtttaacttatatatttcttaggtacaattttaacaaggttgcacagtataagcaacttactctggaggaagcagaagagaagatgaaaaataggaaaaagactgctgatggctatcaaagatggatgatgaaagcagcaaacaatggacctgccgcatttggtgaagtggataagtttgacgacaaggaaagtggtgcggctggtgggagggggcgaaagaaaacctcaggtgatgagggtgaaggaaatgtctcagacaaaggagatgaggatgaagaagaggaagcagccaggaagaataggcttggtttgaataaaagagctggtgaggatgatgatgatgaaggtcaaaggggaggtgatcttgatttggatgatgatgatgtagagaaaggtaatagtttctctaattgagaccgtgctcatttttttaaagagtgttgctgtcaccgctggtgagtgacctttgtgtttaatgcagatattctattagtatttctagagtttggaactgaactttaacttgcttcacaagtatagaccatgaaattgattctgtttcttttgaagctttaattttaaattcttttagcctttatttttattttcatcctttttctaatagcacgcaagataatatatactttgtaattctatctttacatatgttgcaggtgatgattgggagcatgaagaaattttcaccgatgatgatgaagcagttggtaatgatccagaggaaagggaggatctggcacctgaagttccagctcccccagaaattaagcaggtttgcttctgataccaatttcacacgtttatcttaattctttagctttgggggatgctactatttgtattgaggatataatctaaactaaatgcaaaatttgagcactgatgcgtgcgatttctgtaacatgattttgtaggacgaagatgatgaggatgatgataatgaagaagagggtggactaagtaaatcagggaaagagttgaagaagctgctagggcggactagtggcctgaatgattcggatgcagatgatgatgacgatgatgaggatgtaagctgtgttaattttctgtacttttttacttttgttttggggcattcaaaaaattgataaattgctaaattgaaaatttgaggatattgctaaattgaaaatttgagtttataaattgcattgctgttttattattatttttattaaagaaactgcaaatagatcaattttttttgacttggggtccaataaactttaaggaggaattttttgttttaatacgagtaccccttttctggcttgcctagatggacgatgacattaatgtctcacctacggtggctacaaagcagaaggatggacctaaagaagaacctgctgagattagtcccgtaaaatcaacaccttctgcctccgctaaaggagccccatcaaactctaagtctgccaaaggaaagagaaaactaaatggtgatgatgccaaaccatctaacggtgcacccccaaagaaggtgaagacagaaaatgtatgcctttgtgatcaaagagagttcttttatatacatatcaaactctgttttttgtaagcgatgaactctcctgatcttataaggctcaacagtagtagtttacttagtccttttataatgttactacaggaacaaaaatcttctgaacctgcagctgcttctaaaagtaatgtgccttcaaaaggcgcaccggcagtctctaaagccagcgggacatcttctgccggacctgttactgaagaagaaattagggctgttttagtgcagaaaacaccagtgacaactcaggatcttgttgccaaattcaaagcgagactcaaatctcctgaggtacacttttctcgtgttttcttcttttttttttttaccaagtcttccaactcctggtttgctgtggtttccagcaatgttcctggaatcttcaaggcatttaagagcctttagtgaagagagggggatttcgagagaaatacaccaataatattttatatcacaagcattgcaatttgtggatatatatatctacctatgtataataataatgactatataaacaaccacctactctttctttcttcaaatactgccaaataaaaaagttggccaagttttgttttgggttctagctttgctagcctaggagggagagaggataaatgggaatgagggaccttagtaaaggaagatagagaggaaagaggagagcatttttctcttgttacctgttcttcatttacaaaataccgtagacggatggaatatactgatttttcattggaagaaagatactagagtagaaagattttggagggaaaatgtctaatgcatccaaaatagaatagagaatcggtggtactctactcattgactcttcgtgtttatttgcaggataaaagtgcttttgcggaaattcttaggagaatttctaagatacaaaagaccaatggatctaatttcgttgtgctgagggagaagtgatgaacttttttctccacatttatcataggggtgatcaccgataacacagtgtcttgaagaaatagtactcatgcacatttcaaatttgcctatttgtctccctttccatcagtactgtataacttcaaaactaccattttacgtgtaagtcaaaagtcctgccgagaataaataacaacacatatttagatattacatcatgattattgttgtttttgcaaatctgagcttggtcaagttttgtgacagttcgtacgtagagattttgtctttcatttgacctacattatttagcccataagagtatataatcttaaaaatacggaattcatttcactctttagagttacattagtacgaataaaatgctcaaattgatgaaactatttgctaataccagcacaatagatagcatacaaacaggtaactaaataaatacagcactataaactagtggttggtgaggagaatgcagagtaatccagctgcgaatatgagaagggtgcttgcggttgattgggccgaagcagatggagttgagggcccatcagccaaagcagtttgatgctcctctgttgcagtgacttgaagaattccaggcccagtaatttggtagggaagaacctccacgtgtaatttgagaccctttttgcaatgctcagagttgctactggcaaagtagcgtaaaccttcagcttccagggagatggtatccagaccgtccgtgtacattttgatagggttactcagatcacatgcctcgtattcctccttgcttcgcagctcagctacactaccgtgtgctgcggagtaggcgaaccctgccctcaaccaaattcatcagtaagacaaatacgatttcagagtcacaacaaactcgtgttacattctttgactggtggatgggactcccatgaaaataaaaataaataaaaggtgattatattctttttcttaatatgttagtgggccaattcttctgttcttcttgatatgggaaaagcaatggattggatgtgatactccatagtactccccaatccaaaagatattacttacttaccaagatttcaaaaaagttataaaagtcctcaccataaaatatgattttatctatagaaaaaagaaagaaagaaaactcaccaataaaattgattttaacaattaagaaaaaaatattaattaactgagctcacaaaaacttcatttaaaccacctacaatttgtttttgtctctgcctttttcttctctatttctttttatttgattaaaattaactaagcatttttatcaataaaaaactactacgaatgaatctaaattttgaagagaaaagtggataattcttattttcaaacaataaaattttaacataaaaaattgaacttggcatttgttcatactttttctaaagccatttactgaactagaattttttttccttttttaacaaataccaaacttgtacaacagtacaaattaataaatgcagtacagattcggtgtaaaattaatgtgatatttgatatggccgggtaataaattaagatcgaaaataaagttgggaaagagaagaaactgagttagtagtgttagtgttagtgtactcacagatttgatctccaaccctaaaggttttgccggaagcccaggtagcgatgtcgtgagatgcatcccagccacggtctcctccaaccacatggtgaacttgggcttcagcccattttcctcccagactcattgtcactgctaccataaccacccccaaaaccaccattttctggacttctcccattgaactaatacaaaaactacggccttgacactcttcctcacgattccctctatatagagagagagagacagttagagaggatatagagggaataatgtatatatataataataaataaaaagtgatggcaaaagcgaaagggcgcctatagtgtttattatgttgatgcagagaggagaagggacataattacataacaacataaaagaaagagcaaaacgggtgatcatacaactttccacgtagtttcctttttaacctttacccaaccaaacgaactaccggactggtaggttcggtaagaatcttccttcgggctcagcttaggcccactttgtcatttcgaaaactatcaattttgtaataactccatcggaaatagcctattaatattcactacttacttactaaggatgacaatttagatcaacatgactctagattttacgagctcgacaagacacattatgagtattgttcgtatgttatcaaaatttgtatgtaaaataaaattaagaagaaactaacacactaaaaataacaatttaatttacaatctactaacacaacacaaaatttgtgagttttataattttttgaaatttttacactaaaaatcttttctaaaatgataaatttattacattaatacctatacacggctaaaccaacttttttactcatcttttatattttattactatt

SEQ ID NO: 161230 - DNA, 3129 bp, Cannabis sativa
ctctctgccattcgacttatggccacggccatggtcaggctcgccccgcccaaaagtgcaccgagcctcaatttggcatttttcttggctccacttgtcctttattgcacttttgtaccccgggacttccataacttcgagaaacctgaaaacatagaaaacaagcgcaattctgtcctaaaacctcgaaaaaacgaacataatagtgatccagaacataggctagaaatagcctaacaacttcactaagtatagctggatataccctatgaaaaataaaacagagggtgtccccatctttctcacattcaaagtatttgttgagaaccaatttgattttaaaataaaaggtatgcaaaccgattggggaggagagtatagaaagttgcaacctattcttcaaaatctaggcattctattcagacatccatgcccacatactcatcctcaacaaagaagagtagaaagaaaatatcgccatgtcacagaaatgggtctaactatgttagccaaagccaacacgccacttaaattctggtgggatgcctttgtttcagttgtcttccttattaacaggcttcccactatagttaatcagtacaaatccccatatgaaagcctgtataaaatcataccagattatcaattccttaaaacatttggatgtgcttgctttccctaccttagaccctacaatacacataaatttgaatttaaaacctccaaatgtgtctttcttagttacaacccatttcacaaaggttatagatgcctacacttatcaggtcaaacttatatagctaggagagtcaattttaatgaatctaaatttccatactcctccatgttctctatcaaacaatagtcctctgttcatatgcacaaaaatcttttagcaccaacatttgttattccagtcttgcataatgatcccccatcattcccacctatacaatttggttccctccctaaacaaatcaatgacacagaatatgagcaacatgatcctcacagtcctacaccacaacctcatgttcataacaatcccaccccatcagctcatagcaatcaaagcaattttcagtcaaatgaattgtctgctgaatccctcatacctactgtccatattccccatttaccacccccattgcctcaaagacatcatatgcaaacaagatcaaaatctagtatttacaaaccaaaagtttatatggtaacagccacccaacatcaggtttatgatactccaagaactgttaaacatgctctaagtttgcctcaatggaagaatgcaatggatcgagagaatattgctctcaaaaagcaaaagacctagatattggtgctttactctcctaacatgaatctattaaccaataaattgattttcagagtcaatatcacaaagattgaagcctagataaattcaaggccaggttagttgcaaggggttttcaacaaactcctaaccttgactttagagatacattcagtcctgtcataaaagcatccacaatacgaattatttttagtttagttgtcacttttcaatgggacattcgtcatattgatgtgaataatgtatttttgaatggcgaaattcaagaaaaagtttacatgaagcaaccagtaggttttgaagatctagaaaaaacagatcatgtttgtttgctccaaaggtctctctatggtttaagacaagctccacgtgcctggtttgacaagcttaaaatagaattgatttaatggggttttgactgaatctgtatctgatacttctctgttctatatgaacatacaaggcaacttactaatagctctagtgtatgtagatgatcttttaattactagaggtgattccactgctgtatccaaacttatctcagatctccacactcaatttgcactaaaatctcttggttaagtaagctactttcccagttttaaagtgtacataaattctttagggttgtatcttactcagtccaaatatgttgctgttctctttgataaaactcagtttgatgatgcaaaagcttgctcaactccaatgatacaagccaataaactggctcttgatgacaatccttcttttgatagccccgccttatatagaagcaccattggagcacttcaatatctcacattaactaggccagaccttgcatattgtgtaaacaagctgagtcaatttttaaaggcaccaacaaccaatcacttgaattcttgtaaacgggtcctcggatatatcaagggcaccacacatcttggtttacatttcaggccttcaaacatgcttcatttagaagcatattctgatgctgactgggcctccagtttagatgacagaaagtcgacatctggtttctgtctatttttgggttgaaatcttgtcaactagagttctagaaaacaacaagctgtttctcgatcgagcacataatccgaatatcatgccttagcttcagcaactactgaacttgtgtggataacatctttacttacagaaataggaatacaattgcataaacagcctcctaccctttggtgcaataatcaaagtgctcgagcacttgctttaaatccagtgtttcacactagaaccaaacatattgagttggatgttcactacatcagatctcaaattgcaaaaaagaaacgtcaagtctgctacattccaaaagaagttcaaacaactgatctctttaccaaacctctgtcatatcctaggttttaattcttatgtaacaaactgtatcttgaacactccaaatacagtttgaagggggtattagtgaacgcagttagttatagttagttattccaactgtgcgtgtaggatgagtttgttactcttcacagctggacagttagttttcctaactaaatttctattcctaactgtatttttgttatgcattgtaatgtactcacttcatatataaatacaatcatttcttagagctgagtaacagtttttactcaagctcattttctctcaaattagtttctcaactgtcatatttttttgagataaaatattattacagtagaacctctatccaagaatacacttgggaccaagtaaattatattctaattgagaggttataactaaatatagttata

SEQ ID NO: 161231 - DNA, 1837 bp, Cannabis sativa
actttgttcttttttagacagaaataaaaagattatgatgtcaaataattggggaaatgatgttagaaattattccaaaaaaaaaaaaaaaagataataataattggggaaatgtttcttttcttgcattattttggtgatgccatgcaatcttttcaagtgttccataaaaaaattagtcaaaaaaattagacctaaggggcttattcactattggttaatgcattcagggatttaattagtatattttataattcaggaaccattcctcaaatcacgtccagttcaagggctggcatgctaaaaaatcttggttgttcaatgttgatagttttgttagacgactatttcttccatattagaaactgacaatgcttaataagaagccaaagatacaaacaaaccttttaggtctattcttctctcctgaggtgccagaagaatttcgcgtgaagtaaacagcagcaccaatcccaaacaccccacgagtttcattcaaaaccagagacttgaaactcggctcattcgtatccttagatatgaaaaacagaggaaatacagaagacgactctggctgacagcaaaaccaattcaatgcttttgcactaggaggcacagccacctgcaaaaatccacattaaagatgttgagtattcagatgaagactctagtagttacgagtagtttgtggatcagttcagtcaatttttttctgtttcaatcttggttagttaatcaactaaccattgtcggttgtaacagttcttaaacattctattgttctaatgagctcattaaggagtctcattcatgcaattcaacaaacatttctcaactaagacgacgtcgtatcacaacaaagcttaagctacaaaaaggtatgcaattgtacctgaaacctgaagaatccgctagaggtggaagaaggaggaggattgagctttaacttctcaacagcttctttgattctgtcaagcccttggtcaagcgtcagagccggaggcaaagtgcgcgtaatgcaagtctctatttcaaattctccgtcctccatttccaaaatgtcattaatctccattaacggaccatcgaaacgtagcccttggacaacctacatggaatcaaacaaaatagaaagaccagtggtacaagaattattatcccaattccaaattttaaactttatatatatgagctcacaccttggaatgaaggttgttggggaggtgggggaaccgaagaggtgagagtggagagggtattgctctcgggaaagaccttctggagtgggattccaggagtgggagaaagagtgttgttttggggaggagagtttgaggtttcaaactcatggtgaaagatgagtgtgggagagaaggttaatgggaatgagtttgaaaggagaacagaaaaataagatgagctgataatgttatacattatcggatcggacacgattaatctggcgttggagtgtaatgaaaattgtaaagatttgtaataagaatagtaatgcatgttctttgttaatatttttgttatttagaacttttaaatcacaaaagttagaagtagaatttttgttttagaaaaataaaattgtattatctcttatcaaatattatttatggatgtccaaatcgacaaattaattatcactgtaaatgttaatgcttgattgtatttttcttttattacattaatgatttagtttctcagttttttagttacattttttgtataaataaagttcacctcattagaataaacaattaagaaattctcgttcagtttctttttctttttcttttcttttttatatattttatattattttata

SEQ ID NO: 161232 - DNA, 3845 bp, Cannabis sativa
tggtaaaacatattccaacaccttggaatatgtatggtgcttcttccggtggtatgaaagtcaggtgcctctttcaacgattccccagttcttcgtacttggtcaaccagtccattatgaatgttacatcatattcatgtgtatctaataatatttagtctattgttaactcccgaccctctacccaaacatgcataacactaatcaaggatttaacaagcatattttctcttaaaggtagggatactccaaatacacaattgattggttcaaccactctatctaacattttagcaagggaaagggaaataacagaattagatgcttcaatgtccattaatgcatatgttaaggatttagcgatagggatctgacctaacaccatctcaaatgttcctacccattgtctccatgggttactgcatacacccgaggtgaagttccactcgacttctgtgtttcccccttgttaccttccaacatttagaaattctttggaaaaatatcctggcttattgtaggcataacagttgctacaatcacctggtgtaatttattgcactaactacagtgtggccatgcaacaaactcccgtcgaggttttttttttagggtcaaaatttggtttgacgactcaacttttctcttgttattgccacccttggaatactttaggttccccaaactactagtttgatttccactatggttattcttaggagcaaaatctcccttgaataagttcttattggcataaaaattcacacgatcacctccattggtatcttgttcttcagtgttcttaacctctttcatgtcctttagcatccaggattcatcactatggccctttctatggtctcatcatcgattttaggacccctttcaccagtatccatgaacaacgcaatctcttagttcaatccatccatgaacttgcaaactcaattctctttgttattcacttgatctagtgcgaatctacacaattgattaaacttttgtacatagtccagcacattaaaatttccttgctccaggctagtgaattccttaattttatttttcattataatcctattgtaatacttaacattaagaacatcgagaaactctaaccattccattctagtagtgtcgtgtcctttatttgaaatgtcccgctagatacatgcatctttctatagcatatagattgcacacaccccttcctccctagctatggcctcaataaaatcaaagatagtttccaacacacttatccattcctttgtattaatgggtcaatggtcccctaaaatgcaggcaggttttgtctacttaaccttttcgatatggatttgagtaacttagtgtgtggagcatgtggttcagggatttcttcatcattctgttattccgagttctcttggtcattctaatattcgggatcttcttcttcaagaacaggtgggtctagattgtttggggaagcaggaagcctttggagtagggtttggaatagttgcacttttttggtattttttgcttccatctgtgcggccaaccctggttcttggtcatccgcttaactatggcctctaccttgtccttgtctactactatgactatgacatagtgctctaccccattcttggcctcgacctctaccttgttgtttttcgtgaaccctaggtaccccactggttgaacatctagggtttgatcgttattggcctagtgaccaaccctagctctagtgacatcaatagttctaatacaacaggtaggttgaaaatattttaatttacaatgaaaaatatttactctcatgttaagaaaacatacttcaactacaaagtcataataaattaaatataaaaatgtacaacaacatccgctaatgtaaaagtaccatcgtcattacataataagagttcaatcggcaaaagaggcaatctgcctttagtgtttattagtttctatactaaccaaaataaacatccccaaaatggttacaactcatcaaatacaatcaaaaaattacttaacatcattcacctatcatagtctgctatctcttcagttgcgtaatctaacatatccatgtcgagttcactcttggcctattactcttggtcaccaccattggtttgctgcatatctagctattcccaaattgatctccacatcaatatccatcggctatagtagatttggcatccactgcgaaacttggccacactcaagaggctcactcatcgtaaactcaatcaggaagagacaaaggaagccaaagaccgatgtccaactcaatctcatatcatagaaaaattactaggcaacaaaaataaggtctatgtaacgcatgtagaaccaataatatacatcccctccaagatacaaacttgctaaccgaagtcggtgctcaagtggaatccccatatcctaaaagatcacttgaatgatgtgagtccactttcaaacatctatgagagtaataaattcccaattaaatgtgcgtgggcgcgcatggtgaaaagacttgttgaatcgtaattgttgcttcgtcgcatactcaacgagtgaatcctcattggatcagatctttaggtgcaagatcaatatctattctacctgtaatttataggaacggaggtgcataaaaaatactattagaagacaaaataaaagaatatttacaatgagtatcggtttgacttgctaaatgtacttgtgatttagttaacaacattggctcagatcaagttctcgtaccaattgtaacaatcccaacacatttaaatgtccaaacaatctacatttttggtaaaatttattcattgtaatttgtactagaaatttgaaaagacttagtaaatcaagtttaaagatcgtgttctcacactgacatgaaaaagaatactttcaaatttaacaacatagttaaacaaaaaaaatagaaagggatcacaattaataaaataaaactttttccaaaagacccttctttcaaatgttttcccataggttggtccacatgtacatcactccaatcagactccagtgctcactgcttgactttcactttacccttacctataatagagaacaactagctaagcggcaaagacttattatcaacttttacatacagaaacattgagcaatttaattgaaacaacattcacaaaaatttcacattagtgtcgaaaaattcatcgaccttatcaattacttagataatgccaagaagtaaacagtttccacacccatacatgagaactacaattatcctagaaaatgtaccattcaccatcatacgagctttcgacctcttctagtcgttaccccatttctacacctttgccatataccataacctgggaaaaagttgcattttccaaagcttaaacgacaatcttgaacttacacatatcaaagatatgcagtccagcagtatccattcactgcaatatctattcaaactaaaatcatactagtggagacatctaagtaagtcccatcaagtacttcttacatatagtagctcgtattctagactacactttcaaacctcgaggtatgtgtagttcccaagggttatagtttcccgtaatcatctatcccatcgtttgtgttgtataaatttcagtactacttaaataatttcagtataaatagaaatggaacagttcttaacgaatattactcatgaatggttactaaaaaaatttaactataaatataaattataaaaatatcaaactatttgatctaataacgaataatgaaatcacaaatttgaatttatatgcttaatttaactacttaattaaaaaaatatcaaaaaatatctcttttta

SEQ ID NO: 161233 - DNA, 1317 bp, Cannabis sativa
ttttttttttttctaattttaattgaacacttggaatgaagaatgaaattatttgtcttgtttccatcaatttataggcaacatacaattctaaggaccactagatgtcaacaaattattactaaatttatcttttgaatttttctcaagtgatccatcaaatactcatcgtgaaaataaatcaatgatcatgaattaactatatataaatatatatatatatattttaggaaatttaaaaaaaaaaaaaaaggaaagcgaagccttaggcttgctgcatcaagttttctatatctttgatcattaatgtccaaaatgttccaaatcacatgcaattttgtaacattatcactccttggttgtctacaaaaatgtctctacaagaacaataaaatattatagctcatcaacatcaattcaaagatgcatctataattatatatatatatatgtaacttttcttacatatcgatatatgattgggatcttacaattgtaatttggaataaccttcgaaaatgttacttgagaaaactcatttgtgagatttaatttaatcaaacattgtattattatgtaaaaaataatataataacagttcgccattttatttaactaataatatttaatttgcaatatttatttaatcaattaatcaaaacattgtaatataatatataaaaatatttatatatatatatcctctatatactatacatatataatttttaaagcaacaacaaaatctgagaatatctgaaagaaagccagtacgtggtttgaactttcaatgaattggaacaaaatctctctggtttttcccaaacacgatattcctatacatgccatggaaatcaagtaaatctacatatatatataatattatatatatttataggttctcaagtggctggctttaatatttaaatgaagagatagatcatatttgaactatactagtcctgattattttattataatatattaatggctatctctagctggttccatccatttagaattttgtagctaataaaaaggttcatttttcactgtgtgctcgatcgaatggcctcatgatgcacgtgttttgattgtgcatatatgcatatgataaattattgggaaatttttatatctatacataataattaaatcaattacaattataccgtacaaaattaatattatacaattacggcaacacgtttaactattttatacctgaatgaaattaattatatccctgatttagtgtttgtttgtttccttaaacaagctatcatgatattttctcacttcttaaaacttcaaaaa

SEQ ID NO: 161234 - DNA, 3365 bp, Cannabis sativa
gtatttgaatcaatggatctaacttttttacatgagaagttgagttgggcccaaaatcaatgtaataggcagcaaagatttgggccgttggcccaatcagaaacccaacggttcttctcctttcattccacaagttgtgccacgtacacgttaccttactacactacacacaccctatcatgaattatccaatcttccttcaaagttcgaagttcaaatcctcaataatcattattgcttaagaacatggccctggcaatagcttccactgctctctcaatcgtctcaaaaaggtcacatgtttctacacaacactaactttgtctcactttttcaagtacacttctcaataatctttaccatatttactttctgtttggaaacaggggaactccattgaaaatttcctcaccaaaaatcacttccaaatcgttgttagggacaactagggttaatgcaacaaaaggagtatcgagtgtttgtgaaccacttcctccagataggccattatggttccctggtagctcacctcctgaatggctcgatggaaggtcaccaagttttcccttttaacatattcaaaaaaatttatcacatttgccataattctcacttttttctttaattttgttttttcttttttttgtaaagccttcctggggactttggctttgacccacttggattaggtactcaaacattcttctcaaccgtaaatttgagtgaaaatttccccataattttatttaattttttgatagaaaaatagtggtgaaattggtttaatttgcagggtctgatccagaactactaaaatggttcgcacaagctgaactgatgcacgccaggtgggcaatgctgggtgtgtctggaatccttatccctgagtggtttgaaagattaggattcatcaaagacttctcatggtacgaagctggagccagagaatattttgcggaccaaaccactttgtttgtggttcaattagtactaatgggctgggttgagggtcgaagatgggctgatatgctcaacccaggttgcgtcgacattgagcccaaaatgccccacaagaagaacccaaagcccgatgttgggtacccgggtgggctttggtttgacccgtttatgtggggaagagggtctccggagcctgtcatggttttgagaaccaaagagatcaagaatgggcgtcttgccatgctggcttttgtgggtttttggttccaagctatttatactggtaaagatcccattgacaatttgatggctcacattgctgatcctggtcactgcaacatattttcggtaacaatctttaactattgttttggcttgtatttagtgtttgtgttgttctaaaattaataactattcttttgggcaggctttcacttcacagtagatggcatgttgaatcatagaagaaaactcagtgtttttgcctaagttaagttgtatgtatgtaatttttaacttttaatcattttttttttctctcaatcaaagcatacagattacagagtaaattgtaattgtaaatactaaataccgaagcatctaagacaatgccttagtcttgagtcttggcttcacccttttcttcaagtcttgcatatttgtttttttattggttctttttaaggatcttaattatagtttggacaccaaaagaagaggctttcatctgagcttgagatttgataaaatgagttgcagaattgaaggagattgagacacattgttaataaaaggaaaggtctctaatgaggttgaattggtcaacgagagttatcaacccaagaatctaatgtctttctctttccaaaatctattattagagtacttatcaaaagaaatctattattagaataaggcatgaaattgagggtagtttcctgaccaactcccttttctcaaagccaagactcctcaatcacattcctctttcaccaaaaatgacacacatttcgattatccaacaaaaacagtctaagcaaaaatcaccaaaacatactcaccaccaagcattatctacgaacagcggctccgtttctatctcgagctgtgtccccattaccggctcagctcatcaatggccgctgttccttctctcctcttcctcattcctcttttctatttcattcctttctcccattcactttctgaaggtgattcccttctcaaactcaaaaactcctttacacaaacaaaccaatgctctcgcttgcttcatgggttcctaactcttccccttgttcgtctcggtgggcaggggtaatgtgttttgacggaatcattaccggtctccatctcactaacatgggtctttctgggaaaatcgatattgatgccttgaatcagatttcgggccttagaacaattagtttcatgaataataacttctccggtccaataccggagttcagcaagcttggagttttgaaatctctgttacttagcgggaatgctttttccggtgatattccttctgatttcttctcccatttaaattcgcttaagaaagtttggcttaacgagaatcaattcaccggaaacgtgccggaatctcttggacaattaactcatctcatagaacttcatttggagaacaaccaattcacaggctcgattcctgtctttaaacagagcattaattcacttgacttatccaataacaagctcgagggtgaaatcccggccatcttttcctcttacaatgctagtgctttcgctggaaataatggtctttgcggtaaaccattggacacagtttgctccacggtaccaacccaatcgccggctctgccagctaccgaaaattactcaaatgacaacaaattagtcgtcggcggagtcgtggctgcaatggtcattgtcttaatatatgctctgcttagctcaaagaacaatattgaagacgattttagtcagctagggagggaaaccacggacgacgtggtcgaagttcacgtgcccagctctaaccgaaggaatttggattcatccacccagaagggcagcgattccaagagatctgctagtggtggtggtggtggtggtggtgatggtggagattcccaacacgggaagagcgggtccatgactgatttgataatggtgaacgacgaaaagggcactttcgggttatctgacttgatgaaagccgcggcggaggttcttggtaatggcgggttagggtcggcctataaggctgtcatgtcgttcgggctgtctgtggcggtgaagcggatgagggagatgaatagattaggaagagacgggtttgatgccgagatgaggcggttcggtggactccgccaccggaatatattgactccgttggcttaccattaccggagaga

SEQ ID NO: 161235 - DNA, 1498 bp, Cannabis sativa
tcagggtgggcgactgccctaccttgtctctatgtgggtccgcccctggtacgaaagtaccaaagcctaagggaaggaaaaactgctctagtgatttagtaaactaggatggtgggacagagggatagtgctctgatgacagttggtccatagtggatctcgtaattcgtttagatgccaagtacgagaaagcaaaaagtgaaaaggcgaggtcgcgtggtaatgatctcaagaatcacttgaatgataaggtccatggaagagatcttccaaacagtgatataaagatattagaagaacagaaggttgcactaacgaagctcataaaataaagtggggccctcactaattctgaggatgaggatctggagccctacataagaaggatcgatgaagctccactctcgaagaatttcaaaataccctagatcgagttgtatgatgggtgcacttatcctaaaactcatttaacttagtacaacaagatgatgtaggcgacaggagttagtgaggatgccaaatgtttgtgcttctccttgacctttaccaaatctgctgaggattggtggaaaagattggctcccaaatcaatccactcctggaaggaactatagtcttcctttcagaaataattcattactactcgtgattatgacctaaaaatgggctccatcactaacatcaagcaatatgtaggagagagcctaaagagtttcattcagtgaatgatggaggcatcaactaagaataaagtgttcgatgacataaaattggtggccctgtaatctggaattgtcgttggttctctcctattgggagaaatgcagagaagaagggctgagacattgtttgagtttatggctaactcacaaggctttatcagcttggaagactcttattagcaagcgttcagtgtccctcaagcaccagcttatgtggcttccactcccatatttacctctctagttcttgttcctagagatcaatacatccgactgtttacagaccatctgcattcgtacaagcacccacatagacccacttctctgggtatggagcatcacaaatcggatgtgatatcgctccaaggcagtcaaaagtggaagctccaaagtagaatgtgagccaatcccaaaacaaaagaggaggaaagggttcaggacggagtgagaattctaaaaaaactaagaaagattatgaaccaaagtatacagagtactccagcctggtggatgataaaaataatatgtacaaagaaacctacaatatggttcattataaaaaaccccccacggacaccacaagggggtaatttcaagagagatctgagtaagaggtgctagtatcatggagaagtgggagactccatcaatgattataagcacatgaaggatgaaatcaagatgctagtcagggcgggccatttgggataatgggtctcggtactcatcatattgttgggttttgtgccctaaataaaaccctttacaatctgatt

SEQ ID NO: 161236 - DNA, 3880 bp, Cannabis sativa
ggaatcaaaaagtaggtattgtactatggtatctcatttctttttttctttatatttttataaaagagtcaaacctaattttcctatctcaaagaattgaaaatagaaaaaaaaaaaaaaaaatggtagaggaagatgacaaatcaaacaaaaagctgtgtttaactttcgtgtttggtcatacattttatatatttatatagaaacacctacctaattaattattgagttattgagcattgttattaggcaccagtagtacttaccaccttctcgacatgtcgtgttgcgattggctagcgatacttcctaaaagttattatattaaattatataggactgatacttagttagaccaataacgatattaacacgtaggaatgtactaggtaccactggtgccctttagcatttctcttaattattcataatttaagaggaagaagcctagaattgcatgcttacttatgcatagtagtatattgttgtctacggtgtctcattgcatgaacgcgtcaccttaaagtaaagtagccgtagtcactaataataatattattatcaaaaatcttaatacattaatccttgtcaacaactgcactgtcttttctcatgggactataaattagctgtttttataactctataacgtgtctctccttgacttattttcatcatcttcttctctctctttctcaccatattaattctatttcctctgctctgtctgtcacttcaatataccactctgttttttcatctgggttttcatcaatttcattgttgaacatctaaaggttagctctttttctttttccgaaaatgttgttgaaaaatggaatgttgtttggatttgttattagtagtttgaaaaaggggttgtagaaaatcaacaatatgtatacaatgtaatggtaatgatgaaaaaatgttactttacaatgaataatatgttattgatttgacttgtttgtcagatatttgactgactcaaatgagtcagaaattgtcggcgctgattagcctctgtcccatttttatctccttcttctgattatgaataataacaaaatcaaagtaaatcgtaacatttgtgctcatttttctcttctggttttctttgatgcgttttcagaatcagaagctggttttttaattttcattatggaacccaacaacaacaacaacaacaatgttgtggaggaatttaccgatcaaaaaagccctgaaacgccatcactcatcaaatacatttcatcaaaccaagtctctggctttgataacgctacgtataagccaagccggttaagcaatgttcaatatccacaacaagaacagcttaattatctgcaatctaaagtgagttaaatgcaacaaaaattcaatctttgaattgaatcatcccttttttttttttctaattatttatttatctctttgactctaattgtttaaaccaggagattgaaattcctattgttgaaatcccaagtcctgaattagagccaaatcaaactcataaaaggattcactctgtttcaataagcatgccaccatctcctattcaagctcatgtgaacagcaccaagaaggttctctttgatgaagtgactgattcaaatggtgcagccaagagtgccagctgcgagttgcctaaaccagctaagtttcattcccagccaatggacataaaaaccgcgcctatgctgccggttaacccgagtgctagaacaattgataggaggtttgattctttcaaaacatggtctggaaaactggagaggcagatcacaaacctgcgtggaaagcctcaaagagaaagccagccagatgatgttgtgttgaagagttctgagattgataatttgccagttgaccgatatttcgatgcattggaagggccagaacttgagactcttagggtaactttctttctttccttcttttctcatcttatggtgtttttttctttatctaattttctttgaattgataaaatctcaggcttcagaggaaatactacttcctgatgacaagagatggccatttcttctaaggtttcccatctcttcatttggtatatgccttggtgtgactagccaagccattttgtggaaaactttggccagttcttcctccacaaaatttctccatataagcctaatgatcaaccttattctgtggtgcatttctgtgtctcttgtcattttagtcttcttcttctattccttgaaatgtctactctacttcgaagcagttcgtcgcgaatactatcatcctattcgtgtaaacttcttctttgcaccatggatttcactcttgttcttagctattggagttccaccttcacttactaagtaccttcatcctgctctttggtacattttgatgactccattcttctgtcttgagcttaagatttatggacagtggatgtcaggaggccaaagaagactctccaaagtggctaatccttcaaaccatctctcagttgttggaaactttgttggggctttattaggtgcctcaatgggactagttgaaggtcctatcttctttttcgccattggaatggctcactacatggttctttttgtaacactataccaaagacttccaacaaatgaaactctcccaaaggaactgcatccagtcttctttctttttgttgcagcacctagtgtagcttccatggcttgggcaaagctccaaggctcctttgattacggttctcgaatagcttacttcatcgccttgttcctctacttctcactggttagtttccttgacactttaaagaaatcttagttcatatattttccttgtttgttccttaactaaatccttctcttctttcttgacatttcgcaggctgttcgggtcaatttctttcgaggattcaagtaagtcatggcctaaacaactctgatatgaaagtacctcttaccccttttgatggcttagttctctaacacttgtcttttttctttaatgaacagattttcattggcatggtgggcatatactttcccaatgactggagctgccattgcaacgatcaaatattcaaatgaagtcactaatgttgtaactcaatctctggcagtcattctttcattggcttcaactctcacagtctcagctcttcttgtttccacaattttgcatgcttttgtgtttagagacctctttcctaatgatcttgccattgccattagtgacagaaagcctaaacataagaagtggttccctctaataaagaacttgagctcagattactcaaaagacattgacaacttcttgaagtttacagactctgaagcaaaagacttggaagcttctgagaatgttcagaggtctgatggtgaacaaccttaggaagtctgttcttagactatatatatttacttaattcaaatcatttggacttgtgaggaactcattaatttttagaaatttatttgtagttcctgtgagcatgtcatttgatgaatgagtgaaaatgtgtcaagtttagtagttccaataataatgtagaaaacaacttgtgtgctctattttgtaaaaggttttgttaaagtaataacagtaatattatgcctatactatattttcaggcagaaaacaaaaatatacatatattacttattaaaaaagaaatttcaattataatgatgagtaatgatctaagtaaacttaatacttcttcaagaatagtaattaacatgaaagttttcatttgttaagaataaacatctgaaaactttcatatttgtattattgctcatgtacaaagcaaaatcacatttatttataataatgtcaaattctaagaaatgtaacagttgttaggttgtttttagcattatttttaggttaa

SEQ ID NO: 161237 - DNA, 11539 bp, Cannabis sativa
acaagcaacaatacacactaacagaactgaaccaaaggctatttatagtcaagcctaagagtcatttagaatacaatcctacaaattagtgagagaaacaaagagagttgtttagagagaagaggagggatgttaacgacatggtgtgtgtctgatcaccattgttacaagtgaattcatgttgtaaagaagctttacttctcaagtgtcttgtacaagaaactgtgtacattgtgtattatgttctctccaattcatccaactcaatataaatctcaagcccttgtgattgtttctggccacttttgtttgtgtttgttcttcttttattttctgttttttgattgcacatttatatttctgaacttgtttacttgtttatgatttgatttctttgttgagttttgttcttgaacagttacgtttcccaacaaatacaaaattaaaatttgatacaactttattactcaactatcattaaacaaaaaaatataatttttatatatataattttacactgcaggcaaaggacgatcagtttcctaattttccaataaaaaaacaaataacaaatttttttagtactcaacgttataacattcctaatggtcgctttccctcctatcataagttgtagcattggaaatgtacaaaagtcaacttacacaaaatttcatgaggtcttataaaagaattctaatggcaaacatgtacaaagcttacacaaagcttaccaagtgagaatatacaaaagaaaaaaattagacaagtatacataacaactattagagccatttacccttggcatcaacgaccttttcctttagataagcaaatgatcaagttgcactcaagcaggtctcccaagtcccatacttggaactgaagctgccaccaccacttctctgtgcatgctcggaaatgacggcacgagcacaaacatcccacgtcctcaccattgctccaagagacatgggttgtgaaagggtcctcaatgatatactaaatctcgattttgttttgacggagagatcttcatattccttgctgtacataaaaaatggaacaatgagtttcatcgagtattttcagaaataaagagcagccatcataaactattgataaaatggtccaaaaaaataatttgatccccaaactatcacatcaaatactgatgctggttttgacccacaccatgttgaagaatcatgaggtatttaacaataagttacaaacataataacggcaatacattatcatgcaaaggattggccttggagaagttccattttcatttatattcaaccaaattggaatacgaaagtccttgtgttgtatcacaaatagtttttcgagggaggaggataaggacacaatcaagagataccacatcaactgaaataaattcaatgttatttgagaggagtggggtgtgatttttcccttacctggcttccaccggaaatacgtccaacagtataggagagcagttaggataatttgtgggaacaagcaaccttaaaggctgtattggagactgcaagacattaaaaaaaagaaaagaaaagcagtcaacacataggataatacatatgagtaataaaatcccttcatcattcctgagagcccaccatctgtgctgaagcatattgtaatttcatgttcggactgagtgccacagcactgaaagagcacttgacaatggtcccttcacctcctttagcagcagctgctacagcacttgactcctcactaatatcaataacagtgtcaataagacgcagatttatttctctaatttcttctttaagagcatgaatagcctgcaacaagaacacaagtcacttcacaggtataagtttctgaatgggtatgataaaatgacctcacaacacagcactctcacaataagcatatctttatgctatcagaaagtcactaatatcatttccactgtcagtcaatagactaaaccagatctacgattgagctgaattaaaaaccagctcctagaagtttgagccaagtttcctattcatacaaatatccatttcagcaaaagacaaatacctctaacttagacctcttgataccagatgttgcagttgactcaagttcagatatttctgaatcattaatactactagctgatgacacaacatttaagggcatggcacttgtgtagcgtttcattttccttgtcccatttgttccgtcgtggctcatgaaatttcttacttgtaagcgacagtttgtcatagcaactaaatcctcgccaactgcagctctagatccattaccaggagctgatcctgcaaacctatcaaccatgctgacaacagagccaatgtccctgacagaagcattcaatgccttaggcgacatggcttttacctgaaaccagagattattatatatcactaaacaacaacaaaaggggagccatgaaaaatgaatgcatactttatcaagttaaaggaaaaaccatttgactaaccgctttcattaaacgatcaagtggctgttctgtaacgcttgacttgccagaaacagataccaaagtgtttccatgagtgccatcaggaccactaaactctgcaagcaaaggggaagctgatattcctggggtgccaatggcaagggattgagctggagcaacaacacttgtttgttgttggccaacgtttccagcatttgtaagtgaggaagcaccgtgatggggtttatcagaatcactgggcattggggatggagccaaaggagttggtggagatggaacaaaaggtgagctaacggactgtaatggagttccaattttggtaagagatggcagcaggttctgctggtcaacttgtggagaagaatgttgcaaaggtgatgaggcctgaaggagctgatttgaagaaatagaaaagggagagttagatttaagttgttgatgggaatacgcattacgttgaccagctggaagatgttgttgaaagacccccgactttgcggccatattttgtcttgccttcaaatcatttacatcattgatttgatgatgcagcatttgattttggggtggttgcaactgggcaggaagttgctgttttgcttgctgctgtatttgttcttgctgttgctgttgctgctgctgctgttgctgtttttgctgtaatatttgttgcttctgctgctgcaacatctgctgttgcatctgtcgctgctgatactgttgtttcatctgttgggactgcatcatctgttgttcctgctgttgcttcatatgttgatgctgaaccatattagaatttgactgaaggctattgatcccattctgtgatgacaaggcattaacgtttgcctgttggtgagcattcacaggagtttgctgcaatgagtttagtgcatttccttgtcctgaatccacattggaactggattgcaatgtgttcattacattttgctgtgttgttgaaactgcagacaaagcaggcatagaattttgttggaagcttgtcatactgttttgttgcattggtcccacagagctctgcacattcttcgattgcaattgaggatttatttgattttcatgagattggacttgattaatttgagattgtggctgctgcatggagtgcatatgagatgaggggtgcccttgttgcaactgagagacaggcttccttggcctatttgtattaataaaacttattatctgtttctcatagtgaattagtttctccttatacccaggaataatgttaacttttggaacttgtaaaaattgaatagtgcgttccaaagtggtcttaaataatttcagcttatctagctgctcagactttggttgttgtggtagagaatcaagctgtcaaaaagagaaaaacaaaaaggcccaagtaagcttactaacatagctcaccaaaaaaggttcacttaaactaaagaagtttcagtttcttttcaattctacttttgatactaattgtttgacttattttaattacatatattttttgaacaagagatcctagaaaatgaaaatgataacgtacctgctgtaatttgccagcaattttgtgatacatttcaagaagttcaggtaggtatagttccttcattgttttgatctgccgacaaatgataaaaaaaaagagttaaactttaacttcttttaggttcctatgtaacttcacatgctacgtagtacatgcttgtaaaagtaataaccataatttctgccattcacataatgccttgattgtgttttaattcaccaaagcagatcatatataatagcttattaattagtgcctgtatgtttcacactcttggtcatccacaattatcttaattacttccataacagctaccgaatcctagattgataggtgaaatcaacctatgaacaagtcattcattagaaaaaaaaaaacaaagaacctattaccttctggtaaacctcttcttgccaatcaactccagttgcatgtccagttgcagttgaatccacagatgctacaaaaggatgtttacgatatcatatgagaaactcaaaacttcacaaagatagaaacctttaaaacaatgcgaaactatacaagccaacaacatacttgatgatgtgtctggaagtggtctctgcgcctgatataactgcttttgctgatcagtcacgttttgacctgatggttgaagtctcatttcacgttgtagtggatttgtctgttgttgcaaacctagttgttgctgcatctgtggctgtgacggaatctgtgaggcaatttgctgttgtggttgttgtgtctgagttggaagcaaattagatccactatgttgtgattgttgctgtattggaactttagattgttgttgtcgcatgagcacagagtgctgattagtttgcatgcttgagttaccagtctgagttccatgcagctgctgttgtaacccgttactctgggggcctaattgctgttgatgcaaacttgaaacgttattttgcggagccattaactgttgctgttgcaggtttgagagattattctgctggctaagcagcctctgttgctgctgtaaatcaccagcattgttttgttgtccaattaagtgactttgttgcatgtttgtggtatttttctgttgacttaaaagctgctgttgctgctgctgctgctgctgctgctgtgacacttgtgtttgctgttggtgagtaacagcagcctgttgaggatgcgattgtggcctaagaacagattgtgaatgtgactggagcatggctttggatgactgttgaatagatgacgactgattctgctgaagacttgggacagatgactgcattaggggaggttgcatagcagacgatgtctgcgcaacagcttgctgagatgattgcagctgggttgattgtaatacattttgctgctgctgttgctgctgttggatgtgagactgtatgatcgattggggaacatttccctggggaaactttggcttgacaagctgctgctgctggtaaagatactgctgctgattttgggattgttgctgttgttgagggacctgttgccgtccttgtatttgcctgtgagcattagcatatgctgctgtgttctgtgaattaccagtcatattttgacttaagcttggggtaggaagaatagtagatgatacgcttgaagaactctgaacagcagcagaattctgaacattctgagacagtagttgttgtcgattttgaccctgattagacgacagcggcattacaagtgattgcccttgattgtgtacttgaggcggcaagacagcagatcctgtccaaaagcaaaaagtctataaaggacaatttgaaataatgaagcacaatccagcctttatgttcccccattacatcccaaccaatgcagatgtaaagagaaagaaaaattaaatagctggccctaagagaaatgagtcatgatcttccaactaccaaattaagctcctaggggctactccacatgccaaagtaacgcatgaaatttggaagtagatggaacaaaaaagaatttgactgaagtatgcattttgaaccttaagaaacacttttttttggttgcccatataacagtgtattgtcttacctggatctgtgggtctgctattagtggggttgggtggcaagggggcattgttgttctgagacttgttctccattgacagcatcttcagtgaaattttccgtaaataatcagactgtaaccatcacaaacaaaatgtcaattaggagggaacaacacaccaacaatctttcaaagaatgtgcaagtacacaaaacattaacatgcaaacataagtacatatgttgggatatttttcaaataaaggaattcaagtttaaagccctaattaaatgtctactatatagtttactagggttgtaagcctgtaatttaaataaacagtttactagttttatcgttcctaaagtctgggctcgaatattttactggttgtttcatagtacatgtaacctaatatcagcatatgtctgtgtatcagtgaatcttattctgcaaaattaaagagactaagcaatagatcagcctttatctgtctataacatcatgtcagcactcaattcaagtgatactgatagaagtagaactctaaaaatctcagccaagcacactcacaaaacaccagaaagtctcttcatttctaaaaccctatcctcaattagagactaagtccaacacaacacaaagaatagaacagtagctaattcaagatagctaatagaatctaactttgccttattacaactcaaatccatctatttatatattatactcctcaactaactacagctcaacagaataagactcctaacatagcacaaacttactaacataaacaaagcatactaatacaactcagctaaataaaacacttagcttagttattcttcttattgtgcctcacataagtaaaccttatgggaggtctatcagatgcacataggcgacttaggtggaaaaggaaaacagaggtgatcagaaatatggaaatacctggctcgttgcagcactgtaaatcttttcctcaaatctttcagcaattttctttagttcaagcaatccatcttgacccgagaaagggagatgctttttcaaagtatccattcttaattatagaaatcagattacaatgtcagtgaaaatgacctttcatatacttttcacaataaagatgaactctgatgatgtgatataaacttcataaaacaaaaatcaaacaattaagggcttgattagattcatttttgttttgcttttctattaagaaaaaacatggaagttttctttgacagtttaatttgataacttgtttggcattttgttttgtttctttttttattaattatttatttattgttagattttttttctttttaaaataggatccccatctaaccttacaaacaatatttgggaaccaggaaactgtaatatttgctatgtaggtacccagtagggtctcgaacctgaccttgttcccgcaaaccacatgcctaccatttaagctaccctaccccacttgggatgatttttaaaacgagatatacatgttactatatacatagaaaataaggatttccaaacatgtttccagtcttttaaaactgaaaatcaacaagacatttttattttcatagatataaagattttcaaacatgcttgctatcttttaaaatttcaaacaacagttttattttcatattatttattcaatccaatcaagccgtaaatgattaaggtataactgaatgttttccattaacacggcatctcttgtttcaaaatacacttacatcttgttgacaattcgttgtcttgaatcatgttgcaactgagttctccaatctgtattgtctatcatgggttccccaccttgaatggatctccaattattgttgtccatgctgaaaataatctctgagtttgttggcacggataattagtttcgttggactggattaggaaaaaataagtattaatatgcaagtcaattcataccaatccaaatatatgaaactcctattgctattaatgaattcttgatctaataatgcaacatggcaatatccagtagttagaacaaaataaatatgcaataacgcaggggaagtggacaaacaacagcattctcatattattttcctgcagcgtaacatacgatcatttcagatttgaaaccaatcaccacaaatcaaaattttgtttttccaaacacaaatcccagcaaataacatcgaatatattaaagaaaaaggaagagaagattaaagaacacaaaacaaaatggaaaatctaaaatcccataagcaagcaacaacatcaatatttctcaaatttggccatcccaaattccttggaaactcttacgaattcatattgaaatctcctctcggcaatgcaagaaggatcaacgatgagttaagaaagttaataacatattgatggaggtattagtacacacactcatataagaaaaactgaactatagctcccacaatggacagggcaataagaaaaaaaaattgttccttccaaaacgcaagagcaacagacccaaattatatggatatatttgatcatgaatcgattttgagagagagaactaagcttgccccaaaaagccaattttgacaccaaaatgaaacaaatgacagaaaaataatacggagatttctccaggatcagtaacccgattttcatacaaaaatatccaaattacgcatgttaatataaaacaccccaaaaaaaaaaaaaaatcacagacaagtatttaagtgcacaaaaatctcagttacgaaagtcgtatatactgtaaagagagtagaaagcaacccaaccagtaatgatttcttcggatttagctttgggtgtagaagcttcctcaaaatttagttgtgacgtccaaagcgaagacctaacagaagaaattaaataaaaaatttagataatcaaaccctaaaacgaaacaaacatgaatatcattgaggaacgaatccaagaagcaaattgaataacaacaaaataaaataaagagaatgaatcgatgagaagagattaaaagagtaacgttggcgaagaagtgaggaaagaaagggtccgaccaggaaagagtaggggcaggaatcagaagggagaaagagtcttgcagagaacaaagattcaatttcacacctactgctgcagatcattctgcatcatcaacctcagatatactcatagatagcgtgtgaaataaaaatacattgaattgaataacctctcacccattttctacaattaactacatttttatacattgaattgaattgaataatttttatttttgcctcgtgaatttttaatactacttgattttgttccttaaaatacataattatgttttttatgagattttgtttattttaccgttaaaaataatatttttaaccctttaaactttaactaatacaaaattttaccttttttttaaatttaattttaaaaattataatactttatttttttaaagtagttataatattctattaattctggaaaaaaataaaaattattaaaaaacttaataaaaatattaaattattaaaaaaatattaattttattttaaaaaaaacttaaattattcttaaaaaaattattttcaaactttattttatttataatcaagtatcttaaaaaatcaaaccaaaattattgagaatctaataaataatttaaataaactaagattttttaaagaaaaaaacaaacatatttatatttataaactcatatcttaacaaataaagaaaaatatttaaaaaatcaataaaattataaaattattttgaaaaaaaaaactataaattaaactaaaaagattttatgtttatttaaacaaatctatatttttcgagaaaaataaaatatactcaaatttgttcccataaaatttagttttacaaaaattaaaattttaatatattatttttaatatctaaatgaattttttaataaaaaataaatagccttttaaatcgcttattagttttaaaattttaatttattattcaatttttttaatcattcaaaataatttttttcttaagatctaaattaattttttaagatttactgaaaaaagtgttaaatctttctcatgtttattttgagggagtacaatttgatagttatcaaagtttagggggcaaaattgctaatttacaaaaatacgtcatcatttaaacggaataatgaaatggaacctaacagaaagactaaatttcagtagatgtaaaagttcaggggagatttttaacaagccgtatattttatgggacaaaatcaatattgttgaaagttcaggggtaaaatttgctaattattcttttttaaaaatataaaaattatttcaaaatttataatataatttttaaatatttttttttatttttataattttatttaatttcaaaataaattttgaaagtcccatagggacaaaacaagtcataggcctctaccattgtctttaggacaaagttggtgtcttttgtcctaacaacttttgtcctgataaatcttgtcttaacaaattttgtcttaataattttttatcgttttcttatttaattaatttgaaaaaattatttatttattgcaaaaataaataattactattttgccaattcaaaataaattttcttttcaaacatctttatacaaatatttatccctaccttcgacagtattttaaggtggcaatttagggaccatagacctataattttaagctccaataaactagattattatttattgagtcttaccaactaaataatttattgtttattaatttcataattactctactataaatatataattgcactcttagtaattatagaattatatatactgagtttaattgcagtgtccattgatataatcaattctagtgattagccctccatgtgtttgttcgtaataagttttggtcaaaatatcattttacccttctaattactttttttatcccttagttaattaattccctagtggaagtttaattcaagatcctgtctgaatatgtgcacaacattccagttccagaattaacacttaaagagaaccaacattcgatccgttaggaaagttaggattctataattgtacatcatgttcccagccatccatattattagattcccaaaatagaagttgtaagaatcatcctctctgagaaactttaacgagtgaatcaaacaaattaataacatgaacatgagttcatgataactcaggatttaggccgatctactattgatcatcattatgatatgaattaggtctttacgataaacgacatgatctgtattatatacagtaccttcacatagatgtctcactacatctgtaatgtgaaccaagattacttacaccaaagaatgggcatcatgttggaatatattttacgaggacctacatttactaacaagtatgtttttaa

SEQ ID NO: 161238 - DNA, 1312 bp, Cannabis sativa
agacgtccacacagggacttggggagaaaatgttatctcaattttcacccacatgacgtgtcatgtccacgtaggcaagactaaggccacgtggaatatagtgtgtcaataggtgagcaaagttaccatgcataacacatcaattgacatgggatctagatactcaggcaggatcaagttacaggaaaatggccaaccagggaggtctggccggatcacaccgtggccggccaaggtagttcatgtgtcggccagcccctaggaaaagggtaggcaagccaacacgaggaatgggcataaaaagggagtttgggttgaaaggtgagctccagagccatctttctagacgggtcacaactcggtttcagttatatgacagctccaacaacccactaaagtagggattcaaccccaaattgtcaacctatcttttagggatattaattagttatttttgtaactttaatatatgataaaagagtggtttttcctatttttaaggaaaatttacttacttgaatatagatcttttgtaagccctaaactatataaatggcattaggcaaagtgaaaagggacctgaattctatgtccctcaagccctagagcactctctctctctctctttctatctcacacgccactttccatttactagacacttagtttattttctcatctcatttgttcaaaatctgtcatacatcagctccattgtgacattcaaggagagtcatagctaaaaataacgaggtaaaagcctgtaatctacgtggtgttatctctcgacttgatacaacaaaaaaagagtaggtcattatccgtaaaacaagggggtcgaacctctataaattaatgtgtcgccgttattatttacttttacaatttacacgttatgattgtctgtcattaataaggttccgctgtcagttgataaatttgaggtcaacattatttatggaaggaataagttacaatgtctttctattttagataagtaacgaggtaatccctgttgtattgatcgaacatgttttccacataagaaatcatcctggatcaattagagattactttgtccttggacagcaaagttatccaaaaggtcaacatatccgagactgtccttagaagaaaggttacttcctctcaaggcttatctatagttcgggttcaccatgttcaggaccaggaagcacttgcctcttttggtcttagccataatcaagcaatagtatcaaacttgctcgggggatttatgtggacctcattttataatggctaattagtaatttttcttcccgaactttga

SEQ ID NO: 161239 - DNA, 3938 bp, Cannabis sativa
  modified_base (1593)..(1593): a, c, t, g, unknown or other
  modified_base (3828)..(3842): a, c, t, g, unknown or other
tatatatatatatatttatggaaccacatgaattgtactaaaaaaaataaacgattgaaattgtcaacttccaactattgatatatgcaaatctcactaacatgtgtagatttgcaaaataaaagagaaaaaaattagtaaagattagaataattagtaattttacttcagaatttttgatgctacttgattttgctacttatgttgaaatcttttcttacttttatatttaaatattgacatgtttttgtaaattaacaattttactcctaaattttgataactatcaaatcataccactcaaaataaaataagaaagattcaacattttatttttagtaaatgtttaaaaattaatttagatcttaaaaaatcattttaaattattaagaaaataaaaaaattagtaaaactaattaagtaatttaaaaattattaatttttatatatataaaaaaaaatctatttagatctagaaaaaagtagtttgaaattcaatttttgcataactaattgttatgggaacaaatttatgtttatttttttttccaaaattttaaatttgtttaaataaacataaaaaaaatttagtgtaatttttatattacttttttaaaaaataacttcataatttaatttctaattttttattttattttttatgatatgagtttgtaaatataaataagcttgattttttctttacaaaatcatagtttatttaaattatttattgggttttcaataattttagtttaatattttaaaatatgtgtttataaataaaataatgtttgaaaatatatatatattttttgaaataatttaagtttcttaagtaaaattaatatattttttttttattaatttaatactcttatcaagttttttgatgattttttctatatatatttttaatttttaaaaaaagataggaaacctaatagaatggataatgcatgattatgtaactattatatttaaggaaaattttttaataagtcatatattttagggagtaaaatcatatagtattaaaagtttagtgggcaaaaatactatgaagtatagatcttccaagatgttggtgtttcattttgatatttctaaatgaataaatataagtagtgagcttggagatcaatatatgatctactaaaatttaatatcacaatttataatgtgagtatattttataattaatagtatatataaaataattggataactaagaataaattaattagtaactaaaataatattaaccatttttgaaatattatgtgagtgaaactaaatattgagtttgaatataataaagggtaaataatattttggaccctgtattttgtaaaagttattaatttgaccatctgttttgtaaaattataaattagattctatattttccaaaatgataaaaataggatcctgaacttaattttcaacaattttattttttgatataaccaattttaaaacaatttttaacacgaacagatacagaaaatataactagttttgtcataatatttctagatcgaattattataaagtattattttgataaaaaaaattagttcagggtcctanttgtacaattttagaaaatacaaggttcattttgtcatttaacaaaatagatgatccaattgttaacttttaaaaaatacagggtctaaaatagtatttatcctataatcaattagacttaatgtaatcaataaatttaatattataataatattcttatatttaaatttttactttaacaaaaaaggtctaggccagctactagtagtcaagacaaagtaaattaaatttaaatatgatttaattttttttttaaaaaaaagttaaatatgattgacctaagtaacattagtaataatgagttattaattagcaacttcttatattgcttattacattatttggactcttaaagcaatttattttagcatttcacttttaaataaggatggaaatttgaaaattggaaagaaaatccatggcggcagtccatttgagaataaaaatattaataattaggattaagctggtaacctttttttcttttctctttcacaaaaaagagcatggtgtctattattattttgatttatatttataacagaatgctttatcttgaaatcgcgtgacccaaattagaccttgttgttggtgaatctaatcagtggttatttagtttgagaaaataaaaatgaaaatgaattaatatatagatgtttaattagattttagaacagagacggcaattaattaaggaactgtttggcctggaccacaatttacaacagtattattgataaccagctgtaaccttttcctatcctaattaatttggtttcttttatttctttccatcgttatacattttatttattttggttcttctaatctaaacaataatatccctatctttttctttttggtctttggaacattttttttgtcgtctttctaacaaatattataataaaaataaaagcaacgaacttttttttagtcgtagaatgtttttaatagatcgttcaagaacaattcgtgggaaatatgggatagaaagatatatatatatatagacatgattttattctattttcacatattgtattccgtgatgtacgacagccgttagatgagtgattaatttgatttgagagttgaaattgatgtagaaataattaagactaaaaaatagtaacgtaacctgacactcgtaccttcagacccatctaatatactacggaatacattccgtaaaaatatattaccggacaaaatcgtgttttatatatatatacagaagaaaaagaatattatgtatatatgtgtgtcttcaaatcaacctacaataatgataatacatattgtcattgtgtatttatttataattattattagtcggtgccggcttgtaataaccctctcaacatagaaacaaagaaatcccaacccacaattctctaaaggcttcccatctatcataattaaattatcttctttaaattttttaaatcattaaaataaatttcgaattaagattatttaatttaagaattattatttaattttactaataaaaattcaaggatataatttatataattaaacaaattttaaatcaaacaattttaataatatagaagaaattttttaacgatgagaaaagttaagaaaaagcttaattataatcaaacttaagacaaatcattaataattagttagcacgtaaaaacagttaattaaggtctaattaagaattttgatattattaatatataatagactcaaactaaactcctatctcgtctactttcagtgtatttatatatatagtttaggtatactctcctttaaaattaaatacaaattataaattgatgaatattagattaactatgtgaatattgttagattttttttatgaatgatatgaatatatatgattgaaaacatatatgtactattaaaaaaatgatgctattgatttattgaactttaatttcacacaatttttgaatcttcaaaagaaaaccaactagtttctgtaggtaatcaggcttctaagatctttctttaccttttttaaatgaagttttttacaaaatgaatgaggagtttgggaaccgacaacactttatatttatagataatatactttatcattatttgtgttatattaattgtgtaaatattttgacaattaattttaaaaaatcaaattagaaaataaaattataatctaactatatttataactagcatgttactaatacttagtatgtatatatatatatatannnnnnnnnnnnnnntggttacatttttattgtaaccgtatggttacattttttttttaacctgtaatagcaggttactaataggtagactttccttttttagatttaatt

SEQ ID NO: 161240 - DNA, 14652 bp, Cannabis sativa
  modified_base (425)..(440): a, c, t, g, unknown or other
taagctatatttaacaatatttggtcatgcaggtatttttagaacaggtagttgattcattgcaattacctgttatgagaactgtatttgttgtttttattgctcggtgtccaggacaagtgattgcgatttcttgatgctggaattattagtatgaatgtattgaatgtcttgtgattgtaaatagcgagcttggtaaagcctaaacattgcatgaaatacattttttttttcctaaaaaaacaaaacttctgttttattttcttttgtactcaaacaaattgctaggattattattattcacttttcacttattattattggatctgtagcactttttgtgtatttcaaaaaatcaatagattatgttaatttgtttgattcatttgctcgatcagtgttttgtttctctctctctctctctnnnnnnnnnnnnnnnnatatatatatatatatatctcactcataaattctttgttttctcttaatgtgaaatatgatagatacaatactattgtgcttttcatgggaaaaaggagggaaaatggctactactattttattttgttcatagtcaaaacttctggtttggactcactttgtctgattttttatcataggcttcttaccttggctagtcgcttcactaccaaaatgattcgcacatacggattactacatcatgaaaataatgcatatttatcacatggttttgagttgacggaagtacatcatcttccacctctcctacatgataaatctcagaatgaagttggaacttccagaaggcttcgtgagatggctcattttttggaaataataagaaatctacagtctcggcttagttcaaaaatgaagaggcctggccaaggattggtatgacctgtgattctcttattatattagcatcttatcagatgaatgttagtatttctcattactttattacaggtaaatggtggggatgaatcaggactcgcgcctgcagatttatcattggacgagtccaaactttcaattctttcttcaaacaccctatctttggagacagtaaatcaaaatgataattcttttcatgtatctgctgtgggatctaattatgctgagaatcttgctttgactcatatggatcttaaagctcatgtggacccagggaatttgcatgaggtgtctgcaattgtatctcaagaagggctccttcaaaataaaattctttctttggaaaatcccaaggaaatgattgcacgttggaagatagataatttggaccttagaaccgtggtcaatgatgctttactatctggacgtctgcccttagcggttcttcaacttcatctgtatcattcaagagaattaatttcagacaaagagccttatgatacttttaatgaagttcgtgatattggaagagccattgcatatgacctatttttgaaggtaacttggtcaatgtttaagtccacaaataagattgtgcattattaatcatatttttacattaaaaacagggtgaaactggacttgctgtggccactttgcaaaggcttggagaggatgttgaaacaagcctcaaggagttattgtttggcacagtaaggagatctcttcgagcacaaatctttgacgagatgaaaagatatggttacctgggaccatacgagtggaagattatggatagaatatctctcattgaggtaagttttatatgtattttttcaatgctaaataatgattggcacctttgaatttaaatctcatcatctcatataaaagtatatgtgcaatgatgtgaaatacatgctgcaatcctgtgctatatgatattagtttaagcatgtaagttgattttggaattgtggattgacttttttcccctcttgcaaaagaggctatatcctagcagctgcttctggaatgcattcaatggacggcagaaagaatacatgagggttccagcaagctcacatttgccaaggaataatttgaagcttttgcattctgatgtattcaacaattttaccatcgagtgtggtgaaattgatggggttgttttgggttcatggacaaatgtcaatgaaaacccttctgttcctgtagttgaagatgaaaatgttctggggggatactgggcagcagctgctgtttggtgtaatgtctgggaccagagaacgattgatcgtgtaagtatatttattattttttcgtgacaaggaaatagttcctccaaaaaagaaaaacctaattaaaaccaaaccggcaatgtaaaacaaaataatatcaattgtagaattccaatgtatttcccaaactttaacttaaagatggacatttggaaaggaaaaaaaaatctttcatgtctcttacttacaatcagcctacaatgtagaattccagagtaatttcgtatttccatttttgactaaacctggctgaatgtcaaagtcagaacatgttctcggaataacccaatataatttgaactttgatgaaagcttccaccataaatttagcacaatttctgcagccattgttgacatgtatttccagtatttaatatatcagatgtatagtagaaaatgaatcattaggaattgctataatcgaacttactacgattgagattttcttatccctgacccttcccatgcttggaatgattatatgtgactggattcatttttctccttccttaactcatctaatttaggtctattacattttcttttaaggtctttttccatgttattctacattgtggttcacactttaaacaaaggttgattaagatgtccatggtctcataaatctcttcctgtacagatagttttggatcagtctttggttatagatgttgatgtactgtgggaatcacaacttgattactacatgagccatggtgattgggagagagtctctaaacttctggacctgattcctgaactaagtttagaagatggaagcctccaagtcagcttggacagtccccagcctacttcaactgttggatgtgctatggaatcttctttgcatcatgattacttctctgctcttgaagaattggatgctgtgtgtatatatattccaaatgtaaaacttttgaagtttccagataatattatgggctctacttggctaaagatgctaatggaggagaagcttgcaaagaaactaatatttttaaaggaattctgggaaggcactgcagaaatagttcctattttggctcgtgctggctttgtcacaagtcaaaatgaaatccttaaaaatgctgagtcagtggagagttcatcaaattcaaatttgtccacagatggtggagcatttggttttgatacagttcaggctcttcataaagtagttatacgttactgtgtccagtgcaacttgccacaccttttggacctttaccttgacaagcacatgctggttctagatactggttcactttctttgctactggatgctgctgtaagttcttaaatcttgttcttcaagttttttttttcttcttatctgctctctcttgcttatgcttctatgttgattttatatggtaagggtatatttgattacgttttgtttgcagttacatcctagtgatgaatgatagtgtaatcaatctctttaactcttccccaaaatatgacaccaaccttcttgtccaaagtacttttcacaccaaaatagaaaatgtgctgtgttagtttatgcccagacaagtgtatgctggagctgcctttaaaatttgcttaattatattagttaataggaaatttgggaggcacattgagtttgattttagcttatacaaggtgttttaacatggtcttccaagcccaaaggcctgtttgctgctgtatacaagttgctggtatatatgactttttttttccttcttgtatatgtttttacacagggagattgtgaatgggcaaaatggttgatgttgtctagagtcaaggggtgtgagtatgatgcatcattttctaatgctcgttcagtaatgtcacgtggcttagttccttctactgatcttcttgaggtggaggaagtaatttgtactgtagatgatattgccgaaggagggggagaactggcagctttggcaacacttatgtatgcccctgtccctattcagaattgtttgagtagtggtggagtaaaaaggcatagtaactcctcattccagtgcacattagagaacctaaagcccaccttgcaaaatttccccacattgtggcgtgcacttgtgtcagcatgttatggacaagattcaacttctagttttgtgggttctagaggaaagaatggttagcttttttgtcctagctttttaatttttatgagtgtgtcttagtcttattagggttttcagtttgctttttcttaaattcttttactgttgcttaatatgtacaacacgatgattcagctttatcagactacttaagttggcgcgacagcgtattcttctcttctgcaaaagacacttcacttctccaaatgctcccttgctggcttcctaaggccgtgcgaagattagttcagctttatgttcaggttttctgttgtggctctttttcttcttgctacatggaattatgatatttatgtgtgtgcacatgcattttacatacgcaattatatatatataaaaaaaaattgtaacttgtgtttgtcatatgcacgctaagtgagtcgtttatgaaaaacatactttaaagtagtagaataatcgttcatgttttatttgtgttgattgccatagtaaatttgtctgcttggatatagggtccgctcggatggcaatcaatgtctggcttaccacttggagaaactttgcggcacagggagattgatttttttgtaaatattgatgagaatgctgagatcaatccaatctcatgggaagcaactatccaaaagcatgttgaacaggaactctgtgatcctacccttgaggtcggattatatttcatttttaacgaaaatatatgacctatatatttcttattgttcaccaagttttttttttttttttttttttcaagtttcaattttaatgcttaaaacttatgcacttatagttaacattttatagtttcatgaacaaccttagtgagctaacttctgttgatttcggtgctacttcacttactgtgtgcttttaaacggagtttcctgcttgattaatattttgcctgtttgttgatggtaaaagattttgctacttcatgatgaactggtgggatatgggtgcatggataattaaacaacataagcatataggcagctttctgttatgccttgatataagtatcaatgatataattgataagtattttagaggctgagttatcaagtccttagtggctgagatgattatttaagtgtgtctaatactatattgctattggttggctagttaggagtctttgtaagtctagcctatatagttaggagtctttattgcctgtttgtaattttctctttgatatcaataaaatacctattctctaattctttcaagaactgaattggatcaatagtgtatcgctttcttttttgttcagttagctaaactttttttcatactgttgcatttgtgtgtacttttcttttgtcagtggccctgactttgttagtccatttttctgttgagatttatgatataaactgcatccccaggtctatcctgttactagtttgccattggctttcacccggaaagaagaattaagtaatttatatgctaggataatctgttttgggtggaaataggttgatgctatatcttttaaaataaaaaatacagatagaaacatgcatttagaatgttcacaatttacttgcatatgatcttgattcttctgtttgacctaaacactgcttctgatcttagttgcttccatggacttcaggaaactggacttgggcttgagcaccacttgcatcgaggccgagctttatcttcttttaaccgtcttctttctgttagaattcaaaatttaaaatcagaaggacaatctggtaatttgacacaaggacaaacaaatatccaatcagatttgcaaagacttcttgcaccgctaacagaaactgaaatctctcttctttcatctgtaaggattgatatgcttttcatttcaatgttttttgtttgatttattaattatgaaaccctcatatgagaggtgtaaaatgaaaagaaaagtacatgtgttatgtatatgatccttgtagtaccaaatctattttgagaatctcttttggcccttgaattcacaggttgtgccacttgctattatgcattttgaggattccatcttggtggcttcatgttcttttcttctagagctctgtggcttatctgcaagtatgctccgtatggatatcgcagccttaagacggatatcatcttactacaagtctaatggaagtaatgataatcaaaggaaactttcacctaatactgtttcccgagaaggtgatatggttgagtctcttgctcgtgctctggcagatgattatctgcatcagggaagtgtaacaaagccaaaaaaacctgcgagtttagttagtggtaaacaatcctcgcgagctctcattcatgttctgcatcatttagaaaaggtcagtctccctttgatggtggatggaaagacatgtggatcttggcttttgagtggcaatggtgatggaattgagttgagatctcaacaaaaagctgccagtcagcactggaatttagttacagtattctgtcagatgcatcaacttcccttgagcacaaagtatcttgctgtactagcaagagacaatgattgggtacatctccaattttggtgcatgcattttctaatgttatattgaattatcaccttgagatcttatcatgtcattctcttcttttaggttggatttttatctgaagctcagactggtggatatccttttgatgcagtaattaatgtggtaagccatgttcagattttattgcacgttagacgattataattcagaacaatgtaagaactgtgctgttaaatatttattaaatatcttcttatgcttctatttttcaggcatcaaaggagtttagtgatccacggcttagaactcacatattaacagttttgaaggggatgcagtcaagaagaaaagctagcacatcttatgcagacaatacagagaaaaggactgaaactttcttttcagatgaacaaatttgtttccctgttgagttgtttagaattttagcagaatgtgagaagcagaaaaatcctggggaagccctcctgaagaaagcaaaggatttgtcctggtcaattttggcaatgattgcatcatgcttttcagatgtttctcccttgtcctgcttgacagtgtggctggaaataactgctgcaaggttttaagcaataccaatagatttcttgattgcatttgcagatgatatttttgctttataaatgtttacattttctcatctacaactgtataatttgtatatttattttttgtgaagttgaaagtttggaactcactccatttgtattgttacagggaaacgtcttccattaaggtaaacgatattgcttcccaaattgcggatagcgttgcagctgcagttgaagctactaattctcttccagcaggaggcagagtgcttacaattcattacaaccgtcggaatccaaaacgtaggtgcattatgggctccatgccaagagatcagtcatcttctactgatatttcaactagtcccacgggtgtaaaagcatttgctgccggagatttcatggttgaagaagaaagaaaaatagaacttcatgacactgatgaaggacatgtttctctctccaagatggttgcagttctttgtgaacaacacttattcttgcctttgttaagggcatttgaaatgttcctaccttcctgttctttcttacctttcatacgtgctcttcaggtttgtgagctaacatacaattctgctttaatgttattatatggcattgagtattagtaaaattactcaatttcttttaaacctgctgtttaagttgagaaatcacacttagccatctccgatggctcccaaaatttccgggtacccttatatacttataagaacactttgggcccagaatcacaatttcttattccctataacatttcacattcccataatgtgagactttataaaagtccaacatcactttatgcttgatcttttgacatgcatattaaaccaatctcaacagcatgcgtcctcgtacatttggattattttatacaatattttatgccgttgatgttatcaataagaagttgagaactcaaatttttgtgctatggggcttttgaccttttaggacttttttttggcctgtcttttcttatttttagttatttattgtatttttttgtgaagattttacatatttgtaaaagtgtcgtgtcagtacctacatggttagtaatattcttcaaagagggtcaaactattatactacattttacactgttgatgccttgcatccatattttataatgtgttctgtttccctaataaatgcttgtggattttattacttgttattctctgaaattgtgcagtttagtttgtgttgattttagaagtaatagattgaattccattctacctagaaattcaaatatcttgtgtattttttttttcttcaggcattttcacaaatgcgcctatctgaagcatcagcacatttgggttccttttctgcccggattaaagaggaaccagcacagttgcagagtaatatgggaagagaagaccagattggaatatcatggataagctccatggctgttaaagctgcagatgctatgcttttaacttgtccatccccatatgaaaaaagatgtttgctaaaacttcttgctgtgactgacttcggtgatggaggatcatcagctacgcattaccggcaactttattggaaaattaatttagctgagccttcactacgcaaagatgagcttttacaacttggaaatgaaactttagatgatgcatcacttctcacagcattagaaaagaatggtctttgggaccaagcgcgtaactgggccaagcagttggaggccagtggtggaccatggaaatctgctgttcatcatgtcactgaaactcaggtactactaaattccttgttgtatttcacattctcttaactttcttatctgctaataagagatattatctaaggttttaataaactacctatctcataggctgaatctatggtagccgaatggaaggaatttctttgggatgttccagaagagcgggttgctttatggggccattgtcagacactgttcataagatattctttccctgctttacaggtaaactaacttgatattggcacttggctagagcccagttagaatgtaacaatcattagtgtagtcccttgtaactaagataataagattcttaggacaacgacagtcaaagtagatgttcttgagtgtaagcgcaacaattgcgttctctaaattatctagtattttcacctctggaatatcttttaattaaactattccctttgtccaatctatgtcgttcatacttttctcgtgatctatacacaaaaggaaaaagataaaatataaaaaccaatcttaactactttctgagattaaccttttagaagttagtttaacatcatgttcattctaattctaagataatttgccatcaaattttccaggcaggattattttttcttaaacatgcagaagctgtggaaaaggatctcccagcaagagagcttcacgaactgttattgctttcattacaatggttaagtgggatgataaccctgtcaagcccgtaagtttactacttaattaaattgcccttgacatctggtttaaaagaaaatattttctgacccgtgtgatgcatttgccagagtttacccattgaatcttctgcgggaaattgagactaaagtttggctcttggccgtagaatccgaagcacaagtgaagagcgaaggagaactcaatttgaccaattccattcgtgacccaattaataaaatttgctccagtatcattgaccgaacagcaaatataataataaaaatggataatcatattaatacaagcaaaagtagaagtacagacaaacatgacataagggacaattaccaggggaattacaaaaacccgtcagatgctaatttgttttctacagtaggtggaactactaagacaaagagaagagcaaagggatttgtgacatctagacggccattagttgatacagtagacagaagtgtcgaatctgacgaagttccctgttcaatctactgtaaaaatgaaattccattgcaggatgagaatgtcagaacaggtatgtctttttctagatgggaggaaaaagttggaactgcagaattggagagggctgttctttcactgttagagtttggacaaatatcagcttctaagcaactccaacataagctatctccagcacaagtaccttctgaattcatacttgtagatgctgcattgaagcttgctgctctttcaactccaagtgaacttgtatccatatcaatgttggatgaggaaatacgtttagttatgcattcatataacatactgactgatcaacatcagattgaaccggtgcaggttattgtccatttcactctatctagttttcttatattgtgatgtgaagtaggagtaagtattatgttgtgcctttgtttaaatattccttcttactcttttaccattttctgtacttattttcttatttgatggatcaacttgatatcctcatattgtatctttgttatgtgcatgcctaggtcttagagagcttagcagccatcttcattgaaggtagaggtcgtggcctgtgtaaaagaataatagcagttgtgaaagctgcaaatgtcttgggcctttttttcgctgaagcatttgaaaaacagccaattgaattactacagctgctttcacttaaagcccaagaatcatttgaggaagcaaatcttcttgtgaaaactcattccatgccagcagctaatattgctcaaattcttgcagagtcctttctaaaggtttctttcatatataatatacgtatatatattagtcttttcttttctttttcatgcagactttgcaagtgttgttatcacagtttgggtttcgtttattaattatgcaaccagattagacccgtattttagattaccaatataattgtactcagcaatgaatgtgatattcttttcatctgtttttaggggactgttaaatttaaaatttctctagcctatcaacacagaaacttggaaatatatttaaatctgctttccttgggttgctttttttattttgtagggcttactggcggcacatcgtgggggatatatggattctcaaaaggaggaaggacctgctcccttattatggagattttcagatttcttgaagtgggcagagctttgcccatctgaacctgaaattggtcatgcattgatgcgtatggtaattactggacaagagataccgcatgcatgtgaggtataagttcatataagtaatcctgtttaccatttatgtggaagcattactaaatgatgatgaagacttttgtaaaagctgtcttagtcctaaactgtgagaagattacaacataatatttactttttgctagaggcctgaaagaaaaatatttttctatagcacccatgttacaactataagcaacctatattttcaatagatgaggctcaaaataataggagtaaagacaatgtttgagttgaatatattatgtttggtcccaatcatcatgtaggctaagactatcaattggagtttgttaggtgggttatttgaaattgactggacatttggtattctatggggatgggagagattgttagcatagggattgggtggtctaaatggttatatgtagacaagtggctgataagagggaggagaaagttttgaggtagtgcttttaacccttgggaggttgctagatccctcaaagaacctatgattttctttctaaatacattttccttcgtttctatattacaaacttctttgctttatgtctactgttttgtgtttgtatctctttgggtcttcatctttttaccattatggtatactgtatgcttatatttgtcttgtctaggcttgtgaagggtcattttcttctacgcgtgatttgttcttatttttcagttcatgtctcgcaattggattgcaaaaggcactaatgaaattaaggaaaagaattatctactaggggaagagaaaaatgaaaatttgaaaataagttatggtcaataatggtgacttgtgagagaaatgttatttgactgctataatatgatatttgcaggttgagcttcttattttgtcccaccacttctacaaatcatcagcttgccttgatggagttgatgttcttgtagcccttgcagcaaccagggtggatgcttatgtcttggagggtgatttttcatgtctggctcgcctcattacaggggtgggaaacttccatgccctgaattttatactaggcattcttatagaaaatggtcaactggatcttcttcttcaaaagtattctgctgccacagacacaaacactagcgccgtcagggggtttcgcatggctgttcttacatcactgaagcattttaatcctaatgatgttgatgcatttgcgatggtttgtttttcattcatggttcttttctgtcatgataaacaaattcatgtactgtatttttcaagagaatgtccaacaaataaccattgcttgactatgaattggattagttgtattatatattctagtcttaattatcatatccaggttataaatagatttagttagttcacgggagaaaaaaaatcagctctttaattctttccctagtatcacttgttttaccaagaggagaacaaatatttttgttacatgcatgtttcataaaagttgattgatttattactattttttatttttattttgagtgcatgttctttctttgcaggtctacaaccactttgacatgaaacatgaaacagctgctcttttagaatctcgagcagatcagtcctctgggcagtggtttggtcgtaaagacaatgaccagaatgaagacctattagatgctatgcgctatttcattgaagctgctgaagttcactcctcccttgatgctggcaacaaagcacgtagagcttgtgctcaggcttcccttctgtcgctccaaatccggatgcctgacattcaatggctttacctgtcagagacaaatgccaggagagtcttagttgagcagtcccgttttcaagaggcactaatagttgctgaagcctatgggcttaaccagccaagtgagtgggctttggtactttggaatcagatgtttaagccagaactacttgaatttgtggccgagtttgtggctgttctaccgctccagtctgcaatgctaactgatctggcgaagttttatagagccgagttagctgctcgaggagaccaatcccagttttcagtttggcttactgggggagtgccaggagactgggcgaaatacttggggagatcgttcagatgcttattaaggaggactagggatttgaagttgcggcatagcctagctcaaatggcaactgggtttggtgatgtaattaatacatgcaacaagttattggataaggtccctgaaaatgctggacctcttgttctgaaaagagggcatggtggggcttacctgccattgatgtgaatttcatgacaacatttgataatggatggtgaggacaagacgaaggcatgttgacgaatactgatttttatttatttatttctatatctcatgtgaaaaaactgtactaagaattttacttcacctttaagagtaaatgtggccgacggagggagagtgttggtgggggtgcaagagagcagggtgggaaaggaggttcagataaagtggaagaaaatgagaaaggaaaaacatatatacagaaatagctgcatgatatgcaagttttggtatatcctgaaatggattacaagttcgagcctttttatcatttttcagagtcatcagaaagccagaatcaaagactaaagtttaaggcgtgtagttaggttaaatactaatagtcggttactaccaaagttttgtgaaatgttgattctgttctctggcttttttaaaagttcaaaaaaagaaaaaaaatccctattctttgattgacattttttgggttggttatacttgaaatgattcacgagaaatggtgaatttttgtaagtaatgtacaatatgtcaatattttttttttccttccccatatatggcttagttgaagtgaattagaatggaactaatgttttgttttttttagttgtagtgattttcatgctgatgcaatttgtatcgagaaatttgaaattctatacataataaaccctaatatttttttcctaaacctaaatgttatatcataggccatatacgactacattttttttatttccataatacccctcacatttgaaccaaaattctctctctctctctc

SEQ ID NO: 161241 - DNA, 5178 bp, Cannabis sativa
aagctatgcagcagccacaatctggaataaaacggccgtttgatggtggtgtagctggtgtatgttctcggcgactgatgcaatatctatatcatcagcggcaaaggccagctgtgagttccttaatttaatttattcagattctttttgtttccaattaattgaaaaatatcacgcctgaattaactaacaaaaaatttaacttgcatgtttattttttctagcctgaaaattgttttgtttacgtaattagtttttaagatgatttgtatttgacaggataatactattgcatattggaggaagtttgttgcagagtactactctcctcgtgcaaaaaagagatggtgcttatctttatatgaaaatgttgggcaccatgctcttggtgtgtttccccaggcagctatggtcagtttgtttctctggctgcattttgtttttttcggttaagagagacagttagagagaaagaaaagaggcgtgtgtgtgatttaattacttatcttacttatgtaaattatgtggtggtgattataacaattaaaatctttttcaggatgcttggcagtgtgacatttgtggttctaaatctggaaagggttttggtaagaaaattagactgccacttgttagtttcttaccacaagaaaatgtaatatattataagatcattatttaagaacatcaaacaggaatcatagcagggtaacagttgtaaggatggttcttagcattattaaccgatttaaattcttatatttgttgcaatattttgctcatgttttgtttagcttggtatcttgaccttaaggtgaatgaataatttccaaaaatttattagatttttttgtctgagtttatttttgctggggcattttatttgcagaggcaacgtctgaagtgctccctagacttaatgagattaagtttggcagtggagtcattgatgagcttatttttttggacttgccacgtgaaagtagatccccaactggtataatgatgttggagtacggaaaagcagtacaagaaagtgtgtatgagcagcttcgtgttgttcgtgagggccgacttcgtatcatatttacacaagatttaaaggtcaaaggctttgccattaagttttattactttatttctccgatgtaatctcatattgctgatttcatgcatttccagatcttatcttgggagttttgtgctcgtcgccatgaagaacttcttcctcgaaggttggttgcaccgcaggtatacattttgcgcaaaaagactttgggatgagttgtttgaactcatatttacttgtatatttgagttgctaagaattaacaactgttaatattcttttatttttcttttgcaggtgaatcagctggttcaggttgcacagaagtgccaaaatacaattgctgaaagtggatcagatggggtttctcagcaagatttacaaacgaacagcaacatgtgagatagtgaatcattttttcctcttgttcattttctcatttatgatgagcgcttattttctcagagattcatttattcattaggagtgatggttttaactaagtaaaaagctagaagatctttttattactttctctggctggtagtaactatcataaaatcagaaatctaaaaacacttggagttgtaacaacaagtagacatcgtctaaggtatcctattcctattaaaccaatattttttaccatgcctttattcgattgagcatctttttcaaagataagaaaaaggtatttatattaagatgctgatctgttaaataggattaatatcctgttaggggcttctgcacattattctttcttacttttggctgagctcttggatactcttgtttcaattgtttggatcgtaagacagactgcagttgtaagtttgaaacttgttgtgatccactttgtataaaggggtgaaattaatgttgaatgacttcagggtactatcagctggacgacagctggcaaagagcttggagctacagtcactgaacgacttgggtttctctaaaagatatgtgaggtgtttgcaggtacaatgtttatttctatgctcaagaaatttagtgtgcacattttgccttgaggctttcttatgatgactttttaaatagatctctgaggtcgtgaatagtatgaaagatctgattgatttctgcggggagcacaaagttgggcctattggtaaactcctcttcctttttctaaagtttcattcttttgatgtggtttatatcgattctttgtaactcgtaagatatatagggatattgatatatatatatatatatatttaaacaattttctttttgtttgggtggaagagatacgatagttactttgaagagatcatggctgtacatgcaaattgcagtctttcttcttgacctatgcttgtttctctttcctgatagaagtagatcctttttcttccctcaacggagtccttaaatttgaatcgactgttttagaaacatttgctcagtcttaatttcaactcgatatagatgtttaactttggaagaagggctggtcctttcactttcgatttatatatatttatattatattggaatcattgattctaacagtagtttgcctggattttttcgttgatactttttggcagaggggttaaagaattatcctcgacattctagtgccgccaaactccaaatgcaaaagatgcaggaaatggagcagttagcgagtgttcagggtatgccaacggacaggaatactcttaataagctaatggcattgcatcctggattaaataatcaaatgaacaacaatcatcaaatggtaaaccgaggggctttaagtggttcagcacaagcagctatggcactaactaattaccagaatttactaatgaggtcaaactctatgaattcaaatcccaactccatacaacaagaggcatcatcatcctttaacaattccaaccaaagtccatcatcaccttaccaaggggctgcttctttaataccaggatccatgcagcacgtatctgctagtggttactctagcccccacctacctccacaacagcagcagctgcagcagcagcagcgctcgttgagtgctaataacatgctacaacagaaccatccacagacccctcaaggcaaccaagccttgcagcagcagcagatgatccagcaactgatgcaggagatgtcgtctaacagtggagtggtacaacaacagtctgtttctggaggaaatgctaatggggtgaggaatggttcaagttatgggggtaacacttcagcggccacagctgtagcaacaactacaactgccaatgtagcaggaagtaatggacccgcacccccaagcaggagtaacagttttaaagctgcatcaaacagtgacacttcagctggtggtaacaatggattccaccagcgaacacccgagttgccccagaatcttcacttgcaaggagatatcacgaccgacatctcccatgagttcacagaaaacgggtttttcaacaatgatcttgacgataacatggggtatggctggaaggcatgactaacaaaatttggtctaattattggcgatccaggccgcacaagtggggcataatatatctttgtacaggtcaattgagatagctgctttctttaccccttttattatggttctcttttttctttttaatttttaaagtatggaatttgtggtgacttggcccgcttgtacttcagtagttccgtaggatcattagtaatcttcttctttttttttttttggtgtcgcccaagtcttgcaagtgtaatctattggacaaaaacctaagaacaaacagatttcgtatttaacatgtttacatgttttacatacgctattcactaattatctgtgaatgttgccttttccgattgtttatattaacatttcgactgcttctgaaaatgtcaaaaacagacatcaatcgtggcaatattcccattttcgaggtctaatacttcaatttggttaaactaactggacactaattgtatgattattcataattaattgaaatttggcttctaaaatgatacatctgcaaatcataaaaattattattaaggaagatctacagatgtctaaaataaatataaatagctttcgttggcaatcaaaaaacctccctttctgcaactttgatcgagtataagacaatatttgtggtgcacagagtaacagtttcagtggagaggctggacttgccggattgatggtgaaatacttccaaagctgtcactcaatttcctagatttgggtaataactcagattaattcaaaggaaaaagaaggaagaataaaacaacaacaaaagatcgttcagccttaaataaagttgtatactaatcatctattccagttctcatttctattttaacccacttattctcggacatgactttacatgagtttgttatcttcagaaaacacatccaagcatgtaaacaaaagaaatctactcaacaccatatgctcccagcataatactcacatattaagaaagactcaccgtttctgaataatgcttcagtaagcattttccagatggttcatgcatttcgacatcaaaagtaggcaagagtggtcttccaacgatttgaacatgagcaatactgtaccatggttcgtaaaagattaaaagaaaaatgtgattaggaaaagatatgcaaaattagctgcagtatatagcaaatcagcaatatctcaatatctaaagttacacttatgtttaagtaccttaatattactctatcgtctaaagaagctttaatgaaaagcactggaataacttcattggaaactaatagatttaggcactaagaacaaaaattgtaaacgaacaaatcacgaaacatattgattgtgtaccagatataatataagtcgtctatttcttgtttttggaccctgcccaaaagctcaactagcagatatcctccaacacagagagcaggttccgggagctcaaacttttgcaaaaaactttcctgtttcatagcaataagctattattgagtgtaaatgtcaagcatggcattatattgatagaattgcatttcaatattgtagaaaatagtgattcgaattatgtgtatcgatttcatagaataatacatatttatataca

SEQ ID NO: 161242 - DNA, 9987 bp, Cannabis sativa
tttggggcatgcaccattccaagtcattcattcattagtcttctctctcccaaccacatttgttttccaacttattacactttttccaggctgagaaaacctttataatagatccatcaaaaggtacaagaaaacagagccccctccaaacaaaaagataaaaataaaaagtaataaagagtaaggagtcagctttaggttgaaaagtcctttgatatggcaatattgttactcataaatgaagaaggcagagcaaaaggctgagtaaaactgcaactgttgttactgactacccattggcaaagacaatgtgcaccttcattttttgttggcaaaacctttgcagagtctcagtcaaacacaagaaagatgtgaaaaaggaagcaaacaggtttaatatactgtagagtttggaaaaatatgtacttttaaatgatgggatacaatgaaacattagtcactagccttgtagggctagtagccagaggtgttagggggcccttataccaccaaacctggagataattagggtagtgtatcttgtcttgtgttggtccgtcaaatagcattatggaagagatcactgtactaattattttccttttctttttgggtaaccagaacccaaaatgaaataagattatttcagtaaaacaatgcccctgttatcatgtatcattgtgtcataggataagctttaacaatctatcagccaactgaaagaattgacaagttgacttcaccaatacaacaaatcagtacatttcctctccttgctatcaaaattcactttacaagtaagacaaccaaaatgacatgggaaaaaacagaaaatagtagaaaaattcttcaccagcctaatcttaccttccaaaattctataatacctcaaacattaaggaggaaaaaggaataagaatgaagtgattctcaccactcaatactgtattctaattaaagttcaaaacttgagaagggggaaaaaaaaagacagcacagatgaagaaagaaggggacagaagaagcttgaaactatgaaaagggaaaaatggcaacacccatatagcagcagcaaggaagaggaagacctgcacatgcctaccttgactaactaaaaaatggtcaatatcagttacaggtggagtgcaccttttatgtcctcacccaagcaatcaggagatactattggcaaatttttcagcctctttttatggatttacttacactcaagctagtgaaggttctatcatcttgatgtctcgatccaattgtggtaaatttccaaaagatcccaatattggacctgcgtttgctgtgttgatgtttacaatgtctacccttactcagtagttacttggccaatttatatgtgcatgctgcggttgctgataaacactacctccaggtcctaccatatcaactcccccacccatggtctgagattgttgcagaagcgggtgcacagctgctgcagttacagcttgtccagggtggtagataccagcaaaggtgccatggccagcctgtgctggggtgaaagccatgtgctgaccttggggaggaagattgtaaaatgaacttgctggcaagctcgacatgtctcggccgggtggtgcagcaacccacatagcgggaccttcactctggagaatgcaattcatgaatttataaaattggagtacaaagtagttctaaaagcaaaacaagtgggcaaaacagtgcaaatcaataaagctatttcttgatacataactaagattacaaaaaatgcatttggggttttatagtaacacatctttcaaaacatcatactagaaaacaaatggactagtgtgatgatgcaggaagtgaatcttcatataatgaaatttacaatgtcaaaatatgataagaataacttagatattaattgcagtaatatagcaaaagccaaagcttacctgttgtccagcaatgtatgcattattttccttgaactgagactgaccaagatcctcattaggggtagaatttcctgctgttgtggaagaactggcattataaccaccaggagaggagttataaggcccataaccagttgctatcccagtatgagtggagtttcctgtattagtccccggtttgtactgtgaaagtgaatatttgactccagttgcagttgctgctggtggagctggataaacacctcccgcctgaggttgttggggaaatgctccatttcccaaaaactggtggatggatggagatggaacatagaatgggggaaaatagggaccatatgaaaagtagtttgggggataatgggaaatgtgcatcccagttggtggcctaaagacaggaacaggttgctgagttatagctattgagctctgcatgaggccagcagcttgtgtggccagtggagtttgaccagctgtagacagaatcccaccctgcaaacaggcaataaaaacataagcaagacacaacaaattttgacattgaagaattaacatctgcattttatgtgtcctccaaatagacaagatgactatcaaatgtatgttaggaaccaaacttcattcttataaacaattatctttagtatctgtttcattctctgattataaatgaaaataagaacatgcttccgagtgttttctttaattccacgagaatatgtgatacttagtgctgtgggtactacactggaaaacagttgaacaaaagcaacccacaattttaacaccccacctccccgccccccttttttccttttttgtgtgacttaatattaataatattgatgttaaggaatattaagaaatctatcccgcctaacaccagaaactaagtcttctgttgtcaagatacagttgagaggttgagcatgtagtgcctaaaaatcctcaaaacacatcttaaagacgtatcacgatactgtaatacacgaggaggcacccaaaaaaaaaaatcaaaccaattcggcaggctagactataaccaaatacattcaaagaatgtctatatcgggttgatctttattatttcaccaataaagcatttgttatttatatatgctccatgaaacacacacacacacatataatgtgtattaaattaacagaactcctctcattaacttaactggtgaacttccacaacacacaagaaaaatatatcaattacattacaaagaacaactaagcaaacgacactgctagataatgacattggcactgcaaatcattacaaagtaattatctggccatgatcaatctttgcaactgcatattatgctctgtacgagctgccataaataatgtgtcaaatctgataggcttttagcaaagcttaatagggtaattgattgtgaccaattctagaactgcgtatattaaaaacagacaatagaaacattacagaattctaattaaatgtgttcatgatttagagactaacatggcaaaatgaatgtaaagaagtcaaatggtggcaagagggttgcatttgacaataactaagaaaatgatgttagttgcttctggaaattgcaccagaattctgtaaaacaaacctcaatggaaaaaaaaatttaggaccaacaaattgccatggccaatgacacatgtcagttgttttgaaatctggatcaaatttgatataaactatagctaccatgtatgatgcattgacaaaagaaataataattttgaatacaactccagatatattcctggcattccttgtaaaataagtggtttattaatgcaaacctcttgtggagactgtgacatcgaagggggcaatactgcgacattcccattgtacttgctggcaacaccgggagaaggaaaaggagaaaggcgaccatcactatcagcacctgagcggtaaaattgagcataataacttgcctgatcaaagggctgaacctataaacaagagtagttaagcactgacagtaataaaaaatagcacaagccaaagagtgccagagaaatttcttattaaatcaacacattagattgcaaaagaatataaatggcaagcccatagaaagaaatccaaatgagctgcagatataagagttgccccaataaatttattattaacgcataaaaaataaagcttgaggactcactacaaagctttgaaggcgagaaacatctcgagcttgagactctgagttttctagtgggccaagctgacctcctaaaattggaggtaagggcccaaaattgtagtttgacggagtattaactgatgcgtattgatgggctccagcaagcaatccggtatcctgcttggattcattatgtccaggggtagcattggatgagacatcaccctcgacagatgatatattctcggatacatgtgcaggtgattgtggattctcaggataatcctctttgtccgcagtttccaatacattctgaatgctgaattcaaacatactcattaatacagtggaatttgttacaaattcatctatcagattaagaatacaaaatcataaatgaggtagaaatgtgctggcaagcaaagtttcaaacaaaaccagtataaatgccaagtccagcaaatttatgacaagaggtctggcaaatagacctagtcaacctcacaaggtataaatggaatgcatgcacaagcagtaaaacaaaatcttgggctatgaaacatgctaaatgaacttgggacaagaattgcattctttgacaaacgataaatcattgcatattcaattattcatgtgcccttggtctataaaaacaaggcaataataaacaaggatacttcatgataaaatttatctttttcttcaattcaagtttttcttaaaatataatattattattattatttaaagcaaaaggaaagatgataccaatataccataccaacctacaactaacaataagaaataaaaaatgtatagcataatacatacctagggggattgttcctctgcattttcttcaatagcctcagaagtgccagaaaatgatgtcgagctcctgtcactctcaggaacaatggtgttgctcatggttagtccaaaacttacaccaaaacttccaaaactcaattttgttctttcagattcaggaacatggatgtggtttggtaaaataacatgctgacgctgtggaaggtgcaactcttccagctttctctgcagatttgaagctgcatcttctgactcaaggacatttgaaacaggctgtgacctggaagtggcttcaacggtagcattcagaacctcagatgtaccacatgctccagaaccttgaacagcctttggtttccattccttattagaagccactgttcaaaataaatgttaaatcttatgcaaaattcatgataaatcaagagaatcttgtctatacagatttatatgtaaacttaaaagtgaaaatataaaatttcctcattgttgtaattgatttcatttacctacagacagaaaatacccctcatataccaacttttattaggctatagactattgacccagtagtgaagcatgctcaagtaccaaaattacattaattgattacgctagtgcataacaatgtatcaaaatggaaaagataatttcccaatgcttcaaaaagggcaggacagcctcagaaattacttagagatgccaaaattcatgatatatgttctcactctttgatagtccaataatgaagaaacaaaaaagaatatgtttgaatattttgaatattataccctttggagtgccaattactggttgtgaacggctactgtaattagaagatggacggctatttgaagaaccaacatgagttgatgcagatgaaagctgtgaaatttcagtgagctgaccttttactaccccttgggacttgcttgagaccttgttttgtacagaagagttaccagtctccaaacctgccaagtggccatttacaaaaaaaaaaatagtaaccaataatttaaaaataaaaaaaaatgaagaaaatgaacaaggtttctaagttctcaaactcctgaccagtagttaaattttgctcagcttcaattactgcagttggctcaccagaagaatggtggttccccacttcacgtttaattgtcccaactgcaccagggactcgtggatcattagacagaaccagtaccggatctgaagatgagaaacagacagttgatgtagatgttgccacaggcattgctgagtaattactggagctttgtgaaggttgctcattagaatcctcatttgtagatggactggtaagcttcaagttttcatcaacaggcgggagggtggtgctggagttggtagtgccaacagatgtcagctctaactcaggaccaattcctggtgagatgttggagacttgtgcattggtacttccagaagctataattgccgtgccattggaaataatagaaccagagctgcaaacaaagttgtaatgtaacttatccagaccatgcaatattacacgaccatgtcatgtacaagactcaaacagataatagagagggcattttttaaaataatatagccaccttgttactggacttccttctttatccttagcacctttttccaaaggattaacacccttttccacaccttgctggagaccattctccttccccgggcctgaaatcctgccaccaccagaatctggaaaaagaaacaaaaaggagattaatcaagacaggtgactgaacctgaacaaaagacaaacatataatctgttgaatgacaatacagtatttaagatattttcaattaattaaacttcagaagttatataaacgtatagacaactatgaatcaataaataaacacaatcagccccaaaagtcagaagaaaaggaaaaagcacacttcaacagtgatgaaatataaatagactcagtgttttaccatgtgacacattgcgagatgaaaagtttgagcgactgcccctgcccccgcgcccctgcactccaggtctccaccgtgactcagcagattctctgttgttcacattctgcaagtatacaaagaaaaatgcctgaagttctaaaaaagaaataggaaaaggaaaaaaaaaaacagaatccaaacttcaaataggacaatattaaaatccatacataagttaaaccacattacattataaaaacaaataaatgtggtggaatagtaagctttgtgacaaaagagaaaaaaaaggaaccctgttacaagtactccaactaattcgttcaatcaaacaccagagatactaaaataaacaatcttactttcaatcaaacaccagagatactgaaataaacaatcttacttcaaagtacaatttatttattttaaaatctgctaaataaagaaagaagcactactgggtattcagcatttaatcatatcggtaactttccagactggcaagggaaaaaaataagtatcaaattgaaaaattttaggcaggacaaggtaggaataagcctataattcaattaaattctaaaatttccaatatgggttaaagaatatcaagtcctcagatctggcaaaaggtttctgttagaaagtaagtgtcataggtttgcatcttagaaacaaagggaatgatgaaagaaggaaaaggatctatcaaatgcaaatttaccctaggcatacgtagtaaagatgagtagctaaatggtctactgagaaaggcaacaagacaaacaccacaagttaccaatcaatatagcaccaatatatataatatatatacatataagatataacaataatgtggtggcatcttgattatgcaaggcaaatgtttcattgtctgatgtaattgcaaaagtcatcataaaaatagttacctctttcttcctgtcacgtttccttttcacctcatgaaaagtgtctgaaaaaaaaggagaacgatcaaatcagatggttctgtttctcaatctttctaacttgtgcatatgaaaccaaaaaaagattgagaaaaaccagtcatccacagtcactgactccaaaagttatggattagtaatcaagtggataaacattaatcacggcttagaaattaaatttaacagcacaaaaatcagataaattattcttgtaatgctttggataaaatacccaatccaatgatgacaaataaacacagatgcaatcttacaggtaaaaaaataactcaaaagtacctgacaaaaaaaaaatcaaaggtaggaggaacaatgcctacttctaaagacttctaaatatctgaccattaatatgtgatagtagagaacataatttcacttgtatgaaaaggaagcagaagtaaaataacaagatgttgaatgcaatgcttcatccaaccaataaacaagtgcttcctcaggattaacatgctatggtgttctatagattcacaggctcaaaaatagaatttgtgataaaacatatataagaaaatggtatagaagtggcaaaagggaagcttcataagtaaaattagtttctttcttaaatttctgagtaaccaaaataagaaccacacataaacaaattttacatttaaactataacattaaatacaaactcgtgtaatttaaaccgaataataacactttaaaagaaaattcttatctaacttaactcctaaacctagtaagatcaaataaagaaagtcgggagtaacataagcactttcaaagagtgacaaagcttagcttccagaaaagaatccaaatagaaagggctaacaaccataaaaatggcattctaatgtaacgctgccatttttttctgatttatatttctataaaaagaaacagtgaaacctcatcatatcacattaaaatataaccagacataatcaactagattaagacttcaacataataaaacctaaatcaaagagaccaaccaaaagcaagtaaccaaactaacaaagcccaaagcataaaatttaaagttcaatccatggatcaacagaaaatcacgaaaagcgggatcatagatcacaacccaaaaaaagaaacaaagcaatcataccctgaagaagaagcttttgggtagtctcattaggatccatggagcattctttaagcattgtatagatttcctcatcagtgtgattactcgtgatctccttaatgttctggatcgtcttcctgacactactggggattgaaaccctaaacccaccaccgctcatattggcagacccagaaagcgaaaaacagcaaggaagaggaaaaaggaacccgagtcagagacgaggatgaagagaagcctccaatggtcgaacgagcgagcgaggcgagggaagaagggagggaaggattggggttaaggtgaaactaaaccaaacatataagctaaacccaaatatataaataaagtgatgttggagaagaaatggagtatttgaaaatttgatccaagttggaagacagaccagagattaaccagaaaacaaactctagagagagaaacatagaaaggggagaagaagagggagcaaatgtgaaagccttttttttttatttttaatcttttttaaccataggcttctcttttttaaaaaatgaaatatataatttgggctgttatttaaaaaataaattaataaatctaacaaattatacacattttagtgaaaaaaaaaagtgaattatgtttatgtttaatgcaagtgtgtgcgaagttagctcagttttgtgcatgtgttcctcgtaagcactgtcagcactacactccttttgcaaggctttttttcccactctgactctcacattctaatactttgcaatataatatatttttatatatttatattttcaaaacaaaaaaagaacaaatttctttgtagaacttcctaccacaatacaatgcaaatacacaaaacagattaactatgctcccgctgttttgtttactttgtttattttgttttttttatcaaatttaaacttttgatatatttttttaataatataagtaattattctagtaaatttttatttttt

SEQ ID NO: 161243 - DNA, 4877 bp, Cannabis sativa
ggcagcggcggcggcggtactgctaacacccccattaaccttaacggaaatgtccaaggattgatagaagagaccgtgaagagttgcttatcgccattatttaaggaactattgggtagcgcaatggccggcagcggtccgggaccgtgtgcggcgccgagggtgtttggtgggcttgcattgaatccaataccgttgaactttggcgggtcgtcaatgaatttcgggtgtggggaagtggtggacgagaagtggaggaagcaacagattttggagttggaagtttactcgaagcgattggaattggttcaggatcagataaagactgctttggaggatttgaggtcgagaggagggccttaactcttcaaatggcgaggtttttggaatcaaagatgacaactttgttggtagagcctcagaggggtcttcgagtttttttcttcttctaatttagccttctggttcgtataaatttcctctgatcacttattaatggttgataatatagtgtagcttagtatttgaatttggaatatttgttatccttaaattaattgataaaaacccaaaaatccaagctggttgaataatgattctccttaatgactgtgtagtcatttgatagtttgtttataggttttcttctttttagattctcctcgtgactgaataatgattcttcttcttttagatttgtgtggataatagataattttattgaaaccttaattttttcgtttctgtcttgtggcgataaacccttattcttgtttgtgtttttaacatttgagtctgtgaataggtgatctattctagaacataccaaagaagaaaacaaatacatgctttagcattttcaattcaatgatatgccttgcaattcatgctgtagatgaattatgtgattatatataatgtaacttaaatggagtggatctgtcaagtcagaaactttagactcaagaatctgagttgcaccttcttttttatagtaatgactctatgaaattattattctttaaccccaacaacttttcaatttataaaaacagaaaaaatcttttgatatgaagttctgaaccagtgctgtgttcctcttactttgactagttgacaacatttgaactgcaatattaaattgagggaggtgatgtttaatgccaggacgatctttttcatgtctcattatgtttatgttacatctattcatctagttagtaaatttatggtgatgaaaacatgtcttctgggttttgcttttagcttttgtaatatggttaactagaacaaaaggatggtcattattgtaattggaaaaaaaaaaaaagagatactttttgtgttgatatcatcagtcttataatcgaggtgagtgtcactacaaaaacggttcgtgaatcgtgacatgtcacattcattcatcttttctttgccctcctttctcacgggtcttgacaattattgtattttcagatacgattaattatcacagttatgatttcaacttggaggagaaaagaaaacaagccaagaataacatgttacatttttattcaacacttggccatggctttattaactatacatataagattgaacttctaatatactttttttatatgcaataaaaaatgtgtaattcctatcccaacatgtgactctagtctgaatgctgatttaacaagtacagttttgaaagcaaaattctattgtctaaacgattcaattcatttacaatataatgaatagggtttttttatatatagatttaagtttcatctagaactatggagtctataataaccataattatgcgactaaaagcatcagagtttctattagacaattttttttgccccttttgaaaagtcgagcactatcctcatctggttgttttgcttaattgattttgcgttctcaaacaattaaaacaactgtaagcttgctgacataagaggaggataagaaagaaaggagaaggcttttgaaatgatattagccaacccaaatatcctcaaaatcatctctttaatagtggccatatgttttttcttcacatttcaaggaatctaacctgttattttgtgagagcatgcatttctatcaattcaaacataaccaagaacagaaagacaccgaagttaggtaaatacattgggatcatatctaaaattagaagtatacacttttttgaagaaaagaaagaacttagaaatatacacttgatttcaaagaagtcggttgagctgtagaatgatagatgctgaaataacttttgacttttcattttccattaatagttcataaaaatgaaagtcttcaacgaagtacaaagatgaatttgattatttctgagagctccccataattaaaaaaagagaagaaacaatcagtacattgcgaactttgccttggtcttctcgaacacttgttcagcaataacagcaccagttccatcagctttcttgatttccaagtgagctttttgataaaatccagtgcctctcaatgcatctgcaataaaatcatcaaacccgattgcaatggcagcctcagctttcgctccataaaccaatctctgtttcaaatggagtagagaaaatgaacttgtcaggaaattttgtattgttcaacatggagcagttataatgacagaagataaaatgtgtaaaccttaattcttgagagatgaatagctccaaagcacatcggacatggctcgcaagatgcatagatttcgcagtccgagagctcaatttgattgagctttttgcaagcctgcaagaaagtccattccaagcatgagagtaacaacaacaatagaagaatcactaacaatgagctaaatccagggtagttcagttcaatcaaaattaaaaaatgcaaacttgaccattgaatttaattctcagaaccaagtaaaaaagaacacatctcttccagacacttgtctagtcattctcatcagttgtgtgctatattattatcccagtatgcccagcatgagcaagaccccaaaagagtagtgtttggaataatcaatagaatagacagagcagaacaataagttttgggaagcaattcaacaagaagtgtccaataaaatccaaacaattttctccccacagccacataaagagatatttggtcaataaaattcaggagtcaattctccacataaagaactgtcacatttgcacaactataaatcaaggaatcagtttacaatacagaaattcattggtttcatagtctaacctctcttattgcagtgacctcagcgtgagcagttggatcagtgttatgcaaaaccatattgtggcagctcactattacttcattgtttcgaacaacaacagcaccaaatgggcctccatgtccactgtcaactcctttgtatgcttcttccacagcttttgttaagaattcatggtctctatcctgtacaactagttacacaacatccaaaaataaatctgacacaaactataaaggttcgatctgtttgcaaactcatgcttcaatagaagaaactatagcaatactgactagtttatgcctttatggtaatggtcaatggattagtaaagcacaataccttcatggtgagcagcaaatgcagatgcgacagaaatggttccatcaactacaaaggaaaaaaatcaatcaataaaaacgccaaactgacatcagattttattttccaatcaaatgggagtttcaataaccacaacattatccaaaatttctagttgatccgttactaaaatggtgtgctaaagggcaattcgtatgaagcgaaagtaagcacttttcataaaatctaaagggaacattaagctaacaaactaaagagtctatatctgatatattagcagaaaatccaaatcctaagagtttcagataggaaccttcctaaaaaaaaagtcttcaatttgatcatttcagttcccatcaaaaggcgatctctcatgaaaacataaatacatagtagaaaaatgataagttctataagaaaatggaggaaaacaaaaagacttatacaaatccaagacgtaaaaaacttgtaattcaatactataatcatattgtacaccaaatcgcgacaaaattatgttcacaaagtatggatcttgagaaacttcccccaaaggctaattcctaactataattagcacacaatcataagaaaaaaaaaacaaaacaaaaaagaaaatcgaaatggcatggcacaaaaatagatgcaaaagagaaatacccagatactaaaatgactacaaagtagagaaataatgacaaaaactaatacctttagcgtcctccatgatgggaaattgaaatgaaaatgaagaactcagaaatgggtggaagaaaagatggacaaaagagagaatagaaaggggaaacgtaaaacgtgaaaatggaatgggaagagagctggtccacgagtcttatatttatagtgttggcatttagtgaagagagcttacgaaaggaaagagagagagagagagagagagagagagagaacactagcgagaaataaataaataaatgaaattgaaaagatgaaagaaatgacgtgttaaaagctgttagacaaatggaatggttattcagcttccagttcgatcatgtattcatattcactctatatattggttcttttacaagggaaagaaatcatatgacatttgactaaattctatatgagcactcaaaaacatggatttgtttagctttgatttaggataaaaagatttatgaattttgattcattacatacaaaatttagtattttaaagtgtaaatatttaaatttaatttttagttataagataaatatataaatttaatttttagttgtaataata

SEQ ID NO: 161244 - DNA, 4073 bp, Cannabis sativa
tttttttttaggttaatgcttatgcataaataaattaaccagaaacataaaaagaaatagatgcaagttattctagtgattagtatatactgcataagctttcaaagaatcttctttactgttagctctcacctaaaggatgaataaacttgtaagcataaacaagcaatggagaaatgggacataaacattgaagagcagcatgtgctgcaacaaatttctatattcttaagacaaaccctggagccatagtaaagtctgttagttccatcatagcttaattcaatagactaataacaataaccaaaacgagctctctagcaataatagccaagttttacttgaaaaaaggaagcattgttcggataaccttcctaagttattaagggaaatcaactaaaccttgaatgagcataaataggtggttctgactactgaaaattacggctatcatcagctagaattagtcaaagtcacctagatttgaaaacttgttagtccccatgttcaaatactcagaattctatcccatttgcaagcaaactttattttctcctctattatttgtgaatgtatattccctgtcacatgcaaattaaacaaaaacaacaagcatctaaaccttactatatggaaaagtaaaatgcagatagagataggcaaaggaaacaagatataatgtaccaagatggagctccctgagtactgttagatagcctacacagcatcagtcaagcaaaattgtcattaaagaactatattttgcctataattgaagctgcctcataagaatctatccaaatttgtccaacaatatgcatacacaaaccatttgagttggaatatatgtgccaaaggtcaccattaaggtatactttctctaagctgtcttactatgctcatttcagagacctaccagtctagtcttatatcaaatgaaaaccctgcagaggacagcatgataatgaaagacatatagtataagctactactaaagagtatgctgtcaaatttcacaagacaagcttccatgataatatagtctacttaacttgagacttccatgaatcaaagacagatgccttcttgaacatcttaaccaacctagtacaaaagatgtcctctaaaaagctacaaaatacaacaatgctgccaatttatatgaaaattaaccaagtgagaaccattagaaaataatacaaaagaggctctacacctttccgcatttcaggcatctaaaaggagtggggaatgtagcaaaacaacatacaagcaattataacagctccagcctccaggtgcattgacaaaagaaaaggagtcttgtcttactttactaagcagccttaaccttgtcatcccctacaacatttaagattggtaagctactaagaaactcatcaagaccctcaaaaaacccattcccttcaatattatcctcttccccatgtcctgcttctctacccttgttcttcaccccagttgtagcagactcctccacatcattgctaaactccacattcaaatccaatttactccgttccaccgcccccttcttcttcccaccactagccaccgccttggtcttcctcaactcccctcttgattgtggccctttagaggacccaattgcaccatttacattctcaccattagcactactaccattatcccgagcacctacattctgactggctcttgttaccctcgttgtattagtagtagtcattgttgtcttggcatttttggtaggagtatttctactcctagtagaagttcttgtcctcttaagtctcctagtattccgccagtcagcatcgtcggattcatcactgtcatcagaaagctctacgaaaatgtcatcatctctataaatgaacctaggggaaccaccacggggtctctttcctttcccatcatcatttctttttcccggggtttgaatggggcaagagaacataggcgaaaatggggtccaaccagaagagccactcacatctttggcgttccctgaaaacccaagagggaaaaaaccccaacaacagaagtaagtatcttctttccctctcaccggcggggaaggtatcaccgccgcgtggaaagccctcttgcagttctgacaacgtagaacacactcctcgtaccccttcggatactcatagaggacatagcagtaagggcatgcagtccagaagctctcaccctcatactcggcttcctcaatcgtttcagtcggcagagatgcacgagttgactcagccacattgttgagatttggcctctcctcttcttcctcgttctcctcgactctcccatctattgttccaaggttttttcttgctggttgtggttgttgttgtggtagtggttgtgattgtggttgtgtgtgctccttcgattgagattgctgtagctgtggttgtggctgcggctgtggttgctccttcatttgatgatgttgctgctgttggggttggaattggggttggggtagcagttgctctctcgattgaggttgaggcggtgtttgctcccttgattgagtttgtacttgtggctgagcttgagtttgaaatttaggttgaggaggatgaaattgccattgaggaagcgagtgcgattgcgattgcgaatgctgttgtggtttcggctgcaacggctgtggtggttgcggtggcggtggttgctgctgaggtggcggaggtggcggtggttgcggctgttgatgactctgaaagaattgcctttcaaacaactgacccgaacctgacccaggcccagccggggcaccgaaatcgtacctagcaaacatattcaactcgctatggaagaaattcctcctcgtctggttcgataagacagcccaggcctcagtaacaagctgaaaagcctcatcagagtgaggtaagcgatttcgatgaggattaaggagcagagcgagtcggcggtactgagtcgcaacgagttccatattttgagtgtacctcggtagctgaaggatagcgtaccagtcatactggttgttgatccgctgctcagcagcgtggagagtatcggcgacggcaactaggtcgtcgacagtctcgagaccagggtagacctcacggactcggatcgcgaagctcttggctccgagatgatctcttgccgctaaaagtttctccgccgtgcttagccaccgcttggcctctgcggttctctccattttcggacaagtttgaatttaattaattgaaattatttctaattttctcgagaaaatgggttctgtctctttctcgagaaaaaatgggtttgacagaaggggttagagagaaaacggaggaagaggatgaactcaactcaagtgtgtgaaattttttattttttattttttatttttggacgaaaatgtacaattcatttaatgtccacgagagactgtattttgtctctttagtttaactagttaggggtaataaggtaatttaatggaaactggtatgaggaatctctgacttgtaaaatctgataaaaataaataatataaaattgactttgcagttttcacattaaactctaaaattgtgtagatagataattttaacaatattcataaaaaaaatgattttaataaataaaaaaaaaaccactattatttcctttttgaaataagaatttatattttttaatagttaaaattaaataaaataattggaagctgagttaagcttggacttattggaaatttttatatgaaacttacttattttcataaattaaggacaaatattaattatgaggggtcaaattttgtaatgtattcatatgtagagatgattttaataatattcattaataaaaaatgattttaataaataaaaaatccactattatttcctttttgaaataagaatctttttttaaaaaattaaaattaaataaaatataattggaagcttacttattttcataagttaaggacaaatattaattatgtggggtcaaattttacaatgtattcatgtggtttttgtattaatgattgagttgatctaactattgttacttgttaaaataaaaaaaaaataaaa

SEQ ID NO: 161245 - DNA, 5819 bp, Cannabis sativa
acagtaacaacaatgaccaatggagttggaaaaagcagagcttctctgagtttgaagatttgttgcctataatggctgataaattaaggggagaagggcttattaaaaaactctgttaatggattcgagctgttaatggacaaggaaaaggggttgatcacgttgaagagcttgaggtcaaacgctaccattttgggtctgcaaaatatgagggaagatgagcttgtgagtatggttagcgaatgtgatttggatggtgatggagctcttaaccagatggagttttgcgttttcatgttcagattaagccctgatcttatggaagaatcttggttgtggctggaagatgtatacccggcttgggccaaggacattggggaatgcgaagagcgattttgggtgagtgtgagatcgggattgaaaactgatgagattgagaagcggaggaagattcatggctggaatgagttggagaagcacgaggggcaatcgatttggagattagtactggatcagttcaatgacactctcgttcggatcctactcgccgccgccgtaatctcgtttgtgcttgcctggtacgacggcgaggaggaggagaaggagatcactgccttcgtcgagccattggtgatttttctgatattgatattgaatgctatagttggtgtttggcaagagaacaacgccgagaaggcgcttgaggctcttaaggagattcaatcggagagcgctactgttattcgaaatggtgaaaaaattcctaacttgcccgctaaggaacttgttcctggtgacgttgtggagcttaaagttggggataagatccctgctgatatgcgggttgttcagctgattagctcgactttgagggtcgagcaagggtcattgactggtgagagtgaagctgtgaataagaccaataaggctgtttcaggcgatgctgatattcaagggaagaaatgtatggtttttgcagggacaactgttgtgagtggaaattgtatttgcttagtgactcaaacgggcatggaaaccgaaatcggaaaggttcatactcaaattcatgtagcctcacagagtgaggaagatactccattgaagaagaagcttaacgagtttggggagcttctgactctcataattggggtgatttgtgctctggtttggctcattaatgttaagtacttccttacctgggagtatgagaacggctggcctacgaattttaagttttcctttgagaagtgtacgtattacttcaaaattgcagtggcgttggcggtggctgctattccggaaggtttgcctgctgttatcacgacatgtctggctcttggtacccgcaagatggctcagaaaaatgctcttgttcgtaaattgccaagtgttgaaactctgggttgtactactgtgatctgctctgataaaacaggtaccttgaccacaaatcagatggctgtctcgaagcttatagccatgggttccagaggtaacactgtgcggacattcaaggttgatggaacttcttacaacccatttgatggcgaaataaatgactggcctactggtggtatggattctaatcttcaaatgatcgctaaaattgctgctgtttgcaatgatgctgcaataacagagtccgagcagaagtacgtagctcatgggatgcctacagaggctgctttaaaggtgatactttattttggttatatacgtaattgtatatattgtcatacgtcttcgtgtaatcttttgctcttgaatactttgggcaattaaagttttgcatctgatgttctcatgctttggaaaatgcacttgttttttatttaattttgttgagtttttcaggtcttagttgagaagatgggcctccctgaaggatgtcctgatattggacccacaaataatttactacgtaagttgaccataaaacttgggcaagctttgtgttcagtctctccattttctgtctttttgctctttctttctttgttttgactgttgaactaaaataatttatctcttcctcatttcattctgctaaaggttgttgccagaggtggaatgaatgtgaaagcagaattgcaactcttgagtttgaccgtgataggaaatctatgggtgtagtagttaactcctcttctgggaataagtcactactagtgaaggttctgtctttttctcttccttttccgctttcttcttgaaatgctacatgactcgggaagtttaaacaaaacaaaatgcaatctcactgaaaatttttgttttttacaataaaatttgtctatcgtattcaacagggtgctgttgagaatgtgttagagagaagcactaaaatgcagttgcttgatggttctgttatacaactagatcaaagtacaaggaaccttgtcttagatgtccttcaagatatgtcaagcagtgcactgcgctgtttgggttttgcatacaaggatgagcttcctgagtttgaaacctatgatggcgatgaagaacacccagcttataagctattacttgatcatgctagttattcatcaattgagagtaacctcacttttgttggttttgttggactcagggtgagtcctgttttctctttctgtaaatagtattgtttatcacatttttctttcccaaactaactctgtatggctgtattttctatactttttaaggacccaccaagaggggaagttcgccaagcaattgaggattgcagagcagcaggaattcgtgttatggtaattactggagataataagaatacagcagaagctatatgccatgaaattggtgtatttggatttcaagaggacactagtttaagaagtttaacaggtaaagagttcatggagctgtctgataagaaagctcatttgagacaagatggtggccttttgttttctagggctgaacctaggcacaaacaagaaattgttaagttgctcaaagaagatggagaggttgttgccatgactggtgatggggtgaatgatgcacctgctctaaagcttgctgatatcgggattgcaatgggcattgcaggaacagaggtacttatcatttcattattataaatttattgtttttattgtatcgtttatgagatgtctatcatgttatgaggttagatgctggagcatattttttacaatttgaaataaatggtgaaccttgaattattgaaaggagaaatttaggacagtttatattgattttagttatgtttttttacgagttgaatatatgataaaaatggtattaaaaaaaattaataaaaatgtcatgaccagaattcaagtattgtcaattgaatctttgtgctgtaaatgggctccttgtttttctttttaatgcaagtgtatgacaaacatatttttattttcctttatttctgcttacgattttgctaacttaacggtggtctaacttcctctaggttgcaaaggaagcatctgacatggttttggctgatgataattttagtactattgtttctgctgttggtgaaggtagatccatctacaacaacatgaaagcttttatccggttagtctttgtttcaccatgggatgtctgtctctttcattgaagcaaaacaaaataagatagtatgaaataaactacattaagaaattttacaagtttctcaagaaaagctaatataatgctggttagatttatttaatttcacaactatgtaatacaattgaacacatgctttgagtttcgactttgcaaattttggcaggatgatactgtagtgtacccccaccatgtacttgtagtttgtttggattgaatgaagtaacttcattaataacccctaactgttatgctttctcaactggcagtgagaatcctaagtagattagttcatttcgcatctcgtgtatgccgaatataattttgatgaatttcattaccctatgacaaactctatcaggtacatgatctcttccaatatgggtgaggttgcttccatctttctcacagcagcattaggtattcctgaaggtttgatacctgtgcagcttttatgggtaaatcttgtcactgacgggccaccagcaacagcattaggatttaatccccctgataaagatataatgaagaagccccctcgtagaagcaacgagtctctcatcactgcctggattctattccgttatctggtagctttttgctccattgaaatggctttcatttcactaacttctttgtttatattatacacaaaaagcgaaactgtgcagtgtatttatttgattattttgtctcaggttattggaatgtacgttggagtagcaactgttggcgttttcatcatttggtacacacatggctcctttttaggcattgacctcagcggagatggtcacaccctcgtcacttactcccaacttgcaaactggggccaatgctcatcatggaaaaacttcacagtttcacccttcacagctggttcacaggtcatttcttttgatgacaacccatgtgattatttccaaaggggtaaggttaaagccacaactctctccctttctgtactcgttgctattgagatgttcaactcactcaacgctctttccgaggacggaagcctgttgacaatgcctccatgggtcaacccatggcttctttgtgccatgtttgtctcgttcggcctgcatttcttgattctatatgtgccgttcttagctcaggtatttagtatcgtcccactgagcctcaacgaatggctcttggttttggccgttgccttaccagttgttctcatagatgaggtcttaaagttcgtgggaaggtgtacaagttggtctcattcatctagaaggagcagaggaccaaaacccaagtccgagtgagacatttcaaacatttgattcaaacgaaccttacagatattgggcctcacctatagcaaccctcttcccattttttcctactgagaggaattgtttgggccttagaagaaagttcatctctttttacttactgttttaccatttttgttttcgagtctttagcaagactggaatttttctgattattggaaaatatgaccaaataagttttcgtgcacccaaattagatgtgccaggagcttttagatatttatattattatgcaatttcactgtacaatgaaatgcattgatttttgtaagggaataataggttttagtaaattatttatcagtttattttaccatgtttgaagtaattaatgaaaatagactattgtttaatataactgttgaataaacttttaacaaaataaaagaggaacgatattaccgaatgaaaaattttgggttgagttgcggattaagtcattctctttaagacgttcgcagcactgcccaagagtgtgcaagcagtcggaatttgtcggtcgtccctaggataaaataacccagtcgtcgcactgtattagaactccaatgcactgtagagccccgtcgaatacactcaaataaatttgataccgtatggaattttagtatttatgaaaactgtattttttttataagaaaagatgtattcttcccatcagtttaatcacattatatagacgaatggattggaaaatcataacgggaagaagaacgttttctgaatcgtggggtgagttagcttgaacgtgttccattaattgatacgactaagtaatcagtttaattaacccaacccaacccggcccggatcagacctagtgatatgtataccaaagattacattcgcttcacctagatctttcatgtcaaaattttcacataacaaagatttcacattgttcacgac

SEQ ID NO: 161246 - DNA, 5181 bp, Cannabis sativa
aaaaaataaaattattaataatttctaaaaaaacttgacaaaataatagcgccattgttggatttgtaaacagagagttcgttggaaagagcagctactgtgagaatggagaaaatggcagctctcactctcatcatactactcttctcctcttcttctttttctatttccatggccgaaaaaagtgaccatgtacaaggacaacaactgtattcttcctcaaatcccaattggcaaatccaaaatcaacgagtcatagatgtgaaaggaggcccagattctgtggtttgggtgattcagctctctgatctccacttcagtgttcaccacccagatagaggtctcgacttcaagaaatttgtgggtcctgctctttccatgatcaacccttctctggttctcatcactggtgatctcacaggtttctctttctttctttcttttttttttttattgatctttcatgttttggctgatatagctttgtgggttgttcaattagttggtactctgatatggggtttcatctttcatgtcatagattaaggaattagattcttcttatgtctgactttatctggtgaaattttcatttttttcttaagaagcataacacagattactagtgtttttttgggcagagattaacctttcttaaggagttattcattcggttttggattgtgtgtttttttctgtttttttggagaaatttatgcttttttatatgctctcaactgatatatatgcataattggatttgacatttgaaagtaggtggcaattcatgttagcgtgtcagtgttgaattcttaaatttatcgaataactgcctacattacacaaacacaacccatgaaaagaaaattttataaaacacgaatacgattcggataaatttagtgttgtgttgtaagctaaaatgttgtttttattgtttcgtgtcattggagttcttaaatttattagatgactgacacaaacacgatctttgacactaaaaaataataaaacacggacatgaacacgattttctcataaatttcgtgtcgtgtaaaacccacaaaatgttgtattgtgacccagattgccacccctatttgagaggtgtttgtacatataacaggtcaacttatttggcttatgttttcattgctggatagagtactgttgcttgcttttccttatccttgtatagaaattataagcagtgtgttttgtatcgatatactcagtataaattagattatgattcccactagtctgtgatttgttaaaatatttggacttgtcctatcaaacattgtctaacttgttgttatttattatcttcactagatggcaagagcaaggattttttaacaatgaagctaaatgaggcggagtgggtggagtaccgggatgtaatggaagacgttgtgaaaaggagtaaacttgagaaaaacgtcttctttgacctcagagggaatcatgataactttggtgtacctatggctggtggttctttcgatttcttttcaaaatacagcattaatggacagctaggccggaagaaaaatgtcaacagtgtcaccctccaggaggtgagtttttgtctaaaatttctgattattttaaggtgcatttagtaaaccagtgcctctagtttctaaaactcaatgctgtcaatatttgtctttggtttttgcgaaaaggttaacagggtttactaggccagctcgaaaccaatgttttatgatgcaaaaagaaggatgctgtcaatatttgtcactaaattgttatacatctaaaaaaagtcttaaaatcaaagggtttgaagaatcactaactataaccacaacaattaatctgaattatttgctttcttattgcagatgggtttaaagtaatgatccaagtttgatagttgattttgattcatattttttgtaactgtacttgttttctcgatcgtacaggctgcagggcgaaaatatctctttgttggggtagacagcacgctgtcggttggtttacgaggtccaaccaatcttttcgggcatccaacagatgaactactaactgaattagatatggaactttctcaatgggattctcaatcaacaagaccggtaacaaaggttacctttgggcattttcctatttcattctcagcgttatctaattccgggaagagccttaaagatgtattcttgaatcattctgtatcagcttatatatgtggtcatctccatacagggtttggtaaaaatttgaagcgaaatcatcaatcgaatcaccattatttatcctcacataagttttttcagtttaacccacaccaagtatcttttgatagagtcagaaattgttcaattggagcctcgcccgtcaaagaattctgggagtgggagatgggtgactggaggaagagtagagccatgagaattttggccattgatagaggtcatgtttcttatcttgatattgactttaaatctggaagcaaagaaactattattttgccaacttttcctttagattcacgtttcatgtcaacatcttcgtcgcatcaaaactatgaatgcaaagctatcgtcccttcttcttacgagacagttagagcgcttgtgttttctgtttctccgattgtttcagttgtggctaagatatatgactcaagatctggaaatcttaatctgatcatggaaacaaatatgagcaagattgttgataacacttccaggggggatctttatattgccccatggaactatagagctttcgaggacccatctccggatagatattggttgcaaatagaggcaattgatctcaagggaaagtcaactttgactgatctcaggccattttctataaatggtcttaatgctaagatctcatggacttggttggaatttaaagtcatgggatgtcaatggactctcctgtatttcccattactgtggtctgctctgtgtttcatgctctccattctcattatcccgaaatctttgcttatcttttcaaataagcgtttcacttataagaaatttgtttctgataaaagcttcaaaaattgtataggatgggttctgcaggaactttcaatggttcatggagtatggtttggcatgttaggatacttattttaccttgtattgttcccatggttggttggaaaagtttttacagatgatgatattaggggatacatgacttacatgggttgggcagttaaatctgtcaatgggagtgagaaacatgaatatattggatttccagatgtaatggttgtagttattccccatattgtatttgtggtttttccttctattttggtcactggatttttggttgctgagaaagatatctatagggaacattatttatctgtaacaggaaagaaagatgacaatgatggtgaagaaaaatcaaaatcttgtgttggaatgcggtggctccgaaaatttcttttcgttgtttgcttggtaatcttatggatgcattttaaggtaaagcctcacctactaatctatacattatgtttacaatttttctgaaatgtgtggtttaatagagcatgttgttcaagtagttgtatatgttgatcgtaattattgtttcacttccaagtttgaataaattgacttctgataactttggtaggatttagtatgattaatagctatggtcttatctgtcattatatggttttccaaatgtagatatgttctatttcaatatttgtgcgatcgattcttaatttttatgaagattttggattttaatttttggttgcagagctgcatggcgcttgttaaagcgtatgagatgaatccaatccttcattttccagtatattgcttcataatccctctactgttgacttatgttgtctacaaaactagaaatgtatagcaacactaagtgtataagagcatgtgatcaagtacaattgtctgaaaaaaatacatataaccttacatgatattagtatttagatattattaaaattcttgtcttacccataagaattctttaagatatggtcattttgtcataagaattcttgagatatgttttgtttgtcattgaagtgtacatgacttatgtaaaagaattctcattaggtatgtatgaactaataatgatgtataaatattatgcagttatgtatgatacattagttttgggaaaaattcaacttttacaggattacacaatttaaatttatagtaacacaatgtgggactacaaagggttcacatttggtaggttttggcaaacacaatgaaaggtgttttggggctttatttttgagacacaaaacacttttgttcttgggcggttgatcactgataatatcatggtgactttgaaaatcatgaattatttgaagtagaagatgttggggaaaacggggcaaatggttgtgaaacttgatatgagtaaagcgtaagatgtattgccagcagagaaatcagctccaacaaaactaacaacagccgcaacaacaaagtcctactggaggctcaaatatccaagctgattcattacttcaattcatgatggaaattagagcctccattaaaactttaaaaaatcaaattggacagttgactactcaactgggcaaccgtactcaagggaattcacctagcactagtgaagtaaaggaaaaagggcaatgtcaagcaattttcttgaggggtggaaagagttatgagggacctagtggcaagcaacaaattaaagatggggttcaggatcaacgggcacagacacagacaccaagggaaaagaagactactgagggtcttgcaccgaaagaagcttcgcatccgatcagcatagatcatcatattaaaattcattaccctcaaagactccgcaagaacaatctcgacaagcagttttaaaaatttcttgaaatattcaggaagctgcacattaacattccatttgcagaggccttggaacaaatgtcaacttaccagaagttcatgaaagaaattttagctaagaaaaggaagttggaagaattcgagacaatggcactcactgaggagtgcaatgaaattttgcagaagaaactaccgcccaagcttaaagattcgaccagtttcaatattccatgctctatagggggttcagtggaaactaaagctctatgtgatctgggagcaagcattaatctaa

SEQ ID NO: 161247 - DNA, 5032 bp, Cannabis sativa
ttaaatatgtatatcatcaatcacttcttttcatatatttgtctctcttcaatatgcataaatgttcactatgcaacttcattacaaaaatacaacacgcaataaaaaaatgaaatcaatgtgcacttaaatagaggccattaaattatatcttttaacaacaaaaacaaagtaataatactatcatacattataccatatgggtcctagttaacatcatccacactactcactcatatcttcaactcaccaaactttcctagggcccataagcccaagaacttcttcccaaagcccaacacttccaacactcgcaagcccaacaacatttgggctacaagcagccacagtccaataaccagctttaatttcatctctcaattgctctttctcccaaccacagtacccatcaaaaaatctaaattcctcaagcccaaccatatccctcttgaccatttcagaggcacaacccacagtctctttcgtcccataatacaaccctttcataacttcatcaaacacaccactcttccccaccacgtcatcaccctttccttgtgggcttaccaaaaacaggccttcctctaaaggcccaccaaagaacaaaggcctatcagagaacgtgccagcaatatccaaggccgtggaccttgtctccttaatggacataagagaaggcctgtttagaataatccctgatgggcctaaaggcccagtagccaagagcaaaatgaccgtacgctcaaagatgtggaccccatcgagcttttccgttgctatgagtaggcaacccttttcgggctcatgaatagtgtgggcccatttatcaccgatgttgatcgacggtggaggatccaccaccgcgtcgagatcgacggacgaggaagcttcctctgcttgttgaggcctaacaacttgttctccggcgaccagtttcgctctaaatgatctccaatcgggatcgatcatcggcttcttatcatcatcggacggtggatacgatcccggtaagcaacctaaagttcaaatttttagaatcaatcaatcaaatcaaagaaaaatacagttttttttatatactaaattatgaaagtaaatagaaattacatgatatggaattggaattctgatttccaagtttcctgtaatgaatttgagtagaaattttcttggagaaattgagaattttgggcctgattgaagggggtaattctagggttttggtgaaggaattggttgtgaataaacaagcttccattttttttttcctctctctgaattgaatttcagataaagaatgattatttttttgggcaatggataaagtagtagttgggggtagatatttatagtaagtaaagggagtcaatatacaccacatggtgtgttgttgaagaagcccatccatggtccttggtattgatattgaaactttactttttaagccctaaatgacaaagtatgggccagtggatatgactgttgacgtggcagtgccaagaggtaccacgtcagctagagaattttcttctctttcttttggatattggatcaatcagacccttttagataaaaaaattcctaaatgcaccaataataccattagaggtatcacattgttatttgttattagtgttatataattattataaaaaaaaattgctaattatatgatagtgttgtctttagcaagcattttagatctgggcaaaacaaaattgattaacaaaggaataatgagcttttaaagtatcatttcccataaatgagcttaaaaatttcagctacaactatggaatacttatattctccattgggtgccaaatagacctaatccttagagcaaacaagattgccctaatactacacaacattcttattttctctttcaaacaatttaatcaactatgctgtatttttgctaatggtaataaaagacaaacaagcttgatatggagaatgaaagacctcacatacatatatatggatgtcattacggcaatcattcctctatatatcaaaaataagtagttaaaaagagttcaattatcttttttttggacaatttgagaataccattttcttcaagtgcttttaatttaaatcatgagtggtgtactgtaaactagatctttgcaagcaatttagtctttttttttttgaaatgcaagcaatttagtttttaaacattgataagatatgcaaattgtcatgattcaaaacagggaacaaaaactaaccagagattgtagtagtagatactaataacctgagttaagtagaattttttgcggagctttaatatctggaagaacaaaaaaatagttgaatcttgagtcataagctatacttttaagtatacaaaaagaattactacagaatcagttgcctttttcttcttgccttaataataaagaataataccattcttttgcctattggtacaaactacaggaagagaatttgttttggaaatttgcaatggaacattctttaatgcaaagctatcttgtatgttgccactagatgcattctaaagcaccttctattgcctatgttatttttggaaatatccgattcgcttaagatcttgactcaacctgccaatcatctgataaatcttatcagattgaggatgtgattcatcaaatacagtgaattcatggacctcatcatccacctctatggaacttgcccctgaacgtttttggatacctgtactccgcattagcagcctcatattggcaacactgtcccaatcaccagctgcagcataaatatttgacaacatggagaagtttccaggatctgatggctctaatttaaccaggcgatcgagaacctctctagcaagattcacatcattatgtactcggcaagctcccaaaagggtaccccagatgaccgcatttggctctaacgacatgctattcacgagatcaaaggcttcattgagacgtcccccacgtcccagaaggtcaattacacaaccatagtgctcaacctggggaactattccgtactcactttccattgagtgaaagaatcgaaggccttcctcaacaagtcctgcatgagtgcaggcacagaggacagcaatgaatgtaaccggatctggcttaagtctttcttcctttttcaattcagaaaaaagatgaagcgctttctcaccgtgaccatggatagccaaaccatgaagcatggcattccatgataccaaatctttattcgttatcctactaaagacttcatatgctttgttcaaactaccacactttgcatacatatcaaccagagaattagatacttgaacactacacttgtatctatttctcttaattgaagcatgaactttctcacccaaaccaagtaaaccagactcagcacaagcagccataatactaattattgtcccctcatcaggcttcaacccaactttctccatttcatcatacaaactagtggcctcctttgccaatcccttttcagcatagccagctattataatagtccaagtaaccaagttcttaacaggcatcttatcaaacaacatcctcgccatttccatatccccagctttactatatccagcaacaattatcgaccacgaaaccacattcctctccggcatcttctgaaaaaactcaaacgcctcattcatcagcctagccttactgtaaccatccaacatagtattccaagtaactaaatctctctcaggcatttcatcaaacaactggcgcgcctcacccaactcgcccactttcaccaacccaccaatgatggaattccaagaaacaacatccctaactcccatggcattgaaaaccttcttagcttcactaacaccaagaggaccacacttacagtagcaatcaataagcgagttgggcacaaatatatctgaactaaaaccaaatttctcaatatggttatgtatcatttgaaccacaggcaaccaattcctcccataacaagctttcaaaagaaaggaataagtaaaattatcaggacaaacaccattactctgcatattaaagaaagtagcaaaagcttgagaggtctgagaattctgaatgtgagctctaatcatggtattatacaaatgcacattgggttcttgaatttgatcaaaaacgttcactgccaacgccaactgacgacacaaagataaagcagccactaattttgggacaatataaaggtcatggtgaagattagctctgataatctgagcgtgaatttgctttacttggcttaaatttgagcatttgtggagctgagatagcttctgttctaagacccttcttgatgaaacccattttggagttcgaaccgaaacacacatttgcataatggaaaaccgaagaatttaactgtgtaaaatattatgataatggaaaaagatttcaaatttcgaatttgtgattgaaatgaaggtctgaccttttagttctcttctcccatggttgcttcatagtccaaattacagaacacttatctttctgaagctgaagaagaagcttatctctgatttttaatggtgtttttcttctccttcggttggggttaggagtggtagtcgtggatgatagagaaatgggcttttgggcttcaattatatatattaacaaacaaggcccataggcatgtttaattggtaggcccactatatatggagtcaaagagtatctaataaatttcagaaatcaaatttgctagtaagtagtactagtagtattctttcaaaaaaaaaagtagtcctagtagtagtaactgattttttgacatgacacaaaattagcatgagtttaagagacacgagcacaatctgtcatgaaaaaatatgagtttaaattaggaaggaaataataaaggcaaaaacagagagaaaacagggcgtaaaatctggtgtgtattgtattgattgtatattcctcaataatgtacagtaaagatattagcagatatatagtacaaggaaaggaatcttttcctaacaataaaatattccttttgccaatgattggct

SEQ ID NO: 161248 - DNA, 1988 bp, Cannabis sativa
tttctctgtttctatactgtaatagcctttctaatttttttacttaaactcattattcatctcaccaatctagctagctagtgttgaacccttttgagtgtcaattttttggtactttcattgagagccacaatttgagttcttgaactacagttcgaattctgtattcgatgtcttacactttaactctttgctcagatattgggaaattattttatatcaatcgatgtttaattatttttcaattttgtatctttgttatttgatctattagtcacaatcacatctcaatatgaagagtatatatataatcttaatatgataatatttgaataatattagttacaattgctttttttaagggcgtaatttttatgattagaacacagcctgtaaaatgtttaagacggcactaattaaaatgtattgtataattatgaattaaataaaataataagtagaaatatataaatatcgattgctaaaaaacataagaagatctcttgtttggttattatggaataacaaaaacaaaaagaccatttttctcgttttctcttcggttattccatataattgaagttaaagccttcttcgaattcaattgttataaattctttctctttgcctgaatagtcttcagagagaacagcttttttttttctaatgattaataaaacaaaagaactcatccttaaacccactactacactgtctttctaactagttgaaagtaaaataaatcctaaagatagaacggtagcatagtttttccaaataaaaaaatctttaaaaattatttctgaaaatttgtcaggaagggtcctttggaaagttagctttcgtctaaaggaattccggatagctagttgttccttctagaaaggagtttcgaataatcgacttcagttggctctatcctatcaagaagatccttcagcaagtaacttcggttcgtgttcttagaagctctcatgcatgtacttggaagcagctatacttatgctgacgtggggatctcgctcaaaggagagtttgttaagttgatttttgcctaattaacctaaaaatttcgcttcttgcagccaccgaatttaagatcttgataagcctataaatactaccaacacttatttttttagatacaatgattagagcgagagagagaaaaaaaaaaagattaagaggtagagagagaaaggtactgaaaaattttgtgtaaatgaaaaagatttttggataagagtgtgagagttgaaactttgagagaatccaactgagaatcttctcgactatattgtacatgttctttctcaatcaatgaagaagattttgtggtgctttaaaactggagtagaaccataaatcacatcgatctattaaatttgaactagtatatattttgatattgattttatcgttttactgctttaattatttttaaattttatactttgttcatcactgtttttttttttttttaattattgattgtgatttgttatttttgtcattgttaattatttcaaaaaattatagtagataatttattatagaaatatatatatttatattagataagtttgactgtttggcatagagtattgaaaaatataactttattgtttctcttttcctttttttctttttttgagatacttataactagtattatttttgtaggaatgaatggggattatagaggaaggtggctacaagaataaagaaagtcaatttatttgcacaattattagttttccttaaaatacgggaaaaataagttattattttccgaaacaaagtcatatgtatccatatcattgcaaaagatggctcgaaaagaatatccaaaccaaaacaccaaagacttaccacaacaaatacattttattaagttgtatggtattgtattaaattatattatatatcatatttttatataatattatgttcaattttaatttatactaaaatattatatatttagg

SEQ ID NO: 161249 - DNA, 15683 bp, Cannabis sativa
ataccctaagacgtgcacacaaataattgagtaatgtttcacggtctcagggtttgcatgaacttggagacgagattttatttacctttttggtttggggtgaagggagctctcaattttccttctctatttcttattgtataactcatcttgttgttgttattgtttttattatatttttttattaaaaaaatgagagctctcttagctccaattaatgctaaaatatagcaataaaaataccacaattgctagttcattgataccatgcgtacacatgatttaataatggtgaacgatctcaggatttgcatgaacttggagatgaggactttttaacttttttggtttggggtgaagtgagctctcaattttttttttctttttcttattatataattggtgttattggcttttattatattttttaattgaaaaaaagagagctctcttgtctccaatgccgaaatatagtaatgaaaataccacgattgtttgtgtatggataccccaaggcgtacgcacacatgattgagtaatgatgcatggtctcacagtttgcatgaacttgaagaagaagttttctttatcttttttgtttgggggtgaagggagctctcaattttccttctctttttcttattatacaattaatcatgctgttgctattgtttttattatatttttttattataaaaaatgagaactctcttggttccaatgcttaaagatagtaatgaaaatatcacgattgctagttcatggatactctaaggcgtgcgcacacatgattgagtaatgttgcacgatctcaaggtttgcaagaacttggagatgagattttttatctttttaattttgggtgaagggagttctcaattttccttctcttttctttttatataattaatcttgttattgttattgttttttattatattattttattattaaaataaaactctcttggctttaataacgaaagatagtaatgaaaatacaacaactgctagttcatagataccgagagaggcatgcgcacagatgatttagttatgttgcacggtctcaagatttgcatgaacttggagacgaggctttctttacctttatagttataatttaggtttcttcttcttcttcttcttcttcttcttcttcttttagctataatatctttgctagttcatgaatacttcaaggcgtgcgcacacatgattgattaatattacatggtcttaaggtttgcatgaacttagagactagattctttttacctttttagtttgggatgaaaggagctctcatattttcttctctttttttattattattcatgatgttgttgttattgttttgtttacatgaactttttttttattgatttatgatgatcgactgctaattttttttttttttaaaaaagtaattattatgtttatttttctttttttacaaaaattatatttatgttttaaaaactaaggtgacatttggttggaggtaatggaatgaaatggaaagaaaacaatttttattctatttttttgtttgattacatattaaactattaaaatgtcattccactattccattttaaaattaaaaaatatatatatatcattctaatgcatggtgataatttttttatgttttttaaattttatttaatttcattcctaaatatattcttatttctttttcctatgattttattaaagtgatatgttatttatagtttataccataacgatgaaaatattaaataaaataataacataaaaatattgtaattaaaggaaatttataattaattattatcataaagaaaacaattaataaaaaaaaatttgggaatgattactagaatttgatacactatttatggtctatataacgatgaaaatattaaataaaataataatatcaaaatattgtaatatgaaaggaaatttataattaattattatcattaagaaaataactaataaaagattttttggattttaaaaaaaataaaagattttttgggaataattactggaatgatttagagtcatattcttatacttaactatattttcggactttttttttgaatttatacagaagaggaatgtttattcaatcaataataaggcaatttgtttaggaggaaataatatgagatttattattcatgattttgaatgtacaaaaatgagaaattaaagcttatatataattagtgtaaaaattaaagaaatgatcctgattatattattttcaaaaaaaggcaatcgtgatttgcttttactttgtttgaaaaagtagaaaggagacataaatgtgaaaagattccgttggccttggggctaatgcccaccattatcgctctctgttccctaaccttacttactattctctctttccacctttaattgtcagtatcccatctctctcatctcgttccaagagaaaatctatccttgagatttcgtggtccgtccccataaattttccatattaattttcagtctatttctatggtccactccaacaacttttctactagggtttcttttatatatcttctagtatttacccttttctctatataagcactcttccacctctaccctcttcatctctctctactcatttatgcctatcgatctcaatatattttcataaaagatctctttctctctatctctctttggttgatactacagctaatattttgtttttctaattttcattaatcttacacatggagctcctttcggttcaaactaagggaggagtgaaaggcactgacacggctgctggttcatggatgcctctgggctgcgcaggataagtcaagcttgtgcgcagcttaagggtttgcatgactcaggagacgtgtttgccttctccattaaaccttacttggattgaagggagctcctgtactctacagctttttattaattaaactctctcattcttatatgtatatatatatactattattactattagtactaatgaacttattttagtcttgattttttttcatacgtttttgtgggttttgttttgttttcttttttttgcaggttcgttaaatgattgattggctagcggctgttctaatgagatccaccaattgtataatgcaatttcgatttttctgatttaggatttgtcataagattagttaaatgtaattgctttgttttataatatatattatttttgcttgtatatattagtgtttcgattgtaaaaaattgtagagatctaacaaaaaaataactcttgataattttttatattatttgttaaaatatgacagttcttggcaatattctcatgtatttttgtacgtatactttgcctggtagttgtgttgtagattctcgtttttgtactttccagatctcttattaatataatgtaataatttataatatatacatgcataaattaacattattagtgaaagagttattgcctacctttgaaagtattttatatatttagttctcattcaaattttcaagttaattattccaaatgtttgtaactaaattaattggttgaaatggagtcaatagttctttcaaataccacaaattacaaaggaagataagtctgtctcaatgacagcacagaaaaacacaactagtttcagtcattacagtttgatactaatttttttttttcaaagtctcgctccaaatattccaaatattctaaatattctgattttctgaatctaaatattgggtaataataaaaaaaatcaaattagtttttttttttgaataacaaagaaacaattctattaaaaaggtgcaaagctaaaagatcaatacaaaagttgatggcctagccaagaaaatatgctaaatttattccagtacaaatttcattactcaaaatagcttgcaccaaagggacatagacaatgagagaaaattatcagatttgtttgccccaagcaaagacctaaggaggagaccttgcaacatgcatggctgtggattcgttaatgtcaaaaaaaaaaacgtaaaataactcaaaacaatgaaagacaggtcaaaaaaaaaacaaaaaacaaacaaacaaacaaacacaatgaaatacagctttgttaattaaaaaaaaaaaaaaaaaaacacaatgaaatacagcttttacttccttatttattgggagaaactaaattactaagttgcaagttacaaaagtaccttttaagtttacaattttatgcaattatataactttctataacattttgtcatttataattaatgggacaataaaaatagtattttcccatactcaattatcttattcattcttactcaataaatcatattacaacttacaagtatatatacatacatgcaccgcgtgtaacttattcggctatatacatacaactttttttttttttttgaaaagaatatacatacaactttaaattcactaaatcaagatacaacattcatattccctcgtagagacaaaaaactttcatataaatatatatattgataattgttcaatagtaaattacttcaatcactacccacataggtaatatgttttagagtaagttgcatttgtgtgagaaaaccgaaaattaaaaacagtgaaaaatatatcttgtgatgacttactataattattacaaatttacaatggacaagccaacttaattaatatattaatagattaatatgctattgaaaagatttacgtatgtggacgggcgaccatataatatcaatgtttcccttcaatgtttttttttttcttttttttctttctacaccaactaatttgttaaaccaaatcatttatattgtacattacttatttcaataaataataataaaaaaggcactagttaatgagagaaaaagaaagtattattagctctttttttaagaagaagaagaaataattcatttaaagactataaatcaaccaaaataggccaccaaaaattgtactgatcaaagtttgtatgacagtatgattttttttttcaataaagttatccattgttaaaaaaaaaatcgaaaccgatctatagccaatttaatgagcgcattggtttctctataagactaaagttaaagatcaaaacccaagcttataattacaatgcaatagaatatcattagtaacaatactagcagtggggaaataaataaattgctaggtagaagtctgatgatagtgcaaaaattggaattaaatatgcaagtgaagacttccattctatccctactagacacaattttctaattctaacttactttgtataagtaaacatattttgtatttttttttattggaaaaagaatgctcttttaaataaataataataaatcttatctatgtaagttaaaatatttcatgaaattttaaatgttaaaaatgacatgaagacgttgatgaataattagcactaatggcaataggtatagttctaactttttgtggggccgatcttaaaataaggcgagacgagttactacaaaaaattgctatttttagtgacaattttttagtcataacaaaaagttacttgtaactaaaacatattatttagttataacaagttgttactaatttagttttagttacaacacatttagttacaataaatagtaatttttgtgattaatacttttagccgcagacctttaagtcacagtacaataatgataatttataattagacacaattttttttatctttagtcacaaatttaattgtgactaaaagtaaaattttttgtagtgagattatgtttaaaaaaaaatatttaaatagagttatataaaataaaaaataataatacccacgttattaaaattatgtggcaacttaggggtaaattgcttggtttagagttttaaagttccaatcccaccaacttcattttttatttgtgtatcattctttttattattattatttattttattttttatttagaataagagtactataagaatgtggccggtttgagtttgacaatgtcaaatatggccttaaagtagtcctttttagacttttaattttgcaaaatggcttactattcatttgcgtattaaaaggtgtaaatggtcagattaataatgcccattttcattgaaattattaatgactaaccaggcttctctagttccattagcctctggactgtggtccaatatcacctataatataatttaccgtcttctttcatttttctttttttttgagaaggtaccgtcttctttcttaattctcaatttttatattctaattatcgtcaaaattatattttctagctatttttctaaaaacacgttgatgaaatcataaaacactatttatacatacaccccgccaaaaaactctttaattatttgatttataaaagttttttttaatggagtaaaatagtttcttttcttttttttttctgaaattaatggagtaaaatatatttgatatagtttttctttaataataaatatattttttttcttgaagagtaatttatgacataaatatttaaatttaaatctaatttgtaaataaatatgtaagtttaatttttgatggtaataatacttaaattatatttttgaaactatgtaagtactaaatgtcaagtcattatctacatatcattttcttattggtgtatataaattaattttattaaaaaaataataaaaattcatgacctggaccaatcaggaattatcacgtggtaatttacttaatatttaacaaccatgtatttatagagttccaaaaaataacttaagtattattaccgccaaaaattatacttaagtatttatttacaattaaaaattaaacttagctatttataccgcaaattactttttcttcaactaccaatcttatagaattttgcccatgaactttttttgttgcaacttttttatttttataaataatttacttatgtgtgttagaagagagaagggagaacgtggaaagtgtattttcaatactgaatcaaagtgagctataattcaatatatacaagttgtcaataagcaaagctaagcaaatcataattgatttgagttgataaatacagttgtacacatgtgaaacaaaatcccaactaacttctaattattaagcttaactaacactccccttcgtgcaaactgagttgagacagagagaccgaacttaacttgaatcttaacaattgaaaatagggtggacaaagcattagttaggatattggcaaggtcttgaactagagtatgtttgacaagaagttggtgattgagaatcctttctcgaacaaagtacatatccagttcgatgtgcttagttcgggagtgtaaaacatggttagccgacattaaaactgtgctttaattattaccagattgtaagagtaggtagttgagaaagaccaatttcagacagcagtgattgaaaccaaaccaattcatcagtggtattggcaaggcttatgtattcaacttgagcgttggaccttgatactgtcttttgtttcttagagctctattagaaccaaagaacaaacaaaaccatgatgttgacctcctaccattaggatcagatgcccaattagcatcacaaaatcctgtggaaaaccatattagagcaggatttaagatatattccatagttaatggtacttttgagatatctcggaatcttattcaccactttaagacgagactcaagaggattatgcatggattgtgagaaaataataaaagatcaagatgcatgaaagcagaaaaaaaaaaaaaaaaaagattactctgataccatgttgagaagtaagaaagtgagtcatatctcattatgtaaaaggtttcaataagtaaagctaagctaaccacaattgaattcaattgataaatatagctgtacacgtgccaaacataatcctaactaacaacgatcctaactaacttttattaaaaaaatttaaccaacaatgtggctatgagttagatgtacatttaaagtacgatgatttaacaactttaaagatacctacaatctaatttattggagttaaacatacaaattaactttaagaaagcatatacatattctcataatttatctatttatatatttattttttgtcaggactcttgaattgtaccaaaataaagtcatattagtttgcagtgatttctatatatctatatagaattatttacagtaatttttatagtttaaaaaaaaaatttcgcaacaaaaatattttacttagccaaataatataaaactttataaaaattctacattaagttaatatttcaagaataaaatttttaacgaataaagttgtcaattattaggttcgagttgcttatttattttcaaatcgtggttatagtagggaatttgtccctactgatttgtagtaataaaatagcacttttattaaaaaaaaaatgaataaaattttgaataaaaaaatatttttattattattaaaaataatatatatgtgtatagtaaaaaaaaatgtatttgaaagtattataaaaatattgtgtcaaaaaataaaacccaaatacaactcatgtatcccatttataaatggtggagtgagatacgatgatgttaataattaatgactttgaatataatgacaagatacagtgacaacaacgattttaaattaacgtagtcccgactacaagacaataatataacaattttgagatcatatatatggtcattttttttatagatttattaattattttttttaagccccaattttgtgtaaatgttcttcaaattttcttttttactataatgtttgaagatatgtctttatttcttttatttattaaataaaaaattgtatgatatcttttttttacatttctaaataaaaataatactaaaataattattcatattattaaataaaatataagtttcctaatttttttaatatagtagcaactataatttagtgactagtgtgaaagaaaatatatttaatattataccatatatatttttttaagaggagatactcaaactcaactttccaattaaataaacaaagcaacaaattcaaattgtttctttatttaatctataatctttacaaaatattaaacaaataattgttttaataatagattttgttcttcatggaaaaaaattaaaaaataaaaatgcccaatttcaattttctcccttaataacaaagtaacaaatctactaaataaaccttttctaatacgatttttaatcaatatatttttttaataaaagaaatcataatttgttgctgggaggagatataattatttatttcatttgttgtcacggattttttctaatttattaaaataaaaaaataataaaatcttaattaaggcaaactatctgtttacaaactgaaaaatcattactcattcaaattcataccttttttgatctcatttcaaatctccgttttcttatcttagggctataaaactaacttcttttctttattaataaataaaaacgtaattaactaaaataaactttatttatcataataaaaaataatctaacatcctgaacagataacaaaatctagcactaaagaatacccatcaaaattgacataatggttgcaaattgcattatattttctctaaaagggttcgtcatggttattgtacacctcacaaaatttaaagtgtgacccaaaatccaagtcagatacaccaaacccgaaacaagaaaattatttttaaatttataaataatattttttgaaaattaaaaataaagacagagagtgctgaaatctgttaaatattttattttattttgtaaaaattgaatttggttttttgttttttcgttctgatcctaaaaattcagaatatttattttacttaccctaacgctcctcaaattgaaagttttattttggtagctttggcccaaaaatcaatcaatccataaccataccatatcatagcttctcacgcgccgcttctttcttcttctcctccttcttgataaaagctttggtctctttcgatgatgaaggatttgaattcggatctgtttgacctaagaacggagatggacacggctgagtttcctcggagcggttcatcgtcttctgatgccgatttcgccttcgctttcaacgatagtaacttctcagaccgccagcttaggatcgagatcatgggtgagacagctgagactaggctagagtccgatgcctgcaccagcatcgctgattgggcacggcaccgaaagaggaggagggaagatattaggaaggaaaacggttagttttttttttttctttttcttgggtgccttgtttcttttaagtttgagcaaaattgagagagatggggctgataatgttttcagttttgaatttgagtttaatatatgcaataaaaccttgaattatcgaggaaatgaaagatttttagaaatgaatggataattatttgtatgtatcaaactctttagaaaccatatattccgtcaattgagctgaatttgtttagtattgtatttgcaatctgatcacatttttatttgaagtaatccctcctacctgatatgtgcgtgtaaggaaattttctctattttgttgtgttggtgaaaacagtgtcttattgtgctttgctgatgatgtttggttttcgtttcaattgtatttttctgtttcagttgtggatctaagcggctgccctgaagaacaaatcttgaattgcaatcaaccagacatagatgattgtgatggttgtgaaaacccggacgaggacacagttgccatgattgaggaatcaccttcgggtattttaaccttttcaaattcaactagtttatactccaagtaattttgcagttttctaatcaatggttcattctggtgtacacattctgttgctgaattagtatatgataaaaggttttttttaaattttttttcttatttctggctaattggggtattttttggatttttgaataggttttctaattgtgttgtattataatatgtatagaggctcttttatttgaatcatttggtggacttatgtagttataaaagaatacgtattttttaaccaaaagcactttactatcaacaacacgaggacatacattctctaccctagaatcacaatacattcttctctttttctcttattttttactcccttctaccaccacactcttaattttaagcttgtattctataggcgatgaaggtgcaaacagcaatgagtcagactggaccatggatttttcaacagttttgagagttaaaacattgcatatcagttctcctattttggcagccaagagtccattcttctacaaggtgaagtacttgacatattagaaaatgttgtatgattttccattatatgcttgctatattagtaaatgctttttcttatatccttgtcttacattgttttagcttttttcaaatggaatgagggagtcagagcaaagacatgtaaccctgcgtattaatgcatctggtattttgagtaatctttatttgttatgctacatttttttgttgcttatattaaatatatgaacttctacacatcttgttgaagtgaccttaaatatctatggtttatattggtggtgcagaggaagctgcactcatggagctcttaaactttatgtacagtaatacattatcaaatgcttcagctcctgctctgttggatgtgctaatggctgctgacaaatttgaggttgcatcatgtatgagacattgcagccgtttattgcggaatatgcccatgacacccgagtctgctttgctttatcttgatcttccttcgagtgtcttgatggcagaagctgtgcaaccgttaactgatgcagccaagcagtttcttgctgttcgctacagggacatcactaagtatgttaacattttaccttaacaaattttaatttattatccccactttctctttattataatttatactttaagttgtttggtgaaaaagtagtcacactgaaaacataagaattgatttgaagtgtcataagggcaactaaaacttcccccagttttgcttaagttatctttttttctagttgggtggaggaaggagttgtgtcatttaaaattaagatttcttttcttcatattgaatttatttatgcaatagtactgtgatgtgctctggtcacccaagcacaactcagatatagaatcagcaataaaacagtaaaacaaatgctgaaatattcatagaagggttggtattattgaactgaaccaaaggaaacaaactactaggcctttcagactttgatgcagagagagaaatctctaatcatgcataccactgccttcttatactctcctataaatatatatatcactcaaacctacccctccttaaaatatgacccatgtacccttttctacttcctgggatctaacatacagctgcagtgctagtaccatgtgggaatgtctttttgtgctttctcctattttaattttttttggccttattgctaaaagcttttttgttgatattttcacattttgcaatgtacatcaatcaatatttttacatttacttccgacacaacagatggttaatttgtaacttctattcttgtgtgatcttaaacttgcattcttattgtttttatgctgttatacttgcgaaaagaacgaccttttttgttgtacataacagtgatctagttagacgtgggtggaggtggggtcgtatgaaaagttttctttttaatgtcactctgattctgcttatatttacgtctttttctggccttattttttatggtagatgctgtaatataattaagcctatagtgtatgtgtctaacctatgttacacggtataagttgaaggcatctgcatctctgggattacacattcacaacatgtcattaaacttttacaacagaatttgtttcattttatcagatcccacttgctctttttttttttttccgaagcttatgtagatttttgaaccaggtttcaagaagaggttatggctttgcctctagctggaatagaggcaattttagctagtgatgatctccaaatcgcatcagaggatgctgtttatgactttgtgttgaagtgggctagggctcaatatccaaaacttgaagaacgaagagatgttttgggttccagactttcacaatacattcgctttccgtacatgacttgccgtaaactaaagaaggtcctatcttgtaatgattttgatcacgaagttgcaaccaagcttgtgctggaggccctctttttcaaggctgaagttccacatcgccaacgagcaatggctgcagaggactcttcttccttgaaccgtcactatgtggagcgagcttacaaataccgtcctgttaaggtggttgagttcgaacttcctaggcagcagtgtgttgtgtacttggacctcaagcgcgaggagtgtgcaaatttgtatccttcagggcgagtttattctcaggcattccacttgggtggacaaggtttctttctttcagcacattgcaacatggaccagcagagttctttccattgttttggcctatttctgggaatgcaggaaaaggggtcagtgactttcgctgtggactatgaatttgccgcaagaacgaagcaggtgcaggcaaacctggcaaaccagcaaactgaggactttgtaagtaaatacaagggcaactacacatttactgggggaaaagctgtcggttatcgaaatctatttgctttgccatggaccagtttcattgctgatgatagtcctttctttataaatggtgtcctacatcttagagcggagcttacgatcaagcactgatttctctgttcggtcaagtgttttagaaggaatacaactactctgccgtgtagctctaaccattttgtttattttatttgcctgtatgctgtatgtattgttctctaaatgcaaaatggaataactagataatatatggcacacttgagacccctcctttaacaaggctggttaatttactagaaatgtttatttatatatttattattagcttctccatactcaatgctattttaagaatcgcaaaggaaaatgccccccgaaactactattttcttacattcatatcactttcaattggtattaatttcgagttttatattcatcgtaactacacaccttcacatgtgcagtaaaaactacgcattgtattaaatttttaaattgggtaaattcttatttagtaacggtacctattatatttaggaaaagatatttcttaaatttcaaattaaattttaattttattagcactaggaaaatttttaacggcagaaaaataaaaatcttaaatgtgtttcattttttcctaaaattgctaaatgtatatggtgtctaatatactatataaaagttgttatattgttgttaatgcagtttaatatattgtcctacaaactacaaaaacactataaaaacactacaatcacatcaaccgttaattaaaagtctttcaatattaggacttacgagaagcaaaatgtgttgtgtcgttgatgagtgtacatttgtacatttattcttaatcaattattagacgaattagcatttattaaaactttgtataaatttgatatgttttttatagtgtgcagtattgagcataaagtgatgaaattatgacaaattagaaatgaactgaacatatatgagcaaagtgccaaaacaagagagcaaatgagttgagaaacaagtgaaaatataaaaaatagtgcttggtgctataaattttcatttaatttcaaatctaaatcttactcttattattaattttttaattttttttttaaatttattgtcttactttatttaatatatttaccatacttttacattttgagtcagacatgtcgattcacttttaattcgtgtctagttttaccaactctaacctaatttataaaatttatctcgtgttcatgtcatgtaatcgtgtcaaaacctatttccccatccaaaatcaaaatgcctaagagcaaggataagggagggaagaacaccaagcaggggaataatgaggttgactatggtaagtggaataatgagatgcataacgatcagggccagaattacaaacagggtccttcgcattcttggcaattgctgctttgaggccttgcatagtgtaacgtgcatgtcaagatgacacgttacaagttaggtgatgcccacatgttggccaagtggtgtggtggtcaagtggaggcgcatgttggtatgcatactggtggcatgctgatgcttagtttgtacggtagtggtgttttcgtaaatattttcaatattgtccagattgggacaaaacttggtattcaccatttatctaggtctacgaatacaatggtacaatcggatttgagaaactatataatttggtatatggtgatgaccatatttctacagaacaaaattgatatatgttcctgggagaaggctaaaagcttagaatgctctttaagggggaaatgcatggtgtcagtgttagactttttatttgggcttacattaacttttattggttttattaaaacttgggttgattggatagttctttgct

SEQ ID NO: 161250 - DNA, 7188 bp, Cannabis sativa
cccctacacagctcttctggtaccatgaggcaatatttcaaaccttgtctagggaagagctcaatgttggggaattagtgaccaccagatactgctgcagggtaggcctcttaatgggctctcaaagcatatattcaacactgtaatttggacctagtcacttgccccaatgcccgagataaggtggcagagaaatgtagggcttctaatatttgggaggcagagacaagttacaacacctatcgcagggagaaggaggaggaagacttgatcgctcgggcccagagtttcactaagtgtatggaaggggaagaggatgcagggaagagcctcaaggctccacaccgacaatttcgtttccctgtacctaacacagggactccgggtgccagctcttctagtgtgagtaagtctcaattatcttcattttacgttctgtctgttaaagaatactcctatgcatgacctataggatttgacaaaaggctcaataggttgacaatgccccatactcagtgggctaccagagagaaaattagatatttttcattcataggtgacttcgtgcgcagatctcagatggtattaagcctacctatccttattttgttggatcactcaatatacttagtttaagttggtttcacccatctgatagctacataggggatgacgactccagtaatttggtttattagtttgttaagacagagttaggccttcggggtaggacttgtcctttccatggtcttagcttttgcttgatcttgtaatgattatgttcttcatttgatattgcctcatattgaagatttggtcacatcttgtagttcctccaatggatgattcctttgccttgctagatatgataaaagtcggtcttgagggaaaagctacagctttgactgctgtaacttcaaacatcgtgttgactctgggaggacctgttgaggctaatcctaaggatttggaggtggttgtgctcaaggagcgggatgtaacccctagtctataggaaaggaaaaaggaaggagagggctcctgtagagtcttctttgaagaaggctaaatccaccaaggctccctctcagggcacccgcaattccagcattccttctaaagctgagcaattccaacctgttccctcaattccttcgactcatgttcactcataccctaaacatattgcactctgtttggcccgacacaatttttctatggacgcccagactaaggggtctgcggaatctgatgtcctgaagcgttggattaatgagcatcaggatgtagctcgcaaggaggagtatgtcaaggaaatttgaacttaaatttggaccccatgaacgactggttctctaactacgttgggtctgtcttggctccattcacctccgagattgtcactaactttgtagttgggttaactcaattactagcaaagaggtttgccatttgtgcttcatcaaacatggttcatcaggctcaagacttgaatttgatactggcttcggtaagtcatgcctatatgttctaccctttgtgttttattgctctgatgtttgtcagaatacttatattttcccattattcttttctaggctgctgctgaagctggtcgcctcacaaagaacttaatagaccagaatcaagctatagatgcaggatctcaaggagctaaagaggcactgaaggagtttacaagggccaagaaggaggtggagaacctaaaggacaatgtcctttctgagaagaccttgcgtgagagggatgcaaaaaggactgctgacttagaaaaccaattgaaggagttttaggactgccaaatccaactattgatagccaaacaagctggtcttaagaaggatgcaggtctatccaaggcctaactagaaaacgagaccctccaaagctaactaaaaagattgcaagagcttcaccaggcgaaccttgagtccaatgctaaaatatcgattgagctaaaggagttgcatttgatctgggactccaataaattggtgaacgagatcccaactaagtgggtgatccaactgccacccccatacacttgtgagcattatgttaagtgttatgaggatggggttttcatgtgttaacggtcgaaccacttccagcccactctcaacttcctgtgtgatcccaaagcaaccgtgaagtgtttcttggaaaagaatgctaaactagagacagtactaaaagagaaattaggtccttagcttcctcttctaacttttcccagccgttaattgatttagcttaatgaaccaactttcatcactcattttttttttaaattttggtggctatttttagccattttctatttatggggggacaatttaatagccttacctcgagactcctttttttttataacagttggttgggtggacttgaccatgttccttttaagaccatgaggtctgtgatgcttcttttgactttaaattatccaagccttactttttatttgaagtgtgcatgatgctctttatttttcacttttgttatacttaggcttgctggttatatttatttcttgtgggtaggccgttccattcctctgtgatgttttttttttaattttttcatgcgtaggccatttcatgtatccctgatggttatttttattttttgcgggtaggacattccatgcctccttgatggtgatttgtattggataagccattccatgccttcctgatggttatttttatttttttacgggtaggccattccatgcctccctgatgcacatgattatgcacttatatttattttatatttgtctttttaattgaggtgttgtatttaccttaccaacccccatgtgactaaatggagtaggtcttgagtcacttgtcgtgttttctcaagttaaattaacactttatgtatgagtaacattatcacgtcattactttttcaaaatatattatcttggtcagagatgaccttcaagtctgctacaaaatattaaagatgaaatcatatactgaactcctaactattggtagtacttctagaggtgatcaacattctaagttcttgggatctgagatccatttattcgcttgaggcagtaaattcttccacaaattttatcttcaattttgtagtgtcttcctagttagggcttaacaccgcaactttgagattctataatgcggggaagactcgtctttgtaccatgtatcctacaatgaatttcttatcttttacttttgagttaaagtacttagcaactttcctttgtatgatactagccacatttgagatccttccctgagttctttggcaaggtcgagggactggttagtggctagatcataagtagttcttctgtgagacaacatagtatgcttcattgggagcatggcctcacatccataaacgatggaaaatagtgaatgccctgtagatgttcaggtcgtcatttgataagcccatactactcattgtaattcctctagcatggaagtcggtagcttatttttgagagtggttttcaaaattttgttcataagttatgctttcccattggcttgagaccttgccacggtaaagaaacttttgacaagtccatgtttttccaaaaattttgtaaagtggtcactatcaaaatggttccctttatgtgaggcgcaatccatatcagcaaacaatgttcatgattataaagtctaaggctttctttgcggtgatagagttcatgggctcagtcttagtccactgctacaatggcgtggttgactttacctaccctgtcgaaagagacccaatgagattaatccctgataatgcaaagggccaggcactagtcattagagtaatctcatttggcggggctttagggatatttgtaaatctctagcaagcatcgcacttttggatgtattcaatcagtctttcctcatgataggccaaaaatatttattcctcaagatcgaggtttcttcctatacaaataagcttcaccgggtttgtgtcgtagatttgaatttcttctattttctctattggctctagtaccattcccgcccctacacgtggatccaattcgtcttcctcgattgggtggttcctaactaccaggtttggctgctttgaggctatgctataacattttctggcttcagcttggtttgtacacattgttcctacccctcccgattgagttgggaacttgagacataggtgccagattgaggttatggccccaaactccaccaacgttggccgtcccaaaatagcattgtaggcattcaggcaaccaatagtaacaaaggtacaatactttgaaggtactttgtggagtatcaggacacaaggtgattggaaatcaaatttttcccatggggatcaacgaatctccattgaacccaatgatgggagaacagtgggagagatgtcttaattcgtaagtccaatggcaaggaatgcttctttaaatggtatgttcgtgaagatttcattatctatcaggacgtgtgctactaccttgttggtaataggtgcttcgataactaacagaccatgatgtgggaaacacactatcttagcctcttcctcgataaaggtgatgggtagatccataagtctctacctttatgtgggtagttaagttacttctcatatttcattatgatgatccaactcatgtgcatatcgtttcaactcattgcgggttgttcctctgatatgaggccctccaaatatcatcgccactctcttattgggttgaggaggatgtttgagagggacccctagctgaacagggttctgtgcagatagaagcacttatactctgggagattgaggtctacctctgggaggtatccgacccttaacatgcctctcttgcatgtgcaacaattagtttttcacccaatcatgaaggtgtcctaactgtactaagtttttgatctcatctttgatgcatttgcacttgctcatatcatgccctacattgtcatggaattcacaccttttactcgggtctcttttagagtgatcctagaacataggtgggggttttcagcatggcacattttgacgagtggccaaatacactcgttcttgggtgtctttcagctcagtatactgggtatattatttttcgtacccagctaatctatttcctttctatttttagcccacatactactatttacagatctcttgctttgtgttgttggtgtgacgattatggctggtgctgccatgggagtcgagtgtcgtacacaagctccaagagccatgcttaccactataagagctccgtactcaaaataagctgatgttgtgactggattctatgaataatatggggaacttagaattggacattttgagcaggtaccactctaggaggtgccaaggatctggtaggtccccctagatattacaccctgtatgcgtaatttggccctcaagttgggtagtatcccccaaatgctgtgatcagagcttcctcaagattaatgtatttttgggccatcttttagaaattttagaagctggttgcaccttcttgttgaagctcattccaaaaaagagttcccaccttgatgccatcttgtaacaatgctagctattttttgtcatttactttcttagttttggatgcttcttccttaaatctctttatgaaggtcttcaaggtctccgtagtcaactgtttgatattggttagggcactgactttgaggtttattttctgggcgaatatgaattgccttcaaaagttagtctgtagtttgttccaacagcttacagaacctggttccaatttttcaaaccattcttctacagatcctcccaaggttagtgcgaagcacaaacattttgtatcattgcttactcgtaatgttgtcattactctattgaatctggacaaatgatcactgggatccatgtcccctgtgtacggaatcatctctggaattttaaagttcttaaggagctctgcttctaggaaattcctagcacacgactctttatcctcatagtcagatttggagtcatctctcttttatcttcaggtactttagcaatatcacttttgaggatagctagctcagccaggacgtcctcattcaaaatttccttaacattagctgagtcattctttaaggaattgatatgatctctaaggtcccccttgtttggcatggattttttttctcacaagtctactggtaaatctctcttactttaatcacattttttcctttgcccttggttcatagagacgctgcgactctccttactatcctgggatttgtgcttcctttgggtaaacacatctccctgcagacgtttccctggtaggaaattagaatgaaccttgcgtgggtcctgatgggttttgtttcccttgagtattagtgaagggttatcctttgagacaggagggtcttcaaaagggtatcggataggactaaccactttttcctttcatttttcttgaggtcgtgagggaccttctccattgtcaccacgtattggggaaacattagcgggatcaacattgaggcccgcctgggccatggcctactgcatggtgaccaacgcctcttgaattctcctattcatttctttttgttatgccaactctgtatcatgatttgtggcttgttttttaatgacacaagctctgtatactcatcttcttttctgtctccataggtttcttcttttcttgaataaatgggatcattggtatcacctccttcgccatccactcaagaagatattccttcttcttgacgtactgggttattgggcggttggggaggtcgttgattgttccttgttaccactatctagatgttggtttgtatatatttttttgaaagccttctatagctcttaataaaagtacctaaatattggccgagatttttggcaatcaataagtaaatgtcgataaggatgattaagaaaaatgaaaataggattttacgtggttccaatattaatgaattgtattccacgggtcacttttatttatgattagaatgttctcttgatcagagaatattcacgttacaatatcagagctcactttttatgtgtgagtccaaaagtctcctttccaattatttttccaggtatttataggaaaatgaaagggcaataggaggtaaaaaggtgcgtgaattacta

SEQ ID NO: 161251 - DNA, 2759 bp, Cannabis sativa
aaaaaaatgggtcccaaaatccaagactaacgagctttgtgagttgcaataaccaaacgtgattaatataatgattacaattataatatataatatgtatgtgtgtgtatgtttattttgtataggtgtttagggtttagaaatgagagagagcctctcacaaattaagcacttttttaaaacgtaaagtaaattatgtaatgagtaatcaaatgttgggaaatggaagagaaccgttaagattgctttgttcacttcttcttctgtgtttgggaccaaatttttgcatgtttggcatattcttaatcatttaaataaaataccctttttctgattattgataaattaatcaacccaaaaaagtagttcctttttgtttttgttttcttggccatgagtctcatgaataatggtagtggaattagctgacggtaggtatatgttcacagttcactgaatttgtaacccacatacatggctcatggtaatgtaattgaccattatttgtatggtatgattgaatgaataattgagtaaactagtatgcttagtgatagtgttcacattttttgtcattctgtacctacgatccaaaatggagtttctttacttcaaacttccacaatagttaggtcacttttttcatatggagaatttgatgaatccggtagagattgttaaaaactactcaccttttcaagtgaaaaaaaatatatattttttttatgttttatttttaaaaaagaaaagatagaaagaataagtcaattttaataaaattaatttttcccctctctttaaataaaattaatttctatggcgaatcatgctccttccattacgcaaatgtttttttcctgatgacagttatctattttgccaagctactgtataagcagctagcaacctcctcaatctgcttcgtatgtttgagactgcctcgggacagcaggtgaatgcttccaaatctaatattttcttcactcctaattctgccccccaacatcgtgacagtatttgcaacattttgggtatgatagaagcttctgaaggcagccattatctcggactgcctaacatcattgggtggaataaaaatactatacttggatttatcaagaacaaagtgattactcgtctcaacagttggcatgataagttcctctctagagccaataaggagatccttttcaaaattgtggtccaattgctccctacttatgctataagtgtcttccttattcctattggtacttgtcaagagattgagaagctcatggcccagttctggtggaaaactaatgcaagcaagggtaatggcattatctgaatgtcttgagagcgtatggcgactcataaacatctcggaggtataggatttcgatacttaaatgacttcaacctcgcaatgcttgctgaacaagggtggaggcagctttgtaatccaaactcgcttgcaagtcgtatatacaaagcaagatatttcccacattctgattttctcaatcagagcttggttccaatcctaactttgtttggcggagtatttggggtgctcaaaagttaatcaagcttggtgccaatcgaacgattaagtcgggtacaaccactaccattttgaatcattcgtggcttcctgataatgaccagtcgtatgttacaacaaacaatcctggtttgataaaccagcctatctcctctcttttctctgttgaatcggacagctgggattatgacttggtttgtgacatgttcaattctcgtgatgcaagccttatcctcggccttccattaagcacaacagatgcagatgattgttggtctttgactagtgaaaccaatggtagttttacagtaagcagtgcctataagttgctgcaacaaaataaagcaactgaccatgctgctaataacttcgggttctggaaaaacttgtggtagctgaagataccgcctaaagtgaagaacatgttgtggcgaatcttaaataactgtcttcctacttgccttaacttagttaccaagcatgtaaatgtttccattctctgtcccatgtgcctttcacaaccagaaaatacaacttatgcacttttacattgtgctcttgctgctgagtgttggaatcggcttggtattaaccgtccaactccaatagcaacttttgcctcttggttggaacatgtcttctccacaatgcctactgaagatgtgtgcaaaattataatggtatgttggtccctatgaaaatcctggaataagaaagtctgggaaaaacaaaccccgttggtgaatgatgttatggtatcggcaactacttctcttgatcactggagaaaagctcaggatatttcttccctatcatctatatttctcgataatataggtaatcaggatgagctttggacaaaacctgatttggaaaccatcaagattaatgttgacgccgccacatttgagcaagacaactcttacgggtttgggatggttgctcgtgaccatcatgcttctcccattcacattcatgatgtgtatcatggtggtcactttctagctgaaaccatcgaagcaatgggcatcaaagaagcactaagttggatcaaagaaaccaatcgaaaagatgttacgatagagtaacagcatgctcgtcgttcaagccattcattccactcagccaatgtcttatgtgtttggtttagttgttaattattgcaaacatatttttgttgggaattattttaccaggaccttagatctactca

SEQ ID NO: 161252 - DNA, 9534 bp, Cannabis sativa
  modified_base (2246)..(2247): a, c, t, g, unknown or other
  modified_base (6911)..(6920): a, c, t, g, unknown or other
  modified_base (8379)..(8380): a, c, t, g, unknown or other
taaaataaattccaacatttttttaatctcaaactggaatatctggtatattcagcttgtaaccagtcgaaaaaagtaccttgaaccgatgtggaaatactaaattaatccagttgattctagcaagcttttgagaatgagcatgtaaccaaaacatgagaatgaacatttacatcaacatgtctagatttcaactgagttttagttggtaagcaatcagtgcatacgttttttaaaggatagttatgagatgaatacataggaaaatttattaatgttagggtaataaataaattttggttgtagcttgatgaataagttgtgtaattatgtatttatgctcttgactattggtataagtttttctaaagtgtgaaagttgttagtttgtgatatttttgcaaggtttaaatgttacaaacatgagttcaagcccattaggtatttcagccctagggccatgggtttgatttgtctttaattaagtatttgttagtaatagcatcttttgtttatagaataaatgatattttccaaatttacttggaaaagatgacgaggattcaataaccaaataaatagatggatttatttggtatttataaggggggtgttagataaagtcactacaaaatacagttacttttactaacaattttttaattagaacattaattttttgtggctaagtatgacttttagtcacaacaaaatattatttgtcactaaaatataatatttaatacaagttattactagtttagttttagtcacatcaagtattgtgactaaaaatacatttagtcacaataaattgtaatttttgtgactaatacctttagctacagatcttttagtcacaacataagaataataatttataattagtgataattttttatttgtagtcataaattttgttgtgactaaaagtaatttttttttgtagtgagtatctaaaatggtaaatattttactttttgcagtatattttttacggactatgattaactgttttacaaacttttttaatgttctaattgcatttattatagtctcaaaaagtaacataaaaagaaggtacatttataagtacatacagatttaatttaggtggtgtttggtaatattttttaattaattttctgtttttaaaattaagaaagtaaaatattttttaaaaacatgttctataaaactattttactttttaattttttaattgagaatcaaaattttaaaaacaagaaaaagtcactttcaatattttttcaaacaattttttttttcttaatcaatattttagactccgaccagacttgaacccaacctctaacccgagttcgaattcgattctagacctaaacacgacttaaataaaatcaaaaaatgaagatgaaaatgagctttacagcacacttttgttttctgtttttaaaattaaaaaacaaaagtggttacaaaatgtatttttatttttcaaaaataaaatttttaaaataaaaattttggttttattttatgattaaaaaattaaaaaataaaaatataaccaaacggaaccttaatttctctttttttggtataggcgcccatgcttggttaagtggaagttatagtattttatttaaagtattgcaatgcaagaattctgtgggcatgaattcatgttgatccagacacagtagaaccattgctcacataactatgtatttaataaggaattttacaattttaccctaaattttagaataactacaaagatactttcaattatatatgcttgaattcctattccttagaagaagacttctaccaaaaacaggctcaccaattatcactacacattcccaaaggcaataagaacacgcttatgtcatattttaatttttaaatccatttaaatgatatatatactagcaagtagcaatttttttttgaggatatataattgtaatttgaaatagagattattacgtaaaatacaaaaattatatttaaaatagggataattttaagattttttttatttttttttatttttacgggttttcataaaaataacaagaaaactatataaaagtaacatttaaataacattaaaacaacaacaaaaaataacatgcagataacaaaaaattaacaagagtacaacataaaaagaccgtattttctgtaaataaaataaaataaatcgtaaaatatttaaaatttcataaaatcgtatttttataatttttttgttnnttttgtgtatttgtaaaataatacctttaaaataacatgatgtatttaaattttcttttgaattagccccttatatatatatatttaaatattcatattttgactcttattaaaaaatgacataaacatttatgaaaattaaaataaattgataatcatttttcatacatatttccacattgatgatagactggaatttaatattatatataagatatatatactcgctgtctttattttgaaatgaaattccatatatcttatcatacaccactataaaaagttttatttttagtcacaacaaaacttgtgactaaaaataaaaaaattgtgactaattataaatcatcattcctatattattattaaaaagtctataactaaggtattagtcacaaaaatcacaattatatttttgatcaagaagaaaaaagcttcattaatcaacaagcaaacatacaaacaccaattctctcttagggatcactaacttgatttcctccactatgagcattgccatttttgaaaaactctcatacatacacttattttgattgatccaaatattatagacagtggcaacaaccactgctataacaatgttcacaaacaaaccctctctcgtacgattcagtcgcactttctagctagagtattcatcgggcaaagccttgaaaccaagccaagtgaacaacatattagaaacaagattggacaaaggacaagaaaataacgaatgctcagagaatcctgcattgtttgacaaacgagacataacaaagaaggtaagttcagattaagccaagctaaaaggtctcttgtgaggagctgaccatatttatgacctgccaaatcacaactctatgttcagggaggctaaatctgctccagacattcgtatgataagtcatttgggcttaagctagggtactattataaagctttgaggccctgaatcttccctgaacctcagcagccatgatagtagccttgatagacactttcatcaaattacacaacttcttccagtaccagctagagtctggctttaattgatgatcccagaagtccccctgctgcaaatagatagagcctatccacttaacccaaaccatatttgtcttttttgttaaggcccaaaccatagctcgattccagaccgaccctttcctgaagccaatacctccgtaaatcttaggaaggaaaactttgtcttaattgacaaagtaaagtttagacatctgaccattagagccccaaagaaaacgtttgcacaatttctccagtttcttagtcacactttgaggtaagacaaaaatactcattcaataatttttgagcccaagtaaaatagtgtgaatcaattgcactcttcctgcaaaagagaggtgcctaaaagcctagttgtgcaacttgagcttgatatttctaatgatgatatcacatcatccattctccattttgttggtcgcatagggactccaagataattaagaggaaagctaccctctccaaactgaatgtcgctaagaataagagctctatcctcttttgaaactcctccaaagtacacttgagttttattcatgctgtcctaaaatcctgacataaggctaaactcatctaaagccctttttaaaactgaagtagcttctcttgaccctttacagaaaagggtcaaatcatctgcaaaacacagagttatgatcttaagtcttttacacatagggtggaacttaaaacctttagagcaagaagctttttggagatgcattgtaaaatattccatcattagcacaatcaagaggggagaggtagggtccgcttgacttagacctttcttccttctgaaacaatccctaaatcctaccattcatagtcagagagtaagcaagtcatagtctattttatgaatctagaagggaagaagagagctatcaagagatattctaacaacaaccaactaacaatgtcataagccttgttgagatcaattttaatggcacatctaggggaggcatttttcctactataatgattaagtcctgaaacatcattatgttatgagctgtagctctacctttaatgaaagctccttggttctaaccctttaataatctcagacatagaagtttagaaatgcatttataaagtgtggagaagcaagttattagtttgtattctacatctttatttggactatcctttttagggatcgaagagatagaagttggatgaagatcttgaggcaattgacctgtcttaaagaagtcccagatagcaatacaaatttccttaccaatttttggctaaatatctttgaagaaagttgaaccataaccatcagggcctgaactcttatggttcaagatgcttaaaaatgccttttttattttctttgtagagaaaggcttcagtaagtagagctaattttacaaagacaatttagcaccataatccgcactttccaagttaaagctggccttagcaagctactacttcccatataccccttaaaatgattgagaaagtgagagactacctttgaataatcatcaacaatttctccctgctcattgatgaaactggctatacgattttcctctctcatttcttaacactggcatggaaataggaggttttctcatcttcatatttaagtcagcttagcttactcttatgcacaaggaaactgtgatacatcttatcctaataatcatactctttgtttgcctccttcccagcttgttgatagctgacatctttgggatgtttctaacaaattgagctttgcttcctaaaattctctcttggcttttagaaattctactccacatctccaacagttttggagttgaaagttctcaaagtaagctttaatctgagcagcttaaaaaacacctttcgatcccctataatgcataggcctcctctaactttccataaccacttccttaaaattcgcatgcttagactagaagttgaaaaacctaaatggcttgatacccaaaattttgatattagtggccttcactagacagtagcaatggtcagaggttgtttcccattgaaaaatggctttagaattaggatcatccaaccagtcatcacttttgagaacatgatcaattcgagaatatattctggcttgaccatcctagttgttagtccaagtataatatgagtcaaaactttttagtttatctgccaatccgagagccaaccagtttttgagaaatcattaatatcggttggagaaacactttggcccccttctctattgtttagattaaaaggagcattaaaatcactaaataaaaaccagagttttaatgaaaaggtaagagtagtcaaaccctatcataactttttcctaaactcaatcgaattttgcccataaacaaagttgatgcataaagcctccttttgccctgcgatcttggcatagcagtgcaaaagtcataatttattatgattaaatataattttagtcacaatatttgttgtgactaaaattaaattaatgacaatttgatatttaaatactatgttttagttacaagtaattttttatgactaaaagttacatttagctaaaaaaaattattatgctgtgactaaaaaattatcattaacaataatttttttatgcaccacacttatcctactttctcaatcacactctttcacattctaacaatattcctaaacttatgttttttaaatctaaacttgacttattaaattaagaatttcacagcatgtgaaacatgaatggaagcataaactcctattcaataatatacacacatatatatggtttcagagttgatattaatacgtgtgtgttgggaaattatacgtacaatatgtagtcggtttgagaaaaagaaaaaggaatataattacatccacaaaattctatgattatgatcactacacagtgatcaatatataataataataataatgatgtgtagtcgatcgtcatgattaaatatatatatagcacaaaattggctcattacctatatttatatttatatatatatataaagctattagttacctatataatatatatttaaaaaaaaatacctatataatatataaaaatattatgcattatagttttatttcagtcgcaacaaccatataatgaattttgtggtttggcgtatgaaagtaacaagcatatatgtacgttcctttctcaagtgtccctctcgtttatatgaaatcaatgaatatgcaccatatatatatacatgtctgtcctgtgtgtttataataactatatatacataaattagattttaattctttgatcacttcaacagtcaactaataaatggtccaaatagttgaaaaatactctttaaatttgcatggttgtgattacatagctagccgcaattggtgttttataaatatatatatatatatagatgccatgtatcaggaggcagcttttattttgaattagctatgtattataggatacttattatatagttaactaataattaattattaattaagaggatggtgacaggtggaagtaaatcattagttgaatatgatagcgacttgtacttgcatgcactgttccaagtatataatccaaaattacatcaataactctattattattattattattnnnnnnnnnnttattattattattattttcaataaaatgactacaaatgaaaaaaatgtgatgaaaaaatatgataatatatatatatatatacatatatatgttattatagtggctagttaaaaatattaattatgaataaatttataatttaaatattcaaatttttacctatagaataataaaaatttaaatttaaataaatatatttggtttaaaaatcaatatattgtttgaaatatttacgtgaaactaagatagttattcttgttcttttttttttttttgaataaaagatagttatttttttttgagtgtaaaagatagtaattattagtactggtattagtaatatatttgtttagagttctattaaagttattattacataattaataataataaaaattaaatttaatataatttaattatattattaaaataattaaaatttaatctaatttgaatttatttataagaaaatatatctgactaattttattaagtaataaaataactaaataagtttagatatcataaaatatataactaataatttttttataaagtatgattaattaattagttaacgtctaattcaattgtatattaagatttatataaaaaataattatctaattttttgatacttttaaataattatctaagttatattttaattgaataaattaattttagatatttaaaactatttttttaaaaaaaacaaaatataattaattgattaatttaacgatgttagttttaaccgttaactttaatgaaaaagtaaaagaaaactgttaaacaaacaattttcgttagataaccatatttaatataagagaagatattagatatggagattaaaaacaaagaaaagaaaaaaaaaagttaaataacactctgatgttacttttttttttattgaatagttaataattttgctcctaaacttttaacaatactacttctacccctaaaatatactacttattaaaaatttcccctgaacttttacatttataaaaatttaatcattttgttaggtaccgtctcattattctgttaaaatgctgacgtatttttgtaaattagtaattttacctctaaactttgacaaccatcaaatcatactccattaaaaataaaaatgaaaaatattcaatattttttagtaaatcttaaaaattactttaaatctttaaaaaattattttgaatgattgaaaaaattaagaaagaaattaaaacttaaaactaattaagcgattaaaaaattatttatttttattaaaaaatccatttagatattaaaaatatattaaaaatttaatttttgtaaaagctaaattttacgtgaacaagttcgagtctattttttttctctaaaaatttagatttgtttaattaatcgtgatatttagtttaatttctaacctttatttaaaataattttatatttttatnnaatttttaattatttttctttattttttaagaaatgagtttataaatataaatacgcttaattttttcttcaacaaatcttagtttgtttaaattatttattgaatttttaacaattttagtttaattttttaaaatatgtgtttataaataaaataaagattagaaatatttttttatgaataatttagattttaagtaaacttaatatttttaattaattaaatattttgtgaggttttcttttataattttcattaattttttcagagttaattagtagaacattataattttaaatttttttttttttttttttaaatagaatgggcaaaattttgcattggtcaaagttttaactttgtttctgcttgtaggttaatttgaagttggcctacacatacccccgagcaaaatcaacagctctaaaggctaccacgaccaccaattacctgaagaaggcactcaaagaggcctaaaaagatgctggattgaagggccatcaactgggcgaggtgaacaagcaacttgttgttgcgaataagtttattgatgacttagagcaggaaataaaagatatgccatccactgccaagcttgaagaggatcttgaggaggaatccaagaaggtacgagagctaaccgatgaaagggaaggactccgtacactccttcagaaccaataggccaaaatcaaagaactgattgaggctctcaacaaagaggtcggggagaggactactttgcaggaaacctttattgctaagcgggaggtgtatcaaaaggaggtcgaagagtatgaaacagttgcctgagaggttttctatgaattctggaaggcaaaccttgagggcaattttgactatctgaaggacgacatccgtgctggctttctcagctagtgcaaagcaaagaaaactgaggaagaaacaaggaagactgatgaggattcttctgccgcttaaaatcaagaaaatttatccgctcaagatgatgttcctgtcaccccattggagtaaacctttttatctattcagtctacaagccttttattcgatacagtatggccgaccaagcagattttaaacttggaattatatttacatttcgattaagataaacggctcgctgaacaactttttttttttttttttt

SEQ ID NO: 161253 - DNA, 3026 bp, Cannabis sativa
aaaaaaaaaatccttctctagctttctctgttttttctgtttcaataatattaattaagttcaagaactaataatattttgcatgtttaaattcacagtcgtgtgatgcttcattgctgctggactcaacaaggagatccttgtctgagaaagaaatggatagaagctttgggatgagaaatttcaggtacattgagaccattaaagaagctgtggagagagaatgccctggcgtagtttcatgctctgatattcttgtgctctctgctagagatggcatagcttcggtcagtacttagatctgagacttagattctgttctattctaattctaattatatcaactttactttaactacttctactggtcttattaactaagaaggaatgaattttagtaaccattaattttgttgatttgatcgatcagctaggaggaccttacattcctctgaaaactggaagaagagatggtcgtagaagcagagcagagatcctcgagcagtaccttcctgaccacaacgaaagcatgtccgttgttcttgacaggttcgcctccatgggcattgacacccctggcctcgttgctttactaggtacatatattataagtatatatatatatatgtgtgtgtgtaccatgctcatgaatcatcaaccttaaatcttagagtattcatttacaacattttcagaatttcacatcaatatatagtatcatgcccatgagtcatgcatatatactcaaaatgtgcatcataacattagatctaattaggcttgtcctgtttttttttttttctaaactataaggcagacccctaaaaataaaaaatattttcaaatctttttatttttcttaggatccaaacaatgtcaaagccagaatcaccgttatatcactgtgtactttattagcagttgtagtatatcactgtgttaaggcactaacactatccaaatatgtgaaacccataataaattcttcgatcttaaattatttgaagcttagatctaaataaatttttttgtttggtatagtgtggtagagatattttgaacactccataccatatgatataaaaatatataataatcccccaacttaattttatttctagctttctacgacacaccttgggagtgttggcagccccataacatatttgtcttttttatttttcaaccataagagtacactaccttagacttatcctataatttgtgtgtttgaataaatacagggtctcacagtgtggggcgaacccactgcgtgaaattggtgcaccgtttgtaccctgaagtggacccagcactaaacccagaccacgtagagcacatgctatacaagtgcccagactccattccagacccaaaagcggtgcagtacgtgaggaatgacaggggtacgcccatgattcttgacaacaattactacaggaacatattggacaacaaggggcttcttcaagtggatcatcaattggccactgataagaggaccaagccatatgtgaagaagatggccaagagccaagcctacttcttcaaagagttctctagagccatcaaaattctctccgagaataaccctctaactggtaccaagggtgagattagaaagcagtgtaatcttgtcaacaagctccattgagaattgagatatcaatattcaaacatttctgggagtgatgatgatgatgatgatgatcatggatatatcaagatttcatgaataagatcatggcatttagtactactgtgttacagctagctagctagttaattaagttattaattattttctaatgtttaattaagtactgatatatgtttgtatgtatgtatgaacgatatggtgatgttattatgttatgtcaatgtgggcaaatgtggattgaactgttttaatgatcatgatcagcatgctaaaatggtaactagtatcctaaataattcctctaatttattcgaatatgataatattcaactcattcatatatataatatcaatagtaataataacacggccctttaaaaaaaatgggtaacaatcatagtagcgtgtgtgagtgggtgttgcactattgttctaatattttatatatataggagcaagtggcaagtgctcacattgagtatgagaatgaaaactgaataaatgatacgttccaattgggtcccagaactccctttgttattatttattatatcatataggaaaatggaaaatggaaaagaaagatatataggaatcataagataagattcattttgtcatgtatctttcttaactcttatcaatttaatttgtaaccccatataaagtgactgcactctacaaagcatgatattttaaaattgacagcaaaactatttgaaacatgcaatttgtaacacttaatcttacaatttaatttttcaaagaaaaattacttaaaattttacttctgttatgataattacctctattagtaaattactgttaaattccaaacaaaattgtccatgtatatctaaatatatagatatgttttgattgatctacctaatttttactatttaaataaaattaaaatattttaatttatttaaaaaataattaaaaaagtatatataaaaaaataatttattctttgttgtttttgtaattttattattattattttaaataatatatttataacaattttaaaatgatgtaagcacttaaattccgtcacatgtatatttatgtacacatcaatattacatgtacttaacaacaccattttaacaaagggtataattaacatatctaaagtaaaattttagaagttttgctgttaaaaaattaatttgtgagataaagtgttacaaacactatagttgagagaaatttttatcaagaaaaagaatgatattttcataaaattttaagccttaatcctaagacacagacttagcggaccctagttagaagacatttaaaggtcgtttggctttacagtttaaaaactgttttttgttttttaaaactgaaaaca

SEQ ID NO: 161254 - DNA, 5180 bp, Cannabis sativa
aaaaaatagggttaggtctgcttaaacatggagttgctgtttgggtcaatgtatttttgtccttgagaataaactgagtgagttttgcatgcatgtgcctacttgccaacattccaaattcccttgacaggcgttcaacaaattaatgggcaaatctgctacattctattaccttaaagaggaatatagacattttccattttatttaattttctctggtagaaagaaacttggtttgattgtggttactgtctagtttcaatttttatttctttttggatctcttgagcgtacctatcactttataattttcatgatagtagtcattaatattttttttttttaaattaatatactttctaatgttacatctaacctgtattttcttactcaaaaaatatatgcttctagtttgacaaagaggagtctctttgtgtgctacctttgtcggaatgttgggtggtaagccatttgtatccctatatcttctgtaccacaatcttatcaactgctatcaaattattaattaattgtacttcattctccagatatcaaaacttcacttgcttgttgatgccgtcactgtaagctatgacaagtttttctttggagatgtcggaagagagacatatgatttcttttggagcgattttgctgattggtatgtactttttgtataaatagattttcattatattatgtgtgcatgtgtttggcatgactagaatgtacctctaaagtatcggctgcataaattcactgctgaataaaatcaaatcacaagatttaggcctttactaagatatgtgtcaaaagaatgaggatatccaaagaagcatagtattgtctttagtttacatttagagtttgtcgaagttcaaatgatcaaatttcttatccaaaagaggtagctcaaatggtcaaactatgatttgttccctcaaagtttgatgtttaagtccctcatggatacttgcgtagaaattctgtagtatcctggtccccaaatattattggcttagacgggagcagggatacatatatgaagggtctgatatatctttgtttctggctgattatccatcaaatgtcggaaaattattagtgtaaaatcaacattgtggaagttttggatcaaagctgttaatggtccatcactgaatatatggttccaaagatcagttgtgttgttttatatatgaaataattaaataaaatcaagtgtattacaaggcatatgttcaaaaatcttgggagcactctgattattttggtgctactgttaattttttgtcttaataaatgatgaatatattgataggtaatatatgtactaatacaaataacgtatttatgtataataacataatattcaattctccataaaaacattatggtggtggagatggtgatgtgacttatgtcttttattgaatttgtagtttccataaattgatctttttctgacttctaggtatattgaggccagtaaagctcgtctttacaacaatagtggtgattccgcagcttgtgtaacacaggcagttctattatacgtttttcagaacatacttaaaatattacatcctttcatgccatttgtgactgaggagctctggcaggtaaatcgttttccattttctagctaacatttaaatttaaacttaaattattttaactggccaaatatctttcacaattagatcaatgaatgatagatttcattaatgattggtttttggaagttccttttctggggacaaacatctagctgctgtgaagaatagctatgattcaagtgattaactttctacccatacggattctcattaactcattgattgttgaagttcaacaattggctacattttgttaattcttgatgtctttcaaatttctatgtacaggcactccccaacagaaaagaagcactcatggtgtcttcttggccacaggtttcacttcctagggatagcaactcgattaaaaagtttgaaaatctacaagcactggtgagtatcaacatcttcactggcaccctgccctttggtttgattttttcgtttacttgtgttgcatccggaggtcaccactataaattttgcttctcttataaatctcagactagatctattcgcaatgctcgagcagaatattctgttgagccagcaaagcgtatatcagcatccatagttgcaaatgaagaagtcctccaatatacatccgtaagaacagtgtcatttatattctgaattctgactggttagcacctttagtataccttagtcatgcttatgatgtcactgccagaccattcacctgtcagacaagaaattgatgataaaaagaatagagaatggatgataaagtttcacgacattctattcaacaccttttctgttattataattatctctaccttagtctccatcaaaccagttctcttctatggaaaacaaattgtctgacaattttcttattttttgatgcagcaagaaaaggtggttctagctcttctatcccggctagatttacagaacgtccattttacaaattctcctccaggtgtgtcttccataaattagcaccttgtcatttgactataagttgtgactttgcagtctatgaataatatttatatatataggaagagacattatttttgtccctaccaagtattctatttttcgcacctagagaaaatatatcctaattttttttatatgacggtacactatatttttttttgtaaggtacggtacacaataattataatagagcatcatgcacattttcgagaaattttgaataatttacgacatcaaaaataaaatttaaaatagttagttacacacgtataaaataaaacaggcatgcgtgtagctgactatttgaattttatttttggcaccttaaattatctagaacttttaaaaaacgtatatgacatctactacaagtatagtgtattccgtcatataaaaaaaatagtttataattctctatataccaaaaacaaaaaatactcttaagttaggggaaaaagtgatgcccctacctaaaatttttcatataatatatatatttaaaataatatttggtatcttggtcatttgattcctgaatcaggttaattgtcattaattttgccactatggtttggaagtagcaaattcaaagatcaaatagtccaaacttaaatagtcaagggaccatatcatcacaacttaattatcaaagatctaaatatgccaaaattgataagttagagcctgagttgtagagcatatatagttagggaccaaatgttctaattacccgaattttggttcaggagaacaaggttcaataatttaattttaataacaaagatgacccatttgttggtgaattcaaaatcttcagggaatgcggaacaatcagtccacctagtagctggtgaagggctagaagcatatctcccactggctgatatggttgatgtaaccgctgaggttgatcgccttactaagcgtctttccaagatgcaagcagaatacgagggatatgctacccgcctcagttctccaaaagtatgacctacttatattcaagcatgcctcattctgatgtaaaaaatttacttgtgcagtaacatttttacgatctttcagcaaaatgtgttttacaagaaaataatttttggatcaagaaaatttgagaaagttcttttcatgttttacaaacattttttttttaatttttgaaggttgctgtaccaatgctttttgtatgatctaaaaaaacaggtggatctaggtgcaataccatttcactgagatgttgaatgtttacacattttcttttccagttcatattccggattgggttaatccctctagtagtcggatgaactgggttgtgcctgttccgattcaaaatgacaaaagaaccgggcagcagtgttcggctgtaaagaactaataatgtttatttattattttaagtttaatgtatggattagtgtcccctttccttctcaccctgcaaattgatctttttttttttctcatgcttatattatcaatataataccctgcaaattgatctattctaaactgccatcttaatcttccaacatcttccatttatttatgcagtttgtggagaaagctcctgaagatatcgtcagcagtgttcgggaaaaagcagctgaagtagaagagaagattaacctcaccaaaaaccgtctatctttcctcaaatcaactgttcttgtttcagaatagactctacgtgcacttacaatatttctgatactaacatcacttggtgtctttcttttgctcggtaaatctcattccgagatcagttgccgcccatctttcaaaaattaaacttcaactacgtggcatttgcttctttggcactacggaggacttgtaactaactcaacatgcctggcagcgactgttgagatgattgccgtcgactggcaggtgatacgttcgttatttgttctagtaccaaatattcctctcgttacattgaatggatgctcatgtaggtgtagctctccacttcaacaattctcttgataattatacttttttttttttgctactttgcctacgattcccactcttgaccgttgataaaccgacatttttggagattagcctcttctgtcgtacactatttattgtacaaagtcggtatacgcaagtcttttatccaacttttgttgtttgttagccatatacgtgccaagtgtttgttgaaatatagtatattggcacaataggaaaatggaaaatcatcctatgtgccacaactatattagctatagtttaataaatctcgatcaagcttaccaagtaaatttattctttatacttcattatattttgttattttgtttgtttaaacttaaatttaataaattttattgggcatatattgaaaagattttgtactcttaagatacatttagttgggagaaataaaaatataagaatagggatgataatgaaaataagagtaaaaatgaaatggaataaaattaaatatggatatagaaattgataaagaaaagttattaaatattttttatctgttatgaaatattatttatggatgttcaaatcactaaattaattattaccattaatgcttgattgtattttcctttattacatatt

SEQ ID NO: 161255 - DNA, 8802 bp, Cannabis sativa
agagagagagagagagatgcgtgtaagactttagagagttagaaaaatttgatattatttttcaaccctgaaaactactgttctctataaagtagctacgtactatttctcatatatcatatttaattgattatatattatgtatatatataatatatataataataaataaatccaccctctaaaataaaaagataatatttattttaattcaaattcaaaaataaatattatataactaaataacagaaattaattatatctttttattttatactatctttttaatgttaaatacattatcttataatatatttaatttaataattaaaagataagtatccattttaatttgatttattttataataaaataataaaaaaaatcatatggatttttacatgtcaccctacacatatgggacaaggcctacacatgtaggccatatttaaagtccaaaattaatttcttaattttgccacaagtgataattgattaattttcattatattttcttaataagattaagataaatatccctttacacaaaaataatatttttttttctctttcatattatttaagaataatattctatttaacactaatcaatatagttttataaaaaaaaaaaaaaactaaataattatatcatttcaattattcaattcataattgatataattattcaaaataataattttcacaaaattactatttttctttcaaaaattatttctcatagaaattaattctttctcaaatttattcatcaaattaaatattttcatgtaaaatgttggataaaggtgatctggggaccatggacctttatttcgaagttctaataaacacttgatttttattgaactcttcaatagaatattctagtttataaattatattattactctactatacatatggatctagactctttgacaatatagaattatatttacagaattcttacttgtagtacattgatataatcaatataagtagttcaccctccaattattagttcataattagagttagttaaaattactgttttacccttctaattatctcatgaattctttatgtaccattaatacaatgtgaacaattaatctataatttggatcctttgttaacactctcagaattaatactataagagaacttatattcaatcatctcaaaaagcttgaattctattattgtataatatgttcctagccactcatgttattaagctctcaaaaaagaagttttaagaatcatcttctctgagaaactttaacgagtaaatcaaagaactcaatgaacacaaataagagttcatgtataattaggattcaaactgatctacaaatgatcatcgttgtgatatgaaaaactctttcatgataaacgcaatgttgatgaaagatattatttcatgtcggtccactcatgtataatcaaattatactcagtacctttactacatatctatccacatatgtgattcgaatcaaaatcacacgcactagagtatagttcataacaaactgtacttggtaattttacattaaagatttcgtactttaatacactgccgacatgttttattcatattgtatgatcttaattctcatgtacaaccttacaagatcataccatctttatatgaatataaattttttagatatttattaattatatttctataattaacatattcatttatcttataattacatttcagatattctataatatattatccattaaatacttacttttaggacataaaccctaacatatttatagacaaggatacagatctgggtatacttgtgagccgctaggattactgtacaaactaggcccactattagggtaaacacataacatacttgacctaaggcccactagtaagagtctggctcgtggggcaagggtttctatatggatggggacttcgcagtctgggataggtgtcgcgtaggcgttgctccagtagacaattatgtcaggcaggcgtctttggacaaaaaagaatataaaactatctcaaaatatatgaataatttttcaagcaattatagtgttgtttgaatagcacccaatgtattaaactcaaaatatataaaaacacacacacaaagtgaaatctcatagccatttttggcttaaaaaaaagagaaatcttacccaaagaaagctccaaaaaattactaagcttctttagtataacattcaaatataaacaattatttcttcattttcttaacttttcaaataaaataaaaagtttagagatttagggtaaaaatgtaatataaatgcacaaatagagcatagaaacttacatttgatcttgtaaaatggtagtgatggaatagagtgaagaaaatctagcttttagatgaaattttgaaatttttggatgaaaaattagggtttcatccggttttttaagtgagtgaatagtggaaattttgaggaagaaaacgaagataaatgggggaaggttgggcgagctgggagttttgtgccaaaaaaatatagggctcatcaagattggccttttttttttttttgcataaaatgagctactttgtggccaatctcagcgggcacatttgggcccgccgtgattggtccaatctattgttttttattttgagttgaaaagaggtgagattggatatctttgagagaccaatattggcggtaaacgctcgagcccgctgttattgccattctgattttcttaaaatatttaagggaatctcgatgggcattctcgggcctgcggagattaagggtccgaattagcccatttttcttatagtgtatttttgatagtgtgcacgctactatgctctcacataagagaaaatatctaattctatgagatcaggcgtcagagggcagccacgtcaccctacatgggcttccagaggcgtctcttagcattccccttttggatgcatcccaatgttcatcgagagggcttctttatcctgtcatcgagaaggctggaagtctttcagatctggatgagccttgtctttggagatgagcttcctgggcctcaaatgggctcgggcccactttccacctagactggaccttccttcatggaagggctttactctttgtaaatgctacatatcacccttctggaaacacaaataacatttatctatatatcatataattatgtatagatatatatatctaatttattttatatacataaacaaatattttattgtacactggggggatttatcacaatttcgctgcacacatgggaaactattttccagcatccctaattgcaaagatttaagactgatcatctcttagctagccaacaatcaagtgcgtaatcaagttatgaatatttgtgtctgattgggaatatttcatatgtaacaagaattggttttatggttttgttatttttgttgttagtttcctatacaatctaaccaattatcaggtgttagttactattatggttaagatttatttagtcttgtttttatctttgtaattaaataattagttaataattaggtattctcaagtcgatttagttaatttgtatcattgcttatgtatggctagttttactttgtaattcattaattcgattcctattcaataaaattctttctaatccgcaatatcgtatcagagcaggaaagagaaactttcccttgatcttgattcttcttctccctcttcaccgtgtttccattttcttctccaacgaactcttgaaccagagctgatgtctcacttagctctacgctttcctctcctgtttccttgatcagtattttctttacctgatctttttcccgttcaaaggtgtctaatgatgatcaatctagtcctgcgatcataggtgaaaattctggacaacctacaaatccatcttaacacagtagtcagattcaatagatgatacagcaaagaaacccccttgaagatccttcttacccgtattacctccactatgctgataatccaggcaatatccttgtctctcaactcctcactggacagaataactacatgtcatggagcagagcaatgcaattggaaatttcagcaagaacaaagtcaagttcttggacggttctattcctaaacttttaccttctgaatttattttgtataatgactggacttgaaagaataacattgttatatcatggatcttgaattctgtttctaaagagatttcctctaatattttgtatgatgaatcttctgcagcaatatggaacaatattaaggtttgttttcatcaaaggaatggcccgcacatatacaatttagggaagggtttgatgaatctaaaacaagacaaataggaatttagtatgtacttcaccaaactaaagatgatttgggaacaattgtctcagtatcgacctatttgtatttgcaatggttgcagttgtggaggtgttaaaaggctccaagaacactacatgtaatatcatgtcgttcttgatggggatttttgattcttactcagaagtgagaagcagtatacttcttatggatcctctactagaggtaaatcgtgtttttcatttggtcacacaggaggaaaaacaaagggaaaaattccacatttggtgtcaaacaaaatcaaagcatggctttttcctttcaaggagacaagagaaaatcaaacaaaccagattctaatggaaataagtcattcccacagaagaggaacatacctttctgcactcattgcaacattcttggacacacaattgagaaatgttacaaaatgcacggctatccacctggttataataagaacaacaaaagaaaataagccttagccaatcaaattcaaaccagtaatgagaatgttggtccttctagtgcatctaaacacttgttcctcaactcacctcaacacaatactaacaacttctaaaccttcttgttgtgcaacaaactggtatgaccacatcaaaacttagtaattctacaggcaacacaggtaccattctctcaaatgtgtcttctttccctgttaatggatcttggatcttagatttagaggcaacactttttctgatctcaaactctttcaatttacttgtaatgttacccctactaaactgcttctacctaacaatgacaaattattagtaaataaaagtggatctattgttgtttcacaacacttaaccctgaatgatgttctatatgtaccagattttaaatacaacattatatcagtaaattgcctcactggtcaaaattctctctgtgttaaattctttaatggtcatttcatcgtacaggacaccatccacaagaggatgattggcaaaggtgaatccaagaatggtctctacatgctggattcttcacctacagaattgcctattctctccatagctgctgacctttggcactctaggttcggacacctctccaataaatacttacatttacttagcagtaaattgaagtgtaatgtgacaaacttgtataaagattctccatgttatatttgccctatgactaaacaaaggaaacctccttttcctaataataacaatcttgcttataatactttggatctcatacattgtgatatttagggaacctatcacattacttctcattctagacataaattttttctctcttcgagtaatgatcattcaatatttacacggacttatcttttaaaacaaaaatatgatgcactaagtgttattcctcaatttctttcatatgttcaaaaccaatttaactgcatgattaaaaaattcagatccgataatgcacctgaactagtttcaagagatctttttcaaaaacatggcattctaaatgactttacttgtgtataaaccccagaacaaaatgtcgttgttgaaagaaagcgtcaacatttgttaaatgtggccagggctctttgttttcaagctcacatacattttcatttttggatagaatgcatcatgacttccacattcctcattaattgaacccccactcctattctagaaagtcacccaccttatgaacttatgtttaaaaaggagcttgactacaactctttacgtaactttagatattttgtctttgcttctacccttacaacacgtaaaactaagtttgctccacgagctagaacctgtgtatttttgggttacccacatggggtgaagggctacaaactttatgatctaaactcaaaacaatttttatctcaaaaaatgttgtttttcatgaatatctctctcctttccataaattgaatgaagctaccaccaacattgatccttttacagagctagatttaccttcttatgctgtaactaatactccaattcatgattatcctgcataaaatactaaccatgcaggatctagacaatctttcactatacaagacaatgatgttagcactccaccagctgctaacatgccatcatcttcacctgttagcatacaaaatccacctgtggagtaaccagtggcgcctagaagaaaaaggaaaaccatcaaacaactgagtgacctaaaagattttgattgctactctgccattcaagatcaatcttctactcctcatccacttgataaatttcttgcttaaactcaattagctaattcttacaaggcttttatcattgcaattatttcacataaggaaccctaaacttacaaacaagccatgcaatacaagcaatggctggatgccatggatatggaacttactgctcttcgcaacaacaaaacatggtctgttgtacctcttccaccaggaaagagagcaataggttgttattgggtttataagattaagttcaacaatgatggctccattaaaagacacaaagcacgccttgtagctcaaggatatactgaacacaaaggacttgacttctttgacactttctctactgtggccaaaatggtcacgtttaaattattacttgctgtttctataataaaacagtggcacatgttacaaattaacataaacaatgcattcttaaatggtaacctcattgaagaggtgtacatgcaattaccagcaggactaacattgtccccttctttgtctacaaattcaaacctagtgtgaaaattccacaaatcaatatatggtcttcgccaatccccgcatcaatggtaaaaaaaaaactatctgatgccttaattcaagaaggcttcaaacaatcttaggcagattacactttgtggctccaacgattaatttatttcattctttgtttatgttgacgacatcgtgctcactagaccaaaccttgctgctcttcatcaagtccaatcttctttacacccaaagttcaagctcaaggccctcggacctctttgttacttcttcagatttgagatttctagaagcaaatatggactatttctcttgcaacgcaagtatactgtctaacttatcgaagatgccagctatgcaagatgcaaacctgctaaaaaacccatggatcctcgaaccaagcatgatgaccatcaaggagaacctttgacaaatccttctacctattgcctgctctttgtcaaacttctgtatttgacattatcacggcctgacattccatttgcagtgaactatctcagccaattcatgtcccatcccttgaagtacacaattataggctctcaaccacttacttcgatacctcaaaggaagtccaggttagggtctcctatattcaccaagttcatctctacatctaagaggtttttctgatttagattgggcttcttgtccaatcactcgatgctccataattggtttctgcatattcatcggagattgcctaatctcatggaagactaagaaataacctactatttccaaaagttatactgaaacagaatacagagctcttgctgccaccacaagcgatataacttggcttcaatacctcctcacagacctccatttacatcaaccaacaccaacgttcatatactgtgaaaatcaatttgccatccacatttccaataaccccacatttcatgaatgcactaaacacatcaaacttgtctgtcatttaatttgtgacaaaatcaacagctccaccattagacttatacctatctccagcaacctacactttgatgatgcctttaccaaaccatttccttccacaatactctctttccatgtggccaaaatatccgcatacgatttatgcagtccactttgaaagggggtaacaagaattgcatctgttatttttgttgtcagttgctttgtacaacctaatcaactgtcacatgttagttacagttatggttaagatttgtctagtctcatttttatctttgtaattaactaattagttgataattagttatggtcaagtcagtttagttaatttgagtcattgtttatagatatggttggttttattttgtaatttattcattcaattaatattcaataaaattcttttcttgctttttttctaatccgcaataatatgtttgatccttattttcgcaaagttacagtttccttattgggcttctgtacctcatcaattattatgtccgtgtagataaacctcgaaattgagtcatggtgccaagaactgaggagatttttgttcaaagtatgcatattatggttactgacctgttggtaattggatagggttccatcctctgtgtaacgtgtgtgccaagattgcacgttacaagctaagtgatgcccacaagttgcccaagtggtggtcaagtggtggcgcatgttgtggtgaatgctggcggcat

SEQ ID NO: 161256 - DNA, 2293 bp, Cannabis sativa
ttgatttttctataactgtgcaatctccaaaaaccattggttatcacttgtagatacatttttaggccaaatataggtgaatcttctcttcacttcttctttagtctatctgattacagttgtgactttcaggtcctctgattcccacaacaccgcatttcttgttttccagacctggtacacgagtgaagctatgacagcatacaggttacctttcttgaatctgccaacctttgatcgctcaatccacctcaaaattgcattcaaatctgttgtctcgattctccaatccagccacaattttatctgcattaagcattgcagagaaaaggagcaagaaaagaacaaatgagacttagtctctggttgttgcctgcagaataaacaataatcttctgcaattatgttgaagtgcttcaacctttctcttgttcgaagcctatcctgaatagcagcccacaaaacataactgtgccgtggaatattttgtctattccatactccatgataccaatttactttcctttgaggaggacaaaataagttgtagccattagagattttgtattgtgtgctaatgaactgttgtacattcattttctccttgatttgatctttaacacatatcaattttttccaataccagctcgcttgttgtggagcttggtgactccaccaatcttccccttttatatagacacggtgtatccatttgatccacaagttgtcctccttgtttgctatcgcccaaacatattttgtcatgtgctgccaagttccattctgctattcttctgagacctattccacctgcagctttcggttgacatacattttcccatgcaattggcccagagccaagtgacatatgttgccctttccaaagataggcacgacatatagtttcaatgtctttgattgtcttccttggtataggatcatgatttgactccagtaagggtgaatggacatcaagacggagttcccaagcactgctctacctgctaaagacaagttccttgaattccatgatcttattctcgctgtcattttttcagctagcaccatacattcttttccagagatacgtttagcacatataggaatgcctaagtatttaaagggtacctctttcttgctgaatccagatctgtcaataagccgttgaactttattttcttccattccacaacagtaaatggtagacttggatgaattcggttgtaaaccggatgagcataagaagagtttcaagccttgtaacatgtaatgaatgcttttgaagtctccatgacagaataagataacgtcatcatcaaacattagatgattcagtttaagctacatcgatcatggtatttgaattttggtttggccccgatctgagtcattattcttgacaagtattccattctaaggacaaaaagtaatagagacataggatctccttggcgtaatcctcgtttcccctattggaaaagtaaattttcgttacaaaattatcatagagtaatatttatattgtgttcatagaaaataaactagacttatcgttgcctaaattgctaagatgctaataccatattatgacaacatatatatgttgtcgcgataaaaataaatgaaaagttgatcaaaatctttctttgtcgtagaggcgtgcgcgtatcaactcatccctagccagactcctcccgtcgaattctttccatatgcttccttgtgtgagtgatgtctttgtaatatcaaagaatttgtgaacttgcttacacattacttaaaataaagtttatttgcgtcgattataaactaacatatttttcaatagtgacagtatcatgaaccgacatttaatatgttattttttgttcacttaataatttattaaaaaatataaaataataataatgcaaaattaaatgtaaaatttattaataaaataataataataatgcaagtcatttaatgcaaatgagtatgttagttaaaatttaataataaaatatcaaaaatagcataatggtaaatataaaagcatagtatttattatgatgtaaattttgcattatgctatattgtgatgtaaatttggatcacttttgattatgtaaaatttttgtatcataatttagcacactattggagtagactttttaacaaagtgagctatatttgcatttgcacactacaaaaaaagctatatatttttagtggcaacaatttttttttgactaaatgatttttagtcacaacaaaaaaattatttgtgactaaatatagtatttagatacaa

SEQ ID NO: 161257 - DNA, 4723 bp, Cannabis sativa
  modified_base (4687)..(4693): a, c, t, g, unknown or other
gagagagagagagagaggaaggaagaggcgctataatttttttttgaaaggagggaggcgctgctgttagaaaggagaaatgagaagttagtattatggttttgttagtttgatatagatttgtgttagataataagagaaagaaaaatatatctagttttattaattaattaattaggttttaagagaaataaaaaacctgccttctcttagctagaaagtatttcttttaccctaattaattatgttacacggttttttattttttttttaagtatttcaacgtccctttatgtgttagtgggaaagttttcccacacgtgcatggtgacgctatagttcattatttttttgaataaaaagtaataaaaaaataatttaaaatttcagaatagttttagtgacacgcattgtgggttagcaatattaaatttttaaagtcctataatgcgggtctctaaaaattctctaaactatttagtgacacatactttttgtgcgggtcactatagagtgtcactaaaaattaattttgtagtagtaactcattaaacctcgtgattttccataccacaacagtaaacaacagatttagattcattcgagaaaatagatctaaaatctccatgaaaaaagagtaaaatatcatctgcaaagctcaagtgattaagttcaatgctaaagcagctatcatgaaattaagggctgccttttggccaacattctttattactcggaaaagatactccatacccagaacaaagagaaaaaacgataacggattaccctgtctaagccctcgttttgcctctaagtaactatgcattaatccattaaaaatttgattattttttggagttggataattaattttgacttttagtcatgttgatttctttttctagggcaagtaaaagcacattaaagtgtaaggtaaaaaaacaacataatcctctttaattatataccaacccaaatctttatatatagtgattatatataaatgtaatttttatttttaaatatatataataaatttaattttttatataaaatatttacatgatttttatttttaaatatatataataatattaaaaaattaataaaaaatattctgttaagttaatgtaaaaaatcaaaagataccattaaaccaagaatcctgttacatacctgcattatatatataagaaatattcttaatttttattttaattatatatttttagttatataaatgattttttttatattattcaataaacaaaatttttgctattaattacatacccacattaagtgctattaataaaaaaagataataatattcaaatatttgctattaattataattttagtataattgtaatatttttaattttatatacttttattttttaaaaaatcatcataccctttttctattcttttaaatgataattaaaagatatttttaaatatttgctgacacgaattggtttgggattgcttttgtggttcgcaatgcacaagggctattaattgaaggagttaccaagctttatcaagggtcggctacaccagaatttgtgaaagctttgggttttaaggaagctttaagttggatcaagcaaaatcaatcttgccatgcaagttattcttgaaaccgattgcttagtgtttattcaagccttgcgtagttcaattaattgatatgatttccatgtttattggtcaaatggttaatgattgtaagactttattgaaagaaagtcaacatgtttctatcttttttgttaggcgatcaactaataaggtggctcacaactttgctagagctttcttattctatcctgattgcagtttcaacttggtgtctgtcccagttgttttgctaccttcgttggtaactgcatttaatggttaataaaattataattttccattcaaaaaaaaagatatttttatatatgtgcgataggtttaaatttgaattacaatgttaaaaaagaaatatattaatataagataaaagatataaaatagatatgtgttactacaaaaaaaaaaataactacctttaagtattttctgtgatttataaatgtaatttttaatcacaacaaaaaagttatttataactaaaacataatatttaaatataatcactaatttatctttagtcacaacaagtattaggactaaaaatacatttagtcacaatataaaaataagaatttataatttgtcataattttttttttactttttatcataaattttattgtgactaaaagtaaacttttttgtagtgtgaagtgagtttaaaattaaattataatattttttaaaagaaaaaaaattacactatctaatttcatagtcacatttaatataacacaattatatatagtgtagatatgagcaattggttggagatactcataacgaacagtgtagtatcgtaaacgtctaataaataaaataacctagttttcaactcaacctaaattttattttttttggaacaactattgcaccaatatatataatacaaaatttacaaatcaattgataagtattgatttggttcgatgtatatgttaattattaattacaccatgatcaaagagcatcaacgtgaaaaatatgcatggttgaaaatatatataaaacttcatatacaatcattgtgatcagaacgataacttaacccaaattattacgtggcaagaaagttattattaataatatatttaaatttctaggtcaatagtcaaaattatcattcaacaattttgtactcatttcttcaagaatcatcatccccattctatagagttttaattagataaatttattataaatttataataacttattattgaatattattttatagaaaaattaaaaaatatgaaaaaaaaataatcagtataaagtaactagttacccctcctaaaaagtcatatttttgcgtagatagtagaaaattttataaattttaggataaatagcaacataagtactcaaagttttaagttttaaatagcatatataaattcaatatttatttttagcgacataaatacagatttcgttttgaatttattaaaataatatttataagtaattgatacacatgtttctgtctagacctaataattcagaatttgggtcttatatcatgtttaagataataacagagtttatacaggcaaaattaaagaaaaattacaaaaataaacatactaaatatttttttattataaaacaaatattattacattttattataaattaaataaaataatgaaatataaaaataaaaattattaacagtaatatatataaaattcatatataattttaaaaataatcttttatttaagtttttactgttattaacaattatgttatagatatgttttagtgaaaaaaattaaagaatataaaactaaaattatgataccataaaagtcatgataaaattataactagattagtcaatattagttacaataataacaaaattgaattagtaataatattaattatatacaaatttattactatatattttgtatataaagttgagaatatatatttttaatagttaacaaattgtaaataaattttaattaataaaatgtatataactcgtaaatttttcaaaataaatggcctcagttgaacaatacacaaaattatgagataattgttataagagtaaatagcggcataagtattcaaagttttgagtttataagtgacataaatctaatgtttattttaagcggcataagtgtttgtaaaactgtaatttttttcctaatttgtaagtatagactttattattgtcttaaataggacacatatattgccaaaattctggatcattgggtctagacagaaacatgtaatatcaattatttccaaatatttttttaataaatttaaaacaaaatctgtactgacgaaattggagaaaaattagagttttttacaaatattaggtacttatgctgctaaaaataaacattaagtttataccacttacaaatttaaaaatttaagtatttatatcactatttatccttgttataattacaatagaaaaccatcatattaactaggtagttgtgtagttactcttactatattttaatatgtaagcatgtttatatatgaggtgactaataacaatcacattaatattttgtaaaaattactgattgaactatatgttttgttaaatgacaaaattgactttatatttctcaaaatgtataaataagacattgagctcaatttttgacaattttttttaatataaccaacttgaaatcaatttctagcacgaacagatgcaataaacgtaactagttttgtcataacacttctagattattaaattttattttgacaaaaaaactagttaagagtgttatttagtactattttagaaaatatatggtccaatttatcgatcatttatcaaaacagagagttcaatcaatattttttttttgtaaaatacagggcctagaatggtatttacttatgaatttctaatagtttgtttgacaaaaataattagtaattacacaagaaaataataatttttagtactgaatatttaaagtagaaaattttgagtaattacatatatggaagaggtttcaatggttacatttttattgtnnnnnnnatggttacatttttttaagccattggatta

SEQ ID NO: 161258 - DNA, 2921 bp, Cannabis sativa
tttataataacaatgaataatgaatagttaatggtaaaaaaatctgcataaccaagaaaaccataaaaaatgatattttcagcacaaatctataaaatgatttcaatttcaaaccctagactaaaaaagttcaaaactcctacatacacatccatccatgaacagaaacataccaatcaagtaagtcctgtatagaaagaaaaagggggggaaacaaagaatacaaaagaaaatcataaaaaaaatatcatactagcccaagaagtcccacaggccatgcttctctagctgcaccaatgtctgcactacgcaacgtcaaccctatgcaaatgtccaataaaatataaattcaatttccatattttccatatttgtatgtgtgttgctatatatgctcaactatatataacacaaacaaaagcccgcatacatgtaaactataatgaagtttaaaactcaagaaaatgaaattcaaacctgagacaataaatatcccaaatgtgctaaactttgagagagaatatttatcagcaagacaacctatactgggacatccgaggcctaatgctactccacccaaaagagctgcattcaatatccatcaaaaagaccaaagctttaatcaggattgtactgacaaatgataatgaaaaagaaaaacacttaagcaactcaagaagaagatgtgggcttaaatattatgaaccatcacctaatggaagaaaatttgttgacgcaaaactcaataatggtcttgcccagagtaacccatctgctgatttcgatacttgatcagctttagctcttttcccgttaccttctttctgattcaggattcaaatttacatccaacaagataagaaacccaaatattcgatcaaacagttttctttagaccatattcatgtcatgggcaactttttttttattttccccaactcaagtttttccgattatttttctgtatattatattgtaccaaagaaagaggtaaaaaaattggagaattagaggcgacaggacctgattgggaacatcgcaggctctgatgggtctcgaaatcaagcttctacggcgagaaagtgaaatagagtaagtgggaggagaacttgggtttcggtaacgaaagaatagcgatttggtggttaatggcgtgaagatgagggtttggatggttcccgccattgatgaactcctcccaatatagaaaaacggtaactgtggcacccaatgtcaggtggaagtgactcgttcattagtatgagcgaatgtcgttaaacgacatgtcgtttttcaaatattgagggtgtaaaatatgaacttttatttatttgtgatatttgaagaaaacataaaaattaggggagtgaaattataataatagaaacattaggggctaaatgagtaatatttgaaaattaaataattaagaataatatatagtgagagtgagcaagcttaaaccaaatccaaaaatggcgagcctaactcgtcagttcgttctccaccaccaccatcatcaccatcgtcaacctcacgccatcctcaaaaggtcctttctatcatccaagcttcctggctcaggcttatccactcgttatgccccacgccctcgcaatttctccaccactccactcctttgctccctctctcaaccactccctcagcctcaggtcttattctctttctgtatttgtactatttgtaattgcgtacatataatgcttatatgagcttggtttgtttcgaaattctggctttcaaattattagagttcggatgttggagcgaatccatccattgttggggatttactggactatctcaatgagtcgtggactcaatttcacgccacgggtaattcttcattgctcttctgctttcttagctccactgggtagttagttatgcattagttacaaatgttggacaatgatttgcagatttcctggcatggcaccattttattattagtgaattgaattttaagctataaagtttaaattgttttatgtttgtctcaattttcgttttgttttttctgtacagctgaagcaaaaaaacaactaattgctgctggttttcatttattgaatgaaaatgatgaatggaacctcaaaccaggaggccgctatttctttacacgaaacatgtcttgtttggttgcatttgctgttggagaaaagtgagtaatggaatgtagttttacgaaccttaagtgtaattatttgaagtgaaaaaaggacaagtttcattggtagtttagtttgtgattcaattcagtttgacaagtttctttggttacaagcatttacagttacagtcatggtagttctccttgtcttctttcaaattgttgattggtttaaaatttcaatgtccctcatataggtattaactgttattcacatgttactttatatgagattctttgtaggtgttaagtcccttacactattgttagtcttctatatgtctggcaattatcaattaatggcttctcctagtttttcagatacaaggttggcagtggctttcacgtgattgctgcacacacagatagtccatgcctaaaattgaagcctaaatcagcatcatccaaggctggttatttgatggtcaatgtgcagacctacggaggtggtttatggcatacttggtttgacagagacttaactgtggcaggaagagtcatagtgagaaatggcaatgattcttatctacagaaacttgtgaaagtgaagaaacctttgctgcgtatacccacgcttgccattcatcttgaccggtttgcctcacctgaatttacttctttcttagccactcatgtttgtaaattcttatattctaatgttgtagaaaatagtgattcgaattgtgtatagatttcatagaataatacatatttatatacagagtta

SEQ ID NO: 161259 - DNA, 4568 bp, Cannabis sativa
tatattgaaatttaggtgttatttgggggttattttcacctaaagtggtatgatttagcatagagatgagaaattcaatgtatccggcgaagttttcatttctctatgtttatgtatctatttgctaccactgtttttcgttttttctacgatttaagaattgaaaaaaaaatccttttagcaatttaattgtcatgatatgtatatatgtatatacattttgaagttagtcgttatgttttattggttatttcacttaaattagtgtaatttaggcgagggaacatagtttcaaaatacccagaaattttctgttttttgttcccaatatataagctgagtttcaatcctatttgaacaattatgctattcttttctggacctttgttaatattttcaatttcttgctataatatcgtaaactgtgtaacagttaaaaaaaggttttgaaagtttttgtgatatgatatcactgccactagctgtaagtcgtttggatggaactttcaaaagctagttgctggtagtgtgccaaggaaagttcttgcaaccgtttaagtggattctcctactatatgcaggttatttctataaagattatacgcaacaaaatcacaggacagcctgaaggttatggatttgtggagtttgtttctcatgcagcagcagagaggattttgcagagttacaatggtacccagatgcctggaactgaacaaactttcaggttgaactgggcttcttttggtattggtgaaagacgtcctgatgctgggcctgaacactccatttttgttggagatctggcacctgatgttacagattatctgttgcaagaaaccttccgatctcaatatccatcagttagaggtgccaaggttgtcactgatccaaacactggacgttcaaaaggatatggttttgttaaattttctgatgagacagaaaggaatcgtgctatgtctgaaatgaatggtgtctattgctcaactaggccaatgcgaattagtgcagcaacaccgaagaagaccactggttttcaacagccctacactgctgcaaaaggtatttttcattttgataatttttgttacgattgatgactttgtgattaccatacttatcgtcttgcaatacctgattttaactattctttgaaccactcagtaaaagagaatccatcggtgcatctccagtattcaattgttttgggtatatttatacactattaacaacatatgcaatgtttgcgggaatggtgtgtagcgtatgaatgtatctgtatgtgttcatatgagtttatgtgtgtggtttatgggaaaaagcaaaaaacaaaatcgggtactgagttgttttcccttagttatgcctcgagacatacaccttaacaataagaagaaaagcttcatgaaaattattttatttcatagcaaacagcacataattctataacgaagtcataaaattcaagaaaattactagttaagtcttaaaatcataaactaaatccataaatggttcaatttcaaccgaaaaatgataaaggttctaaacttatatagaagacatatatgcatgaggttgatgagagggagggactcagctaagaaggaaagagatgatagatgttgcatgaaagggttagggttattagtgctatattttcctgtattttctattaaaaatctgttaaaaaagacctaaactaaagcccattagtcatttagaagtctgaaaatagctattagaaaagctttaagaaaaagccgaaatcagcccacggttgaggcgtacacctcatgcacctcagtacacatcgcctcagatgtgtgtgtctcaagtccacctatcagtgtgtgaggcgtatgcctcaatgacagcagctgaggcgtagcgtcagatacgtttttccaccacctcacctaccaatttttgaaacaatgcttattactgcctactactattagttatgacttacgagtctgtgacatgcaaagctggaattggctccgttgcatgcttttcctgctctagtttctgatatgctgacctcaacctggtttataaacacacttgttgactttcctgtagcggcatatccactttcagcatacagtacaccaacagcccctgtgctttctgcagattatgatgcaaacaacactacggtgagctagactggactaagtgatgttggttttattttatctcttaatctcacaatcttttttcataacagatttttgttggtaacttggatcaaaatatcactgaagaggagttgaagcaaacatttttgcagtttggggagattgtctatgttaagattcctgctggcaaaggatgtggttttatacagttcgggataaggtctgttcaacacgggaaacttttgacatcacatgatttctttaaatgaaacatactaacaagaactctgtagtctctacgtggatttcttttcttatttgaattcattgtttctgtttctcttttggttgttaaagaaattataagttttctacagttagcaatgttgtgatctctcctcctgtctctagctataaaagttctctttttgtcagacttaacgaagttgttcgtgtatggaggattgaaggtggcaatgcaagttgcatgcagaatgttccatgacttgtttcactttctattgtaatttaacaatatttttttaatcatttttctccactcttctatgatcaagttgcttcttttttcttgaaaaaagatatattgcttattgattttctgaattttcttataactgttatttttgtaggacatctgctgaagaagctattcaaaaaatgcagggaaagatgattggtcagcaaatagtccgggtttcttggggtaggagcccaacagctaaacaggtgattggtcatgtacttctttctaaaaagagaaaagattttataacaagctgatttggaatggtgcagtgtattttagatggtagatatacatgaaactaaaatatgactaatgattacatacacgggtatgagtttagctttctgatggtcttttaaggacttttacagatacaagaaaaaaatttactgtagattttccctacacctgacaaaactttataccaacttattttaggacgtatctggtggctggggtcagcaagtagatccaaatcagtgggcggcatattatggttatggacaaggatatgatgcgtattcgtatggggctgctacacaagatccttcgttatatgcgtacagtgcatatgctggctatgcccaataccctcaacaggcaagttttaaatatgtaatgcatctcacatgatggaggtgaaagcttcatgaatttttatggaaatggttttggttcatattgctaatcatggtgttgagaaattgatgaatgtggctttttaatagcctatcatggctttagtaatttattattcttatttcctactggatattttgtttcaggttgatggtgttcaagatatggcagctataggagcaactgtcccagctgtagagcagagggaagagttggatgatccattggctacacctgatgttgacaagtaaatatttcaatatatttgtcatgaaatgcctatctcttgtccatatttttctatcttctgaatccttcatggttgattgctaggttgaatgctgcttacgtcgctgttcatggaagtgcgatgctaggccgtcccttatggcagagaatgtctttttttacacagcaaacttagatgcacatattcataaccagattcagattggtgagactattgctacattgttgtagaagttagaggatagagcggtagagaaagaatataaaagagtatagtgttatgttaactgcaaattgaatcagcttccatttcttgattgtgctttttgctgcatcagagtgggaccttttttctgacaataaaattttttcttgttctgctgaaatataattcctattttattttttatttttatgaggaaatttgttcttttagaaaggaggaaaaaaaaaactattattaataatttcgtagaggatagtaaacttgtaaaatctactcgtttgtatcaagtgaaagtgacatgccttggtagtgcttcgttgataatttcgtaattaaaattgttaattgaacaaaataaagatgtattttaagattaattagaacttttacttttccaactttaatatgtatcaaatcatgtcattcaaatttaaggatttttgttaaaattttgtttaattttactaatgtagtattgtttatgtattaaatcacgtactttgaaatttgatatctactaaatttaacttccttaactttgacatgtactaatttgtgcttttataactttcatttatgttaagtttttgttagtaaaattggataaaaaattttgaatttaacaatttcaatagtttgaggagaattgttaacgtcgattgtccatatattaaattatgctcttttaaatttgatttctagcaaattttacctccataacattgacatgcaccaattttgtaaagaccgcttagtt

SEQ ID NO: 161260 - DNA, 2052 bp, Cannabis sativa
cggaggtcttcgcttattacgtcttctggaaggcaggaagccttccacatctggaggagtctcgtctttagaggcgaggcttctgggcttcatatgggctcgagtacatcttcaatctgactgagtcttcttgtgtggaagggttgtgatccaagccattctagactaatcatacttcaaaaatacctcgtgtcacccttccaagaacacggataatatttacccccaagcttctgagacttgagagtggtgaaagcttacagtctttctttcggattgccttggacatgtggataactttggaaaggaagagatcatttcatctttcgtgctttggaatgtggaaagttaggaacatttagattacaactagcaccgcatgcgtgtcctcgtcctcttggtccatgaattctatgtgtctcgggagagcgtgtgatacttgggatatcgtcatgatagctgattgatgtcagcactcatatcaaggaaaattctatgatgaaaaaaatcatcaactccaatgaagtgtaataaatgcagtccttccagctctccatctgttggatcaatgttgtgttttttgagatgaaatttaagcccttgattggtgagcactcgatcgcccccttcaggtataaataggagcagagaagaaccatttaccacttttgcacattcaagcctttgaattcaaattcaagagagagaaatccataaaaccccactcttaacccaggtgaatgtctgatcccttcgagaccattatcaaccatcttttgtgaatccaagccagagaggactcaggagcaccaccactgaacctaaaagtaagacacccttagtcactggagcccttgaacattcaagtaggcattgatcgaattctcgattgggaactcacctttgaggtcagtcaccgtcgcattccttcacctccacctacaagtaagttctccccatttttttgaactgtataatttctataatttctgaaaatacatgcttgaactttaaataggaagaactgtttacatatgaatgtgaggtttgaatgtacaatgtctgagctttttagaagttgtagggctattgtaatgcaaatgtagataaaaatatggggattttagctcgtacttttttttttcttgtgttggctgaatttgaattgtgtgtgcgccaaatttatcttaaactccttcgtctgaagttattagggcttcacatgagatttttgggtttttgtcatttattcttgagttcccaatttggttgtttagaagtatagctctacaaagacctagcttttggatgacgggtccagtagggacctctccaagcaattttagttgtggactctcccatacccttgctaataatttttggtttagggtattaacttcttggattttcttatgttctttctagccataaacaccatgtctgacgatgagttcaatcttgagatggtggacctcattgaggagacagccgaagcaggggaactggtggaagagccagttgaagacattgtcctagagactactccgagaagaagacgtccaaagaaaactgccccaattatttataaatcgtccacatgggaaatggaccaaattccaaacaagttttagaacttcaagatgctgcagagatacgatgaatattgtggggtcagcaacgttctaggaatcaactagcataggattttcctttttatggagtctctagttaagtgtgttaatggtttcgaagcatggagctgggtacacatcatctacaaagcccgtctgcccgtgcgagcttatttcaccaacttttttgctattgtagggaccgcgcttttccagcttatcccatagtcttataagctcctagccgactggtatatcctttgcaagattcgagatattgagattttgggcccagaagaaatacaatatttcttcactatcaagtcacagcccatgctaaataacaagacaaagattagattttgttatcccaatttttgtactttaacgtggcatcgcacgatggtgacacatggaatca

SEQ ID NO: 161261 - DNA, 1482 bp, Cannabis sativa
atcataaatctctactatgttctcatcatctctttgccaccaaaaaatgaacaaattatgcagagttaccatgtgaaaatattaccgtcagaccttgagttgggaccatattcttccatatctttctgtttccataggatatcctccaaggttgaacaagcgttcttcttatgtacatctatgaaatattaggaaaagaaaataatagaatactttttttcccctctaattgatagtaaactttgtctttccaaactattcagaactagttctggcatattagaaaatcaacataggaaacttcaatccaaattaagataagtttctatcagttcttttctttctcttgacaatgatccaatctctaacaaaccaagagtaatcagtcgagtactttgagaatgtctctatagagtgctaacctgagtttcttcgtgtcccagtactaccaaagggcgagtgaaatgagacagcctgaagtggtgtaggattttcaacaagcaacgaggtattgactttttccttacaactattattgggaatgttgatgttttctgcacaagacaccaattcatattaatcacatgacaaagccaccaagcaattgaagcaaagaactgaatgcattacatgatatttcatttgtacaataaacttcatcagagaataaccaaacattttagtccacagaaatgatgttctttgataaaacaatgcccaaattaatgacacattctcaatcaaattacctttagaagcattctttgaattgaaattattggtttggttcagcacatttcgtgctaaagaagaagcaaatgttttgcttgcatcttccttcaatttcttaaagaaggcaaattcagaggttttcacttcctcagctgcatcaaaaaattcatttcagactatcaattactgataccagtatcaaaattttcttagctattagaaacaagcaagaaaaggaaacttacaagagattatggaaatcaaagaagaaaacacagtcatattcatatctccagagaacaagtaaatctaaattgcagagtatactcacatcttggagccttggaatttttaggagaatcagcatcagtatctgaaaacatcactcttttcctgctacagttcatgtctgcaattacaaaatggaaatggaaaccagaaattgattattagctttctaatattacagtaatgaaagtatattaaaaatggttgattgagtgattaagttaaaaaaagaatttgaaattgattaaagaaacaagaaatcgaataaagatcctaaagcactccatgaaaacctggctgagactgagtttgaatccacgacggagccttagtgttaggtttggaattagcttctcttcattgttaatccccaatctgaacttcggagtcagtggattccgtcgtagccaaatcggtagatttcaacgacagtgacggaaacgacaacagttcggagatatt

SEQ ID NO: 161262 - DNA, 3636 bp, Cannabis sativa
  modified_base (2820)..(2820): a, c, t, g, unknown or other
aataacccatatatgagaagatgctatggtcaattgtgctcgacaccagcaagaaaatttaaataggtttaaccccagataacacaatgtaataatgtatgtcacaaatgatagcgtttgattatgctaacaatgaccacgaagaaataaaattaatagaagaacatttacttttgtttaaaggactaatattcatctttatccaagtaactaaaacatcaaatgatttaaatcttgtttagtcttaaatctcttagatataaaatgtttaaactataaatagcaaagatcatgcctaaactaagtcttggtagtaatgatgaaaagccacaaccactttcttgaaactaatattcactagtggaataaaaccgaaccacctagcaggctagcagtctgtttcttgcttttacttcagttatgtaaatgttaacattatattattcaccattgtgagcttaagtaactggaccatatacaataagaggaaacgtggtcacattatttctcttcttccatgtaatttggtcaaactgtatattacatgtaacagtgttaacttatctaatccctaaactgagcagagaactgatcttaataaaaacgagggaccaagacatactttcactcttcaacatcaatctatgtttaaaacagaaaccaataatctactactaagaagcaaaaattgtaattgatctacttcacattaaaaattactgcaagtaactaatttggtaaatcaattacattggtattgacatgttaaagtttcaaattcaagcacattgctcaaatagtttcagttcaacattaaacatgcaatgtaaatatcttatatcttaatagcatcaacaatccaccaagtgaagaagaaaaaagttcccaaaaaaaaaagtagcaattcttcataatttaaaaagtagaatcaaaatcaacatatcttaggggaaaacaaaaccattcttcatttgaatcccttcaaaaagtcatgactaactactaaacatttctctcaccctaatcaagcaagcaaaaaacatgagctaaccataatatctaatctccctttctcctaaaggagcagccttcagtgagtctagcacgcccacctgtaggctggcacaacacagtctggcaattcccacacaccaccacagtttgtgaatggctaaaaacagtagttctgcatatttcaataacacaaaaatcacaaatcaaaaatctatcactgacccactaaaggaatcatattgaaatatacagaaatagcataaatttttttagaacttacatattgaagcagccttgacatttcacatccttaaagggaaaaacaagaaaaaacaaattagcgaaatttcaaagacccagatagtaatgtcgattcacatgtattgctggaaataattaccatgaaaaaggaattgggagactgaacaagacgcttgagcttgtgcttcttcttctcaagctcagctggtgggtttagcagatcaatgtcgttttgaagaacctaaaacattaaccatgaatataagataaaataaacataacccacaataacaaacttctgaaggagaagaaggaaaacgtgttttaccatgttgccgttgaaagaagacgcttttgggttttgcagaacacgaaagagaaaaacctaaaacggcagggaagtggaggaatacggagaaaagtgatgctatatagcaactcttagctagctattgtgagcctttggatcttagattttgaatctacacccttcgtaaatatgtgagggttttatgatcacaatttccatttttagtcctttgactattattttgtgacgatttcatccctaattttttttgttttgacaatctaatccatgaattatgtgaacttttagttatttttcttttaatggtaaatttcattcaactagaccaacttaccctcaaccatattagtaatatctaagtgtttgcagtgtaggtggtgcgtttttgattatttcttcaaacaaattcgtacatgtagtttttctaatttcccaaatcggactcgcaccgcgaaactaaaaaatcgcagaaaccgccccgcaaaaaatagtgttgtgcgatgcgatttttacagtttgaactatcaccaataaataaattatcacaaatacaacaaaaacttgaattatgttgatcctttgactattattttgtgacaatttcatccctaattttttagttttgacaatttaatccatgaattatgtaaatttttagttgttttttttaattgtaaattcatttaattagactaattcaatctatgtcagaaacctataaaagaaaattagacttcaaaaaaatatgatcaacatataattgagatactctaacaataagatgagcaactcaattatttgcaaatgttaagaaacatcaaactaaaaaagataaaaataaattgttagttgtttaagttttatatcatattaaaacaattaatttttttcacaaaggaatatagaggatagttgtaacatttttaaatatttttattttataattttggttaaaattagtagtgattatagggagtttctgtggtgcacaaaaaaaattattttgatatttaggaaaaaaaactagtttagtttttttatgattgtgtacattatagttatttgaggcatcctgcaaaattttgagaaatttaaaataatttactatcaaaagcagtgttcaaactgtttttgtcacacacgtataaaataaaagaggaacgcgtgcaacaaactgtttgaacattatttcagcgtgttaaatttttttaaantttttaaaattttacaggatgtctataataattgcaacgtacacaactataacaaaaatttggactaaacaattcttttgaataccaaaatagataaggatgtatcagtacaccatagaattccacaagtatattttagaaaaattctaaaggtaaatcgagacatttctttcgcatctagaataattttctagtcaatttttttaataatcgtgtacattcaaatagtctatttcaaactgtttattacacgtatgctttttttttttctacaagtgtgaaatatactatttaataatattttctatactgtaaataattctaaatttttcaaaatttacataatatcttaaaatcctacatgatatgacaaaaaaaataaactaaaaaattttcgtagatattaaaaccaataaagataccttataatttccaatattttattagatctaatacataaaatatatttaccaagtatttatatgtttacatggttcttatagacttatagtatatgtaattttatatattgtgtgacatgtgttaaatgctacttgagataaaaactgtttcatatataggtaatttgtggtcaaactctctatatttttatatttgttacggtttaatcctcttactcaaaaaatacaatcattttgctctgtagtccttccgtccattttggtctgttaagtgccaaagtggactaccacggtatacacatgacaaatttttattagtccacataatattaataatttatatattaaaaaaataatttaaaatatttaaaaatcagaaaaaaaaaaaattaaa

SEQ ID NO: 161263 - DNA, 6723 bp, Cannabis sativa
tttttttttttttttttttcgggctcttgctaatgatccccggtatattaatttttgcaggctaatgatggtgcagatatagtttccaatttgcgtagtggagcagctgttgaaaatgcttttgctaaaatgcaggagaggggattttctaatccacgtggatctaggcatcggttgactcctggaactgtcaaatttgctgcatttcatgttctgtcacttgagggggacaagggtcttaccatattagaagttgcagataggattcaggtaattatgggttgtttattatttgacttcacattatgcaaagggaaagctcaatataaaactctcttttgacttcacattctagttgcatgaaactcatttatgaattttgtaattcaagaaatctggacttcgggaccttacaactagcaagacaccagaagcctctatagctgctgctttatctagggatacaaagctttttgagaggactgctccttcaacatattgtgtgcgtgctgcctataggaaggacccagctgatgctgagacagtactttcctcagccagggagagaataggtgtctttaaaaatgggttcttggatgtagaagatgctgatgaaggtgaaagagatgaagattctgaaagcgatgtaggagaggatcctgaaattgatgacttaggtactgaaataaatcctgaaaaggggtctgtagtttctcaagaagtaaacaaattaaatgaagcatctatttctcgtaacggagaggaaattgttcaaataattgaaactaaaaaaaaagacctccggaattctcgtggagattctgtacattctgaaagctatgtaaagagggaagatgctgtttctttcttggcccaacctattaatgtcaacaagagtgatgtacctaattttggttgcgaagatccagatattgatgaaagcaatcctggtgagccatgggttcaagggcttatggaaggagaatactctgatctgagtgttgaggagcgtcttaatgcacttgttgcactattaggtgtggcaattgaaggaaactcaattcgtcttgtacttgaggtatgcgattttcattcttcataatcttttacttttggaggtaaagcttgaaaattccctagattcttctggctgtaatttaaagtgagtgcttgtttcaggagcgattagaagcagcgaatgctttaaagaagcaaatgtgggctgagatgcaattagataaacgtcgcatgaaagaagattatgtgttgagaatgccttacacatcatttatcaataacaagtttgagctcaatcctgtaatttcttcagcagaggccaagcaaagtccatttgtcaatgttgatgacaaaaacaatggaacaacaggagatcttgcagtcaaggaggagcggatggaggatccatcgaataacaatccttgtgtcaacaattttccttctggtggaaacttgcaaatgcaagaggtctgtgctggtcctgataataacctttctcagcagccaggatatgctgttgacaggtctcgatcgcaattaaaatcttatattggatacaaggcagaagagatgtacgtgtatagatcattgccacttggtcaggatcgtacacgcaataggtactggcagttcattacttctgcttctcaaaatgatcctggctgcagcaggatctttgttgagttgaatgatgggcgttggaggcttattgattctgaagaggtactatcttctttatctttagatcttaaatgtcttgatttgcatgagttttttcatttaattgtttttgctgttatgtttgtgtttgtttgtgatgctctttctattgattctgattagttaattgttgtatggcttcttctatggatttttccacatgaaataataggatataaatgatattatatttcctatctgataatttcaagcatgaaagcttgaacatctttccattatttttttaaagagttgcagaagggttatttttccttcattctctgctctcaagtgtcattaaaaaagaacaggtctgatgtttaaaatttttcttgtatctattatatgctttattttgcatttgctattctgcattcttacagcctctctgcagggttttgatgctttgctggcttcgttggacatacgaggggttagggaatcccaattgcacgcaatgttggtaaggattgaactctttttcaagaaagctgtaaggaagaagatgctgcatgctaacatggggaggcaacgtgaagacactggaaaaacagcagttcccattgattgcagtaatggtattgatagccctagcagtactctgtgtcttgctgagtctgatttgtcggagagctctacttcttttgtgattgagcttgggaggaacaaaattgagaaaagtggtgcatttcagagatatcaagatctggagaggtggatttggaaagaatgcttaagttcttcaatgctatatgctatcaagcatgggaagaaaaggagcaagcaacttctgaatgtatgcgattcttgtcatgggatctattcttctgaagataatcattgtccttcttgccatagaacatttagttcctctgagagtggtacaacaagtttttctgaacacattactcgatgtgaagataaacttaccctgaaccaatatgggactttgaatgattcaccttcctttcccctgaggatcagattactgaaagtagtgctagctttaatagaggtgattgtcttaaaaatttggttgcgtaagagctgtaaagattatcttgctatgttaatgtaaaaatcaagctcataatgtgtcatgccacaggtttctgtacctccagaagctcttcaatctctgtggactgatagccatcgtaaatcatggggtgccaagttaaatgcatcatcctcagctgaagaccttctccaggtgagttattggttcttttcatgaatgttctaacattttcatgtcttctttagatagccattgtggtggtggataacaactttcgttttctcatgggatatgggaaatagaagtccatatattcccaagttgttgggtctgaagcgcttcttttggtgctttttgagctttctttattccatgcttcacttgttttgcataagtcgaatgttaatgtaccttgaaaaatgtatattaagtattttttttctctgtcctcctgaaggtaatgtgtctctcatttcaggttctcacattgttggaaagtgccattaagagggagaatctattctcagagtttgagaccaccaatgaacttctggattccttgaatccaagaagatacattgctcctcattctacctgtctcgaaacaatgacagtgcttccatgggtacccctaacaacagctgctgtggctttgagaatcatggagttcgatgcagccattttttatgtaccgcaacagaaactggattcacaaaaggacaggggatctggaaatgttattgtaagttatctgatactgctatcagaacatattggagcaccaaaaagaaaaacttattaatattatagagggaaaatggataaattatttttgataaatgctaaaaggcaatagtcgtacctagtaccatccacagtatcatatcgctattggtagaattaagtctcggatcctaatttaataactaataactattatggaatatggccagctatttacaatgcgtcactttataatggtactaagctctactggtgcctattagtaatgctcattatttataattgctcgatagaagcttgacttagtttgcttttttgttaaccataagttactcatgctatgatcaatttagtaagatcccatgtagattttgttaaccagaagtcaagcttacatgtgaaagtatatttgtagtaataatcgtagcattataaattaattgtatttatctgataaattaatcgtagtctattatctgataaattaattgtattcaactggtaaggcgtatatactgagatgaagtaatagttatcaggatagattttggtttatatctgtgtagaagttattagtatatatatctaattttgaatatgttactaatccttttcctttggttccccagaagttgtcttcaaaatatgcattaatgaaaaattcgtttgatgatgggataaccagaactccatgtcaagttgacaatctcaagaaagatagttgggttgatcttggggagggactgcaaaactctggcttcaaaaaaggaagccgtggaaatggaagagcacggggcggtagtaatgtgactactagtactcgtgggggtcaattgcagaaaagagctattggttctagaggtgaaactgtgaagaaaaatgttagggcattggggcgaggactcagatggaaaggtagtcaacgtggaggatgtaaacgtggtcgacgcactgttagaaccaagcaaaaaccagcgaaaagaatgtttgggactggtgtggaggaggaaacttttccaaaagagatcattgatgagaagttcccaagaagtgtagtccaagattggaatacagaagatgcaactggtttgcaaatggaagatgctgaaccagctagcagcatttctggaagatcggagtatgatgaagaaaacggtcaaggatcgggagatgaatttgatgaaatggctatggaagacgaagactacaacactggcttcaatgataggtcgggtgaattagacggtagcgattataatgttgatgaggttgatgatgatgacgatgacaatgatgaagatgacgatcaagatgagtacaatgtcaggcaagttgaacaaagggattttgatgttgacagatacataaatggtgattcagatgaagaggaaaacaggggaggagggcaagacatggaaattgatcaacaaacgggatccacgtcttcagattatagtgagagtgactagatagaaatagacaaaaaattcaaacaatattgtacattttgagatacaagggtatccctatttatgttgcaatattattttatcaaagatggggaataacagagtgcaactgttaactgatagaatgaaatagctatgcaaagcccaaccaaaggaaagaaaaaaggaaaatacaatttttctatggggtggaagggttttgcatggttactaattacctattgcttaggggaaccaccttgtattaaaatatgccttatcatctatgtaaatattttagtactctttagtcaccatgttatggattagaactagattttaataccatcatttcatcatctgcaatgaaatttaaagcttaaacccgtagacttggcacgtttcttggaataaatttctttaagcttgaagtcgtataataaattgccaatgtatacaaaaaccagcctacgtattcacaaatgatttctattgattataacatagcttgctctccagcatatttgtcattataatataatctatcatctcaactaataagtttttttattccagccttctgatctgctgtcaaccttggtggaaacctaatgttgaatttgattctcaagttccctttctttgttgggtctttcggcattggcattccttccctgggaacaacctcctcataagttggatgaatcacattattgattggaatactcaaatttcttccatccaaggttgttagatgaactgtgtaaccagttaaagcctcagctagagatatcttctgtgtgacaatcaagtcatttccatcacgagtgaacacactatgtggcttctcatctattatgaacacaagatccgctggaacaatgtttggttgttcatttcctttctcaggaaaagtgatctttgttcccttcttccatccaggttttacatctatcgttagtatctcttctactttcatcgtcttcctgcatttacaagaaaacaagggcttagaaaaaccagtaatccacttgataacctgaggtaaaaaaccaaccaaaaaactacaaccgcattcattcattcatttattaagcaatacttccaatatgaattgtactaattaagtcatgccatccaataaaaacgttgcatttggacactatgcggatattaacacagaacatcatagttgatcaatatttggcacaaaatatgattttgttatatttttacatcaatttttactaaaatgtaatatcatttaataatttattaaaaatataaataataataaaagtaaatacaaaatttaataattatgaaaatgagcatgcaaattatgatgcaaattttacatccattctatattgtgatttaaatttaaattagtttttgttatatgacaaatttttaactaatgtagctcagtcgtaatgaatgattaaattggcataatcctcacttcccaactgagagttaacaatctaatatcgatgatgaattcaacaaacactaaattgtcaaaagaagcagaatacaaagatttaaaagacttacccactaacatcaacaatatctctagagatcttcatcttctttgtagttcccttgtacaggtcttcaaggctacaaggcagcctattctcaatcggagatgctttcctaggggcaccatggttcatggagccaccgccaccacctccacctccttccccaaacgatccaaatatgtcatccctgaaaatcccacttgaaaaccttgaacccctc

SEQ ID NO: 161264 - DNA, 1564 bp, Cannabis sativa
aaaagaaagcaaggaccttgacgaagtcgtatttggaagaagcattacgagaagagaatctaacggaaggaaaggaggtattgtctttgttggcggcatggtaattttggttgtggtgttcatcgtcttggtggggaaacagtgcgatgcccttgtctttcttcatttatatatattaagtttgtctctcttcaaactccgattctgtgtttggaccaagcagagaagcataaggcgcgacccatgatgagaccgaagaaaagaaagtacttgattctcttctctctctctctctgttttcattcccaagtcccaactcgttctactctcgccacgtcatcacttgggccgtactagtggcgctcatttctctccccaatttctttttcttcataaattaaacaattttgtggagatagatattaaataccttgtacatgtgacatgtctttgttctaattcgggaaaaaaaataaactattatttgtcttataaatttctgtcatatttttttttaataatttcacaaaattattgattgagtaatgacatgcacctgaattgttttgaggctgtcaatgtcatctccaaccacaactttgtatataaaaaatcatatttttttctaaaatatgagtagtactaatggtaaataatggtacccttaaaaacatttttttctttcgcaaagtcataactcattaacgaaagactaagctaccacaaagggtgcagctccttcttcccaaatccaccagtagtcttagactaacacgaccactttgctaaaccattacaagatctttcaacagaaacaaaattacacaccgaaaaaccttgagaaatgtcagtaataaatctggagtaaaatcgttgagattgaccaatgcggaaagtgaagaaactcaaccaaataggcaaggcaagcatttaaaattgccagtgcctctgtttccaaagcactgagggccaagaaagcatcagtagccactttcaacaaacctccattcttataacatgattagtaccaagcaccacaacatgatttccacataagacattactactcccttgaacgctcaaaagcagtcgagatgactctatcaatatccacagtctttgcttcaaaaaccatctgatttctaacataccagatagatagtatcaaacaaagtagcagcaaagctaatgacctcatctccatcagctataaggactgctttaaacaaccagatagcaaacacaaatattttactgatgcaatttttttttatgtttaaacatttttcttctaataataaaaatttctatattttatatggtaatttgatcaaacattaaatattagtacatattaatgcggaaagaaagaatgaaagaaagtgaattatgttttcattaattcagtaaaaagaacaagagaaaagaggtatatatatataacacacaacctaaccgactaaaccagaaaaatagctgaacaatctaactaacttaaccaacaaaagaagcttacagtagtaacaaacaaaactaacagaaaggaaaaaacaaattaattctt

SEQ ID NO: 161265 - DNA, 9860 bp, Cannabis sativa
tttcttttagataccccaacaccgagttcttgtttctccccatagtggaaggccaagatatctactattgtcatcaactttcaccatttggagataattgcaaatttgatcctgcagggattgatcagtattagagctgaagaaaattgaggatttccccaaattcacttgttgaccccaggccatttcaatagtctgaagcaactgttgtattcgattggtttctcccatggtagctttgcaatataaatagctgtcatccgcaaaaagcatatgagatactctgggagccccgtttgccaccttacagccatgaatccaacctttcttttcaaacttgttaatgagcgcagaaagaccctcagcacataaaattaagatgtatggcgatagtggatcaccttgtcgtatacctctactaggagtcaccggccccatctctcttcccccatgaacaatctgataagaagtcgaagagacacacttcataataaggcgggtccaactacgatcaaatcctaatttaatgagaatagcttccagataaggccagtcaattctatcataagccttgctcatatctaatttcagcgctatataaccctcttttccttttctctttctctttaagtaaagcagaatttcaaaagaaacaaggatattatcagtaattagcctacctgggatgaaagcactttgcatatcagcaacaatcttgtccatgagtggtttcattcggttggccataacttttgtgataactttgtagatgacgttacaaagagcaatcggtctcagatccgccatacgagctgggtttttttttctttggaattagaacaacatttgcttgactacaccaattctcgaactcacccctttgaaagaaacgttgaaccgcttggacctttacacactaaattttaaacactatagagagaaggaaaattatttttctctcaagaacagttctttctcatgtgttgagaattcatcaagaacaaattatacactttatcctagtagcccacactacttcttgtgtgtggtggatcgatttggaagactactgtgtgagatttattagatataacttataagaaattttaaggatacccttatagtcatcaagagatatttatttctttcatgtaatctattcttaagatttaatatatatacatgtggagatccttgagactgtggtacaatgataattagataattattattccactgcgtacctgattcagtaccataaaaccaacattaccatcatgtaatttcatattcttaaattatgcaaagtttatcattctcctactcttttcgaaacctagtcattgtttctcaaatatgtcttgaaaataatgcctatgttaaatttcatccccatttcttctttgttaaacaccaagacaacaaccacaaaatcctcctagaaaggccgacttgaccaatgaatacatcactaaaatcttatttcatttttatttttttttctttttcaaattaaatatattataatcactttaaatatataatattaacatacataatttccataataaaaagaaatattaaaacataaactaattatttttctaatatttttttctttttatgaatctgtatccattcaaaaaataaaattagggtttctcattcctaactttatagctacaagaggttatcttttttttttttctaggtaggtctgctgaccttccctaagaataggtgtggcttggtcagagttgtgttttgaaattgcgattcaatttttactactgctattagtcttgtctctgtgacatggttttaagtgttttagtcttgtctatgtgaacagattttgagtgttttagtcttgtctgtgtgacatgttttgttttattttgttttgttgttgagtcttcgatggctcgccataaatcgttgttagtggttgtgaacaacaagttctctacgactaaaggggttgttagtagtcaagttaatgaccttgcacaatagttaagtgctcaagctacgtggttgaatgaacctactgcaacagtttccactattgtgtcttctgagccgtagatgaaactgaatataggtgttcttaagcttaactgtgatgatgtagtctttctcatttattttatttttagtttttttgtcaaacgatctgggaattaggcggttgaatatttggttcatttttctaattttaatcttggtggtgtctccaacagggagatgtcctgattggattgcatgctattattttagctgattgctattacactatagaagatgctctaaactcctttattttaaagtttctttaaaatttactgttagatcattttttgaaaatttagttgtcaaaatattttctaattaatgtgcatatttattgagcatttaaattgttcgtattacattgattttgtgcctctaattactcttctattctaaggaaagattcattctcagctggtctcttttgatttaggaaactttttgtaagagaaagaattctcttatggaaagttgtttattttttaggaaacttgactttctctttttctaattgatgatttcagttttgccttgattagaacagatcaagtaaactttatttggcacgtttgaagtccaaattcgtgatcttggtatattttaaaaagtttcctttttggtcctgatctgctgttgcagagcccgattctgatgctgcaaatcaagaaattttttaagaaagttttgtacagctggaaaaacatttttgtgactgtctctagggttgctatgttctataaatatgacctagagagcatccaaacgattttatctcttctagtctcatattttcatatctttctttgtgagaagagtgtttcatatgtaaaaacctagagtgttcaactaggttttgttttttttttttattatgatctcatactattcatagaataggttgaagagaagctttgaacaagcgttagtctttgggagaagactttttcaattcgcatttcaggaggaagtgagcatttattttcgggagaagatttgtttaagtcttactttaggaggaagtaagcacacatcaatagctgaaggaagttcactacttaatgtgttccagagatcagattagcaaggtggataacaaaggattgtcacaaatcactagagggagtctaaatttgtttaagtcaattgcttttataatatttgatactttactaattgatttcattctttgggcgtgactccatggactagtagtgtttgaaagaatactgataccacatacaattctcttgtgttaagtttttaaattctacactatttatttctagttctgtattgattctacaaatctatgttttgcagtgccatgattgtagtctgttgttgcagactgttacagttgtgtttttactgaaatttagcataattattggcatttgtaaaaatacgattttttattttctattcatgctttacatttatagaatactattcattgctctaaacatatcttattatttgtttgggttttaataattatttagtgatatattttaaagaagttgatgtatggtgcatgtaaaagtgtgttgtaaaatagagaaagtataattttagtgatgtattttaaagaatagagtagagaagttgttgtgaatactctaatattttataaatgtaaagcataaataatgtattttaaaaaaactttaaaatgaagaagaattttaatacaccagaaaaaaacagagcaaatttgactcggcacaacctaacaattcatcctaccaatgatctgtgcctagaaggcgtttctagatctctgctctagaaagctatataggcaacaacaaacacggtttgacccggggcttccctttcattacttctttcacgacaagggaaccgcgttcgcatcagtcgaagtggtggaacaccctcctaagtcaaagagagagcttccacacctctctccaagaaatacgattcgatatctaaatcgactgaaagagagtgaagaggcagctactctcccaggctccagcccacgggaaaacctcttctttctggtttacatcaagtgcattgaattccccacaatcagaataaaagaagacgggtcaaagagagattcgggacaaaaccagtgtagatctaccgcaagcatgcttttttagtatgatttttcaaattttgtaaaacttctctattttagagaagctcctacaagtgtttccacaaattgagagaataaataaataaataaataaagggaaaagaaaagttttattttatttttaattaatgagaaaagaaaagttgttacatgtgaattgtgattgttgataccgttaaacagtttccaataaaatctttgaataaaaaacatatttcaatcaaaatactgaaatacaaacacaactccttacacaaaccacttcaccatctctttctgtctttcaattcaaagttcaaattaaaatgaaaaagacaatttagtcctccaattaataactcgtctttatctatttttttcaccctaaacaaaaaccaaactaacataccgaacaaaaactctaaaaacacttcacaatttccaagtaaaaacattttaaaattaaaaaaaaagaaagaaagagaaaatctgtgatgagagagtgatgatgagtttcttcgtccctacaaaagaaaaagaaaaaaaaaacaagaaaacaatcataaaacagaaaagcatcttctctcgaaaaaaccaaccaatgtgtctcttactcttagctcactctttctctttcccttcttctttttctctctctagatcctccgtcacctccttaccctgacctgactcagctcttctactcaccccccacttctctacaatggaagagtcctccttccgccggaaacccagttcccgtcgggacccgcttgttcgagggagatcatggtgttgttctttcgctgttccgccttctagccccgatagtatcgccgtctttcactccaaagcggttcgtcatagcaagaccgaactggcggcctccaaaccgaccagtagctcggtccctaactcaccccaaagcgccaaatccggactagggttggtgggtcggatcgaccctcgtcggatcttgtctccgggaagggtttccccgatcgactctgatcctactgtagattcgatccaagaaatcgctagtactgacccatctgcggccgtcgattctgttcctcctgtgcgaacacagagttttcgtgctccgagccagaggttccggccggtccaatcggtccaaccggagagttcttccgtgggttccagtagcaatgtgtttgatgtgaggttgaatttgaggggaaagaaaggtgggttcttggttctggagctgaactcgggggttctgtgtgcaaattcagaggttttcgctggtttaatcgacgattataagaagggaatggtatcgaacagttcaccttctgagtcgaaaatttgcagaatagaggtgccggatgttgagaacttggccatgtttagagagacagtagaactcatgtttgaagatgatatcacaaaacgactgttgaggatcggagtatatcgagctattgatgtacttgaggtcagtgcttcatttgttattttcattttagttctttgattagttatctcaactttcttctctgttttgtttttgggaatttctctgcaactgtcctttggaaagcttgagcttgagtcttttcatcttgtttttctaaattgattgagcttcatttgtgtagttattaattacagagcttttaatcagatttttgatgagctaatttggggaatggagattatggtattttaattaatatatttctttgacagatttttgagttttctggtatgtatttgtaatagtataaatgtatgttatattacaccaaagaggatatatatggaagttagtgaaagtgtgagaaggttcaaattgggtagttttggctgaacaattttgacctaaccattcattgacttttgttttctcctaataaaaccaactgcatggcttacttagctatctctctttctatcactctctttttcgtcgttttcttttcccgaatgaagtcattaacggtaggtactgagggatttaatccttataatttggaaagaagacaataccaaatcctccataatgtgggagaactaattaataaggatattattacttgattaatttagtctggtcccaaagaaaggcaaattggtcaatgaaattaaagactgcaaatttgttattgtatttaaaagctgttttcagtccagtatgggcgaggcatttgattgagctgtgctagtgttaggataggagtatgtctactcctttttatatttaatattggcaataactgttatgactttcttggctgtttctttcacagttggaacctctactttatatgttaccttttcattaatgtttgctcagaagttttaacttgatttgaaggtggatgaatagtaattcttatgcacttgacacaggtattattatttggtgacatcaacatcacttaggaacacatgctttcatttttaagttgatattcctcttgatttctttctacattttatatccatattgggtcggatcaagtgaattttgtgtgtgtgtgtgtgctgttctttcatttagttttagtgactcattcaagcttttccctcatgccacttgttactattttatttgctgaccccatcagctaaaatcaagtcttgtcatcaacctcccaaaaagaagtttgaaaattgaatgaataacggtgaactcccctagctttaaaccactactgtttaattttatatagttgtggattgatttgcataaactgcataagggatctacggattatcatcaaaatatagatttccatgttgaaatgaagtgtcactattcagataaattctttttccatttcttttatggagtcaaacatagttacgtagttttgagcttgctttgagcttatggagtcaaacatagttacatagttttttctttagctcttcttcccaatgctagagtgtttggtgttagataaaatgtgaagtgaaaatagctttaaagattgaagaatatgatagataaagctcaataaaatgcagaaatgaataacattagaagtagaataagatggatgaatagtcagtggtattgatttagccaagatttcgagagcttagttctccacaccagaaaatactctctactcactatttattcttacattaatcctcaccacaagagctgcaccctaggtacacaaacacccaacccaaataactaactcactgctgcacttttccctcagctgagtcagctgttgatgtggctttcttgtttccctttcttgcttatacatacgtgagatgaggcttatcagaatacacatatcttcataaagaatttcacctatatagatatgtactacacaacatttacacttcttgtatttcttgatgtgtgtgtagtgtttacatatacgtatatatgctttgtttctatgattccaatatcttgaaatgaagtcaccaagaagaatgttgctcttcttatacacaattttcggttacttggtacaaatctacaagtttttgttggggggtggagatagtttattgcttaggactgattttattgtcacttataacactttttaatcaagtctttgttatcattcctcaacttacgcttctgtacaccctataacatagtaatatagctcatattacttaaaatatgatgaccctagtcgatgaagtttttaaaaccattgatttatttccgataatgaaatgttagatatttatagagcatcctctatatttggagtgatgcagttagtttacaccttccccaaatatcttatattaacttgatctgttcctctaacttagatgttttcttattcttttaataggtttctgcaggtattatgttcaataaaggtgttttatcttgcttaaagtatctcgaggctgttccttggactgaggaagaagaggagaaactaagggatctctttacaaggtttaagtttgatgatgttacaaccaaggacatattggctagattgtatctacttgactcggcagattcacaacaaaatttatcaagacaattggtttggtctatcacctctagtacggaagctagtgcaaggaatgagatgaagacattagttaagggtcttctttgcaaaagttcagtctatgagaaggaatatcctgacctcaataaggaggatatatatgctatttgccagtcatgtctcgactcacttgtcagtctgtttaaggagacctctgaaactgtatcttctaagaaattgatgaaggatgcagggaagcctttaattgaacgaatatccagacaggttgataacataaactggttactggaaatcttgcttgatcgacaaatggctgaggagtttgtggatatgtgggcaaatcagggggagctactcagactgcatgagaatgcatctccaatggtcaggtatgagcttagtcgggtttcagcaatattattcattgctatggggacccgaaaacttcattgccggacagaatcaagatcagggcttctccaagcatggtttggcccaatgttgttggactttggttggctgcagcgatgtagaaagggacttagcatgaaggtattggaagaagctatgggtcaagcactccttacccttcccttgaaacagcaatatgtgttgtttatggattggttccgagatttctccaagcatggtacggagtgtcctaatctcagcaaagctttccaaatttggtggcgccgatcatttctaagaggttctgaaacatatgccgtggaatccaggtaacacagtacaatatatttctgcttgcacagtatgttagttgtggaggtgaagagttctgaaatatccgtagaagtgaatagtgtagatcaattatgtaggatagttgtaacagttgtgaaatggcagcatcttttctgtgattatcttctttgccttcatcgtcagtcgtcagcaattctacaggaaattaaagaggccacaaatgtgtagttagttggagaagactctacttgcagttttctctcattggcttcttcaaacaccgtgaagctgtcccgggcattttggctccattccaaagccggaaaactaatgtaccaatgaaacttagttgctaagttcatatcagagaagattttaacgacttttatcttccttagtaataattgtcattttttgttataaagataaagggatcatgtttatggcatggcatggcatgtatgatgtatgtgcacattatctgaaatcgttgtgcttgtagtattaatgaaattaaaagtatataattacttcttaacaacttgacgaagtgtcacttatgataaaaaaaacacttctgctcataatttttcataaaaattgctttagaaccttcttgtactctggactctagcaatactattttggtgaattggaagacttattttgtaccctagcaattcttaacatgaataggtttcactgtttcagtaagccattaattgggcataaggttttttatgtaatttattcaaaacttattattgagaactaaacaaacgggactaacactctaggttgacacacgtgctttattgtctactcgcatggtcttctctccttcagccaactttcttgaagaattaagtattgcatagaagaataaatataagaaatttttacactaaaaatacaaaatacatattttattactaaaa

SEQ ID NO: 161266 - DNA, 6677 bp, Cannabis sativa
cttcctcgactcatccgacgaagaagaaaaccatgccgattccctcgagtctgcctccaagcgcctcaattacatgctccaattcctagaccgaaagctccattctcatcattccaatattatttccgattcgcccactcctccaactcaaaatcaaactcaaactcaaactcaaaaccactctcctccgctccctgagttcgttgccaacggcggagcctctggcatcttccgccttcctcttcgcgccgcagtacaccccaaccgccctttcagcctcgaactcaggcctcacccgcttcgggaaactcagattggccgcttccttcgctccattgttgccactccctctcaactgtgggcagcaaccgagtgcggccttcgcctttggaaattgaacaatctctacgcttccggtggtcccgaggatgcgctgccatttctggagtccgtgggtacttctcccactctatgcttggtcgccgatcaggggtcccgggttgtctggagcggccatagggacggtaagattaggtgttggagaatggaccagaatcatcagacctatttcaaggaaagcttgtcgtggcaggctcatagaggccccgttctctctctcgttatcacagcttatggtaattcatctggatccctaattttgtttctttgcttaatatgaaaattgtgaccttgattttggtgttccttccattccaggagacctgtggtcgggttcagaggctggtgttattaagatatggccttgggaagctattgaaagatctttgtctttaactgttgaagaaaggcccatggcagcactactcgtggagaggtccttcattgacccaaggggccaacttgctgcaaatggttttgtcaatgtctttaattccgatgtcaagtacctcttgtctgataattccagagccaaagtctggactgccggttatttatcctttgcattatggtacgcctacattcctgcatctctatgaatgtcagtttcctttttcatcaaataaatgtctgggaagttcttgacaaacaggatttatattatgggactatgaattttatagtacacacaaagaatatgttcctgatgatttttggatgaacacgattaaaaagccaaacttagacactgaatttaatatagtatactagtttttatgttgcagggatgcacgtactagggagttactgaaagtttacaatacagatggtcagcttgaaaatcgagtggacatatcatctgtgcaggacatttctatagactttgcctctgggtcgaagaaagagaaaacacaaaactcctttgggttctttcagcgctcccgcaatgctataatgggcgcagcagatgctgttcgtcgtgttgcagcgaagggtgcctttggagatgacaatcgaagaacagaagcaatggcgatagctgttgacggtatggtgtggacaggatgtacaagtggttcgcttgtgcaatgggatggaaatggcaaccgcttacaagattttctttaccattcctctccggttcagtgcctttgtacctttggtatgcgattatgggtgggttatctaagtggcactgttcaagtattggaccttgagggtaatctgcttggaggatgggtggctcatagctgtcctgtgataaatatgactgctggggcaggttatatattcactttggcaaatcatggcggcatacggggatggagtgtcacattacctggaccccttgacaatatagtgcgttcggagttgactgacaaagaatttttatatacgaggattgaaagtttgaaaatattgaccggtacatggaatgttggacaaggaagagcatctcgtgactcactcatatcatggctaggttctgtcacctctgatgtcagcattgttgttgttgggttgcaagaagttgagatgggagctggctttcttgccatgtctgcagctaaagagactgtaagttgttgtatgtaaaaaaacaaatgttatgaaactttgttactttaatgcttccatcaagcacctcttgcccttataatttaatataaaaaatcacgaataatttgattcctgaatcttgggtaaagaatatatattttgattttatgcaattaaattgagaggtgaatgctcgactaatcacgtgttctttttcatagaattaattaaaggaataaaaatatgaaattgtaacatgattatatattcttttttgtattttttggtgaacaaatatatgtttctctttatagtcaattttcttgtttcttgattgtaggtgggtcttgaggggagttctgtcgggcagtggtggctggatatgattggcaaaacattggatgaaggatcaacatttgaacgtgttggttctaggcagttggcaggcttgcttattgctgcatggttggtattttctatcaaaaaatcttctgtaaattgttattgttattatgtttttcaatgtctcagatgcagacttaattttgcgtcatgtctcattaactctgtaatgatcttcaacttcttaattactgtatgtctagtgaactgtggtgagttttagttagtttctctttaactggataaatgaaaagatgagacaaagatctaaaatctgttttgggttaaaaaaagagaaaaaacaaaagaagcaaaattgattagagttgtgaaacaattaagtgtgtggataaatgaaaagatgagagaaagagaaaaaaaaatgccaatagaaaccttatatttaagatttttttttgttatcttctttcaatgcttttgcatttagcctactttatgtttttatggtctgtttgcctgttaagattttcatcaatgattattgaatttcatcttttagggtaagaattgatattagagcttatgttggagatgttgatgcagcagcagttccatgtggtttcgggcgtgctatcggtaataaggtaggatctgtctgttcatttgaatgagatgattgtgatacatatgttgttataacatttattcatctaaagacttgatggtttcctaaaaggttgctctatctatggtttctgattggcttatagatctatatatgttcatgtatgctgatgcatacactcatcactcaaattaccttttgtctaaatagaaattgatgactcttgttttagggagctgttggtttgaggattagagtgtatgaccgaataatgtgttttgttaactgtcactttgctgcacatcttgaagcggttaatcgtcgcaatgcagactttgatcatgtataccggacaatgtccttcagtcgaccaacgaatctcttcaatgctgcttctggtacaatactgtacctattcctgttttgttcacttgccttctcaatgtatttattttggcttgtttatagatctggattgccattggtcctttctgttgcagctagtgcttcatcggctgctcaggttcttcgcagtacaactgtatgtatatcatcgctgtagtatgctaaatcggtctgagttgttattattattatttttcaaagttaaatagtttcggttcatttgatgaagcattgctgtcttcagattggtgttgcctactctgctgaagggatgcctgaattatctgaggcagacatggtcatatttcttggtgatcttaattatcgattagatggtatatcttatgacgaagctagagattttgtgtcacaaagatgttttgattggcttagagaaagagatcaacttcgagcagaaatggaagctggaaatgtctttcaaggaatgcgtgaggcagttattaggtttcctcccacatacaagtttgaaagacaccaagttggtttagcaggtaactttttctacgtgagttgtattgtgtttgaatcgaattaaatgccaattgaactgttcgaaagagtgggtaggtcggttcctgctgtagagcttttcactgaggctgataaaaggcttcctgaaataatggacttgtttgtgtatttttgtagggtatgattcaggtgaaaagaagcgaatcccagcttggtgtgatagaataatataccgtgatagccgttcatcctctgcctcagaatgcagtttgaagtgccctgtagtttcctcaatactgcagtaagtgattcgaatatgaaacatgattttttttttctcaattacaaacaataaagtttaaacacaaatggtttttgtcttttttttttttccaaaaaaaggaaaaaaagaaaggggtatgttatcttataattctttatttgggtctaagggcatccaggggcgccttagatcctcctatataattttttttttctggtttacgaggatgcatttccttattctgtatttattagaattgtcattgtcaaggacatatttattggttgcatgtacttttcttaaaggtcatcagttttcattctggctaagtctctagctgtttaattcacatttaatctgctcactttttgattttcaaactttaaatcattacacatcacatatgaagggagggaataatatagttgagaaaaaagaatgctcaataattttgttaaaatctcacgtgtactggactaacacgtatgtcttttctagtcctgtctatgatacactgacaccatggttttataattaaatacctgccgttgcctgattgataggtatgatggttgcatggatgtgaccgacagtgatcataagcctgtccgctgcatatttgctgttgatatcgcaagagtcgatgaatcagttaggagacaggaacttggagagattcttggagcaaataagaaagtcaaagttatgcttgataaactgtgcaagatccccgaaacgatcatcagcacaaacaacataattcttcaaaacaaggacacatccatcttgcgtattaccaataaatgtggagaaagagatgcattatttgtaatactttgtgaagggcagtctactgttagtgaggatgggcttgcatcagatcattgtcctagaggttccttcggctttccccgatggcttgaggtatagcttgttttgattttaaaaaagaacattggttatatttttacaggttcttatcttattttgttgggaggtcaacataatgtccatatttgaaatttctttcaaatccatccacaccactggggctgagaaatatttgtaaaaaaagtttagaaaggggtaaatttttaatttaactaacattagagaggaagagattgaggatttgtgtaatttttaatgcaatactaagatggccgatagtaaattacaactttctttctgtttatgccttgaacataataatacatatacataaaatgtaaatgttttaaatttgaagctgtagtgtatatcactactggaggaatatgcttgccacaaatttgctaatatgttatttattttgcgtgggattcaggttatgcctgctaccggcattatcaaacctgatcatattgcagaggtctctgttcaccatgaagacttccaaacacaggaagagttcgtggatggcgtccatcagaacagttggtgtgaagatgccagagacaaggaagttatattggtggttaagattagggggagttacacgactgagtcaagagatcaccaggttcgtgtgcgtcactgcttttcatcacgaaagcaacaaaacggacatgagaccgaatccaaaaaactccaaggaacagtcctccaccgatcggatttgcaacatcttagtagttcctatgacgtggtcgaccacttgaaagacatggttgacaacctacaaagcatgcacagtccgtaaatgaatctgacgaagaacagaaagaccggctggccaagtgccattttttaagcatctgataagctttagtcgccagttgcttatgaagctaactctttattatttgttgagtaaaatgttctctcttttttcctttttctccctttctattctaatctcttgggctgattgattttcagtattaatttaattgtacaggaaagacaaaattagtaaagcttgcagatgatatgattgtttgtacgtttataatctattgtgctatcaatgaatgaagatagtttgttcttgaatttaacttttattaaaaaaagaaaataaggtttaggacttctgaaattgatttattacataattgggtattaaagaaggttattacctgcaaattatttttaaatgatgagttgctttttatcattttgaccaaatatgtttgtatcttaagattctctgaaagcacctaaataataaatattcgtccaatttcgagacgtgttgaaggagactactagacagaacaatgttattctggtagttgactacaactaaaaaatctcatgaatcacgtcatgaaatttgcaattttttttttaatttttttaaaaatgattcattccttctctaaaagaagcatttctttgatagaatttattgggaagaaaatattagattaggtagtgaatatgaagattggattcacgtaaaatttggttaaaatattctctaattcaaaaatttaaattattcttcttttcatccaaagatcatgaaatttcacgggggcttagccaagactgttgtgcatcacttttctcttggacaccttaagagaaaaattagttttcttg

SEQ ID NO: 161267 - DNA, 9751 bp, Cannabis sativa
ttctttctcaataaaagtaagtgcaagaaaattcttgttttaggcttttatacaagatcattgaatggtttattatgtggaatgtgcatgcattgtgagattagggttgtcatgaatttgttatacaccatcttatccttataaatagaatttatccataagaacttttagtaaataatgcatatgtatttgggtattttagtatgactacgctgtgtgagagtagctttgttacgaatccattgcatcttgagttgtccttattagtagattttattttgtagaagaatgtgttgtctgatgcatatgtacactaggatgttttggtataagcattcagcgtgaatgttttgtgattgtcacttttttaattcattgcatcttgagttgtccttattaatagattttattttgtagaagaatgttttatctgatggatatctacactaggatgttttggtataagcattcagcgtgaatgttttgtgattgtcatgtttttattacaccatgctatcattgaaatagattttatttataaataacatgtttctattgcatatgtggttggatattttagtacagaggcaaactaaccttaccttgaaaaagatgaaatgttgttgcctttttgtaatttgtaaagtttctattgcttgtgcgaacagcttgttttttttttcctggaaccatgggttattgcttatgcagttaaatgatttggctttaatttattatgtggtttcatgtcaaatgtgctgtagttccttatatatatgttctgaccttctgtctagttatgttatttaagatagttctatgattgtgcctatttgtctagagcttgcaccaattatagatttagtttatttacatagtatgcgaacttgattgaatatgtttccctttccattgaatattagtttagctgtcaacttttatttaactaaaatacttttgtattctgtttcaggttaatgctcgaatattgtttattgatccttcaagtagagctgttggtttgactctgaatccacatcttgttcagaacatgtctcctccgtcagtaagttttgagccaatttactttacatggcttgcaatcctttcttgtttggcatccttgtatgaaacatattaatccttttccctttaaattgaattccaagagtgatgatttgttgcttccctttaatatgaactgttgagcctcctgggaattgtactttttcactgttttactagcttactaatacattatggatatggaatttagattgtgttgtcactgcttgcttactatctaacttgctgttatcagatatagaattatgaatgtaatattttctaggcctagcatttcctgagaaggttttttattatattatattcaccggctcaaaaatcaaaactccatttgcttaaacattcttttcagttttgcttgctctttctttgagggctggttccagtgtatataccactctctatgttgtccaatgaaagttaataatgagtgataagagttttgtatcttattttttgtatgcagcatgttaaagttggagatatatatgaagacttgaaagtggtcagagttgatagagggttgggtcttctccttgaaataccaacctcaccggttcctacaccggcgtatgttagtgtatgtgctttttatctcctctatttctttatcttttgaagatttcttttgtggctttggttgtaaagattttcagttttcagttctttaacctttttatggttgatttcagatatctgatgtgacagaagatggaattcataagcttgaaaagaagtttaaggaaggtagtcgcgtccgtgttaggattctcgggtttaggcacttggaaggggtggctactggaactctgaaggttttttttttcctctgttaacccttattttttaaaagagaaagcatgtaatattacggtaacaatctgtctttaagttgtatagatatatatgtgtgtaaggttgaaatatcaaacgttatgtgtctatattatatttgatattggtgaagccatctgaagaattcacgctgaatatgctaattgcttttgttatttttgtcttgttatacaatttatgtagacgttaacagagctttatattttctctcccaatataatgtgtatatatgtgtactttttttaaaaaataaaataaaatgtataaatgttataggctggtgctttcgaagggtcagtgttcactcactctgatgtcaagcctgggatgattgtgaaggccaaagtaatagctgtcgaaccctatcaagcaattgtgaaattctcaggtggtattaaggctctttgcccacttcgccatatgtctgaatttgaactttctaagcctggaaaaaagtttcaggtacttctacattgaaaaataactaatattttatttgattttattctagcagattgtgtaaaagttctctgatactgtatgaatggttccttaagtttgtttataagtattgagctatgaacatatatccttgtttgaatcactcggcaggttggagctgagctggtgtttcgtgtacttggttgcaagtctaagaggataactgttacacacaagaaaacactagtgaaatctaaacttcccattgttagctcttatgctgatgcaattgatggattaataacacatggatggataacaaagattgaggaacatggatgctttgttcgattttacagtggtgtccagggatttgctccaaggctagtcccaattgctaagtttatacgttttttgtttgtttgttagacttactgattattttagcggttttgtatctttcttttcatagcgtctgttgatggttaccctagctatggctcgatatgttagactggggcatattctttgcattctatgataaaaaccttgcaatatagtttgtgttcacatctgccttttctagctcactcactataacaaccttgcttgttgagaggaatcgtagttatcgttagatatgtcagaatgagcttgttcattgcattctatgataacaatgtagcaaaaaaattgtagtttaacagcataatttgttggagcattaaaagtttatgttaacagttgtgttttctagctaactcagtataacatgcttgcttgctgacagtaattgtaggagttagaatttcacgtaatgtaaatcaaactagaaaagtaaatgatatcctgagagttactttatcggctttccctttatgacacgcggctagcatggaagatatcttacattaaatactagtcttgcagctgtttttacccttctaggtacatactagttgttgttagaatgtaggcatacagaagctttagttcttattgtgaatgagtttggctgttcttctcctgttgttggagctactgtaactaactccatttttcatcttcttctgctgctgtggttaattttttctcattttgaaccagatctcaactcggtttagacccagggagtgatcctagctcaatatatcatgttggacaagtggtcaaatgtaggataataggtcctgtttcaggatcaagacgcatcaatcttagtttcataataaagccttcaaggtttgcttctctacagtgtaaataatagtacaatctggaaactccaacagttgtatgccattgaatagcttaagaagggggaaaatgttggacgtcctgtgacaagtctcctttatcatgttttcagggtttctgaggatgatgttatcaagattggtacacttgtttcaggaattgttgatgtggtaactccaaatgcagtagtagtttgtgttaatgggaaaaattacttgaagggtacaatttcaactgaacatttggctgatcatcaaggtataatatttttatctatttatggttggagcatttttcagtctttttcttgttttgaatatatatgctgatcgtatttttatcaatgtagggcaagctgatatgcttaagtcagtactaaagcctggatttgaatttgatcagttggtgctactaggtagaacaaaagctctcttcctttcctaccattcttaatattcatcttctaccacattttaaaaggacttcaaagcatgtgctcttaaagaaattgacacaggaacttatatgaaataattgaaggtttttttcctcttttactgcactataaacttcgtatgactgacattaatgttagatattatcttctttttcattttgcaataatgaagataatgaaagcaacaatttgaaactctctgcaaaatattctcttgtcaagtctgctgagcagcttccatcagagatcagtcagatccgccctaactctgttgtccacgtaagtaattgatttaattatgattgtatggtcgtctaaattttctttgttggaaccacatctagtaaaaagtataaatattcaatgtgatatttcttttgttaaaaaaaagtttgatgcaggattatcaattggaattcgaaatctaaaaatactattgtttcctgactaaatcataaacattgaatgtgatatttcttttgttaaaaaaagtttgatgcgggattaccaaatggaactcgaatctaatgatactattgtttcctgactaaattaaagtttataatctcattaggtgtcttacatcaatttggttttcagtgttttttatttacaaatctttatgtttgaagcagggctacatctgcaacctgattgaaactggctgctttgttcgctttcttggtcgtttaactggtttctctcctagaaataaggttgtcttcactttattttagttttcatcatttccttttaagtgatgagcgggcactcaaatgcgttgtgttttttaggcaactgatgattacaaagtcaatcttcctgaagtcttttacattggacagtccgtgcgcagtaatatactcgatgttggtgacctctttgagattatatcattctgaattgtaacctttcaaaacattttatgattatcattcatcatcacattgggtttattctgcaggttaatagtgaaaccggtagagtaacagtttcattgaagcagacatcttgctcttcaacagatgcatcattcatgcaagatttctttcttttggaggaaaaggtaagcttatttgatgctattggatattcttgttagctgaagcttctgtcctttctgtataacttcaacacagtctgaggtttgagccctctgcgagtgctcacaaaaaaattctgtagtttctaggtatataaatattgttggcctggggagcctagtttcttttctttctttcatttttttaaagaaaaataaaaaataaaaaggaaaagctttgaacaagttgttatgtcaatataattgtattgtattatatacctatacttgcgtaactatgaacaagtaagatgttatgtcaataaaattgtagtgtattatatacatatacttgcgtaactatggcctggtgttattattgctggatacattattcagattagataaaatcttctaatatgcacccatatactgcttgctaaaaactttttattcttcacgtactacttacataagaattctaatgtctagctttcatttaggatattcttaagattaccttgctagctcacaaagacacgtatcatttctcaagtataaatggactatatcgtttttcagtgtttatgtatattatttgattgcagcaaattagcaataccttttgatttttttccttgctttctttctttcctttccctttttttttttttctctttttgccctgcgatcagggtgataattgctttttttttcctttttattcagggacttaattctacattacttcgtcaaagtttagatttatgcatattatagttttgatcatgtttttttttattattatttataacagattgccaatctacaatccttgggttccaatggatctgagttaaactggactgagggatttaacattggctgtgttgttgagggaaaaatacaagaaacaaaggatattggagtggttgtgagctttgacaagtataatgatgtcttgggttttataaccccccatcagcgtaagttttcttctttcactgggctgtcatggtggtgtgttgatttgttctgattcgtgttgtgtttctttctctgtatgaattttgcagtagctggtataatagtagagacaggctccattatccaggcaactgttctagatgtttcaaaaatagagcatttggtcgacttgtctctcaataaagagttcattgccaaaagcagagaagaaagctctcacagccaaagccataaaaaggtttaaagcagttacattttgtctatttacgttataaaaaaggcctcaaaccttatgccttagaaaggcttacacctcacatataattcttattttgggcctttatttttgattaccaaaacaaaactagtctaataaatattgcattattatgtttggtgcagcaagagtgactcctctatctaagtactggacttagaaattgtgcctagagtagtaatttattcataaaatctaagtgttagttagaaaatacctcgtgaaattaggctgctagttcaagcatttagtagattttatatatgtatatagttatcatttgttttatgttattattatttttgtttattagtgtttaaagtttataattttaaaaaaaaaattatttcaacatagatttgaggcatatgcctcaccttatcaaggcaaaatgctttgatgcttatgttagcttttttaaatattgcattgatcttgaatatttttctttcgatatttgttttcttcatgtttctattctgatctgttggtggcttagactttctttgttcattttggccacgctttactctattgttaatctaaaactgtctgaattctagaagcgtaaacgacaagcatccaaggacttggaggttcaccagacagttaatgctgttgttgaaattgtcaaagaagattacctggcaagtctgctttatttgtttatcttttttagtctacatatctatattcttcaaccccttctaaaaatgttttataatgcccattttaggttctctcaatacccgaatataattatgccttaggatatgcatcaaaatctgactataatgtccagaagtttcctcataaacaatttctgaatggacaaaggtgcgctctattactttcatcttttgaaaccacagcatatgactttctgaactatttgacatattttgagttcaaaactatcctcttgttctcgagtccttttctgtgtacttgattttgatgtatgaatgtacatatccaatgctgaatatgaatgacatgatgactggcttgctacatgtaattgttacacttcatgcagtgttgttgccactgtcatggctcttccaagcccttcaacagcagggaggctactgttgcttcttgaatcgatcagtgaatctgaaacatcaagctcaaaaagagcaaaaaagaagtcaagctacactgtgggatctcttgttcaggcagaggtaagtaaacatgattctttccctttttttttttctttaccagttggcactgattgattctcaatgaaagcacaaagagttgtttttctgtagctcaatgtacacaaataattattagaagatatttttatgtcattctggttcttcccagattactgaaatcaggccacttgaactaaggttgaaatttggaattggactccatgggcgtgttcacataacagaggtaaaacctcttagcatttgctatttttgcatttttattgatctacaattatttaaattctcttccatcttattcatgttcctttgtcactggttgatcaaaaactatgtcctctgggcaggtaaatgatgataatgtttcagaaaatccattttgtaactttagagttgggcaaacagtgaatgcacggattgttggaaaggctaataattcagatagcaaaaagaatagctaccagtttgatctttccatgaaaccgagtgttctcacaggtaacatagatattgagatttttgtgcaaggtttttttacacttaatactattttattgttatttaacactagtatattaagttatgtcttttgctattaagaaatttattttaaaaaaataactattgttgactcagatcagagattccctagttgtttcatccgcataaatgctgatctggcagataaatgcagttatctttaattggagctttcctttactgcttgcattacttttcctaatctgtgtttttctaatggattttggctataaataaatatatatttattgttaattatttttgccaaatggtatttaatgtgaaattctatcacttatactctcttacatttaaatttaaattcaggctcctatgaaacagaggagaagcttatgattgaaaagtttgatttctcttctggacaatttgtcactggttatgtatataaagtggacagtgaatgggtgtggctaaatatatctcgacatgtgagagctcaactatttattctcgacacttcatgtgagcctagtgaacttcatcagttccagaagcaatttcatgtgggaaaagttgtatctggtcatgtattaagtgttaacaaggataaaaagctattgcggcttgttccacatagtttccctgataaagcttcagctggagtttcaacgatagatgataaacaagcttccgtttcaaatgaaaatgttactgctcatatttgtgaaggatgtattgtgggtggcagagtatccaaagtacttcccggtgttggtggattaattgtgcaaattggtcctcacacgtatggaagggttcattatacagaacttactgactcatgggtgtcagatccattgtccggatatcatgaaagagagtttgtcaaatgcaaggtccttgagatcaaccaatctgccaaaggaacatttgagattgatttatcattaaacttatcaacgaaagacattatttctcaacgtccaaatgattcttgcgaaaatatgtaagttatctctgtatttcaatttacttattaatgtatatatggtgcataatatgcttatttagggtgacatgattatatacattgtacatttccatgtcatataatatggaagtgataaatgaattgttttttcctctctatttgatacttttctttttcaaattttcattgtttgcatctggattccaagaatcacttataatattattaaattgtgagatattttagtggagtccacatgtcaaacactcttatagaagagaatgcataaatagtattgcttgcactttttcttcagtagcagcattatacgttgaagacttgtagtctttaatttgtgtctctatgtcatggtctagactagaaatcttttagaagagtagaaatctgtcttgtcttgtcttagttgtttccgtgaaattaatttggtggttgctaaatgaagaaactcttgaatattttcttagtataataaatcaagttcttagcttctgtctggacttctgtggcaattgaatttaaggattaaataactctttacttggaaaaacagtttgtttagtaatgtttacaattgttccgtttcaatttgttcaagttttggggttttttgtttgcagctcaatctaatttagtttttttttttttt

SEQ ID NO: 161268 - DNA, 5822 bp, Cannabis sativa
  modified_base (5765)..(5777): a, c, t, g, unknown or other
aaaaaaaaaaaaaaaaagtaactacaataattactataatatatatgtatacaaaagtttggtggaggttgagaaaattaaaaattataattaatacttctcttagatctctttcacaagattacaaattcaattctcctctcccaacataaagaaaaagaaaatagtttagcttagattgggatattgacggcaaaactatttaaattttatatttttaacatttaactacataaattaatttttcgacggcaaaacctactgaacttatattccattttgttctttacacttccgtccaaaagccttcaatgagatcaaaaatggcctatctcaacaaaggccgagcgaaagaaagaaagtgaaagggagatggagagagcaaggtttgcctaaggtgagagtggtgaccgaagatggtggcttcagtccgactgcgacacaggcatagtgaaaaccaaagagagatatcgagagaacaagagaaagttattagagcttttttgaattataaatatttactttttctgtaattttattatttatttatttttatattttaaaataatatcaaccacttaaattttaccttatacattgatgtacacatcaacaatacaaaaccaaaatagaagtgcaatttaagtacttttgccattaaaaaaattaatttttttaattaagtattaaaaaatataaaattcaaaaaaatttaccgccaatatcccttctgaattttaccaatatattaataaaaaaatattctataaaacaccaaataactgcacaagaagattgacaaaatcatgcttcatggatacaatatccttgataaacaaaagtacattcaataagagattagtcgagaatcattcaataagtttgtaaggaaaaccagcaaaaatctattctaattaattacaacaatgtaataaatgcaacctacaaagtgcgaggaagccataagatttctgaatacacttgggatttgtaacacaatttctctttcaatgaagctattattccgcaccaaatcattcaccactcactaccatattttgccttcctactcagtgctaacataaactgcaaatacagaccaaaatcgatataccattgtcgagcatcatctgattagccatttaaaatttcgattctatgaaagccatttaaatccacacctgttttatcacagcttctcatcatatgatcttattcctgatttcttcaagcttcttaagaatctccccaggagttctgtccagctcatctgcaatttttctttgcaagtccatgggtaatgtcggaaactgctcgcataaatcaccatcaatcacatcctgcaaaattattatagcttgacttagagcactgcagctaacccacatgaattgaagtaatatatgtgaaagaggaagataaaattttagttatcatattaaaacttatcaacagatccaacattaaactcctacatttcttctgtagccataaaccaagagtggccttactactccatcaaaacaagccgggtaggcaggtataaatataatagtgaatcattaactaaaaaaacatgaataaatagataacatgtactttgaacgcatgaacagaaggcgattgcatatcagtcaacttttaaggaaaaaattatttaccttaaccggaaaataagcagatctgtaagccatgtgatcccttccacataagggcggatgttcctgcctcatatgcatctccaaatgagaaaagaagtcaacatcatcacgagaggtgaacgtaagcagtgcccccaaactccccattactgtcccataaatgaggcactccccaccacctggaatcagagaagccttctgcaagcaagtaaccacatcaccaatgtggtactgcactatctcctctaccttgttgggtgctccattcaacttcccttgctcccactttatcctcccaccagttggatcttcctcaatctcatctgaaacatcttgcgataatcgcacaaaatagacattaccgaacttatctgcacctgccattgtatcgaagtctatgtggtgcgatgcagtcagccatcttgggacacaatcatcagcgaatatatacagttgattctcatcccgcctatacttgcaataatggaacgactgcaagaaaagagacaagatgtagttggttggttagtgtgaaagaaaataggcagaaaacagtgagcaatttcaatctcaaaattctcaggaattatgcacctaagaaaggattaaagaatcaacatacctcctgaatgtcaccaacataaagtcgatctcgatatgtttgaattgatacaattgtgtttggaaacagcttattctcgcattttctaagcaacctcttcttccccaaatcatatagtctgagaactgatcctattccagcaagtaatcttccctggaattggcacaaagcaagcggaacaccttccacctgtgtcttgtgcagaagttcaagggtttttccatcctctaaaaacctataaatgtgaatgaatccagcagttacatttctttttgggaaaaattgcagtccctttgctgtgccaactgctaaaagagtaccatactccttatcatgaaaattcacagtacatatgctgaatgcagcttcattctcctgaagttccaataggcaagttgtgcttgatgtctttggatcaagaactctgatgcaagaaacccatctatcagactctgccttgggataaccataatgttcatcagaaagaggatcatccttgtcctcatcatcaccattttccatctgctctacattaccatttccattttccccagctccagcagcctcaaaacactccttttttgcagcttcacgctcttctgcactgaaagctccttgatcactctcaatgatgaccagcaacttacgcttgggttgaaccacaaactttctgggagtgtaccttagtggaattacagtttcattgaatgtttctcctaacctctcaatagtaaaaaccctcagagcatcacccgcaacagcaaccacaccttcagcacactgatcagatgaaaatgaggcagcatattcgagggtttcataggacaggggtgttaagagaaaatgcccttgatgaatataaccaagccaaggccgactcgacaaacaaagcattgcccgtttgcctctaacaataatggaaaagagttttggagctctcaaacctaagaagcgtgaccgagaatcagaaagttgaccggtcaccatatctaccacggttctgaacaaaacaccagtgcgtaaaccagcattgaggaaaaggctagcaggatgatcagcaccgtcctctccaccaactgatgcctgaacctcaagaaaaagaagagattctggagttgaagacacactttgcacactcagaatctgcatacaatcatcaggatccagtgacaatatacgaattgtattgtcataagaaccaacagcaagaaatcgagatctctgtctcccttcgggtacttgggcaatgtccaagcacgcaacatctccagacatttcatatttctccacctccatcaattgaccagtcatatccacctcaaaatatataagctctccgccactcagagcaataacaacctgaagtcgattagaaccaaccttaacaatcgttctttttcctggtgtcctccactcattgatacgtccatcttctctgatatgccttatgccatttgggtgaacttgcataagagaatcatcccctatcaaagaaacagcaagtgaaggggtggtatcaagaaacccactatcactaacttcttcaactgtctctccaattgaaagcacaagagtagcatttgcaaatgacacaacgatgtatgcatcaaactcatcattaatattctttttcactgtccaaactgcacttggcacaccaggaagctccgacacagccatctcactaatagccaaacctggccttagtatcctaagagaggaacgtggaccccgtccacaaagtgtgaatatttgaggtgtttcttcctcaaatagattaaggactttcatgtccatcattggcatcaaactctcaacctggtcaatcctaacaaggttcttaagtcgtctaggttggaaaaacacaggctggaaaccttcatcagtttccatcaatgtagcagaggaagactctacatcggcatcatcacctatagcctggaactgatacaatgagtgattcccaaattcagacgcagcaaataaaaaccctgacttaagaacacacatcgaagttgtaacaggaattgtatcaaaatacttaatttttaattcggtgacacggtcattgtcatgctctaaagtaaccttaaatatatcaccatactcagtctgcaaaagaaaaaagaacatcgatttttgcttgtgcatagcagctgaaactatcaaaactccacgctcagcaggcaaatcagcacgtctaggaatcacagccctgacatcagactgtccctgattcttataaatgacaaaattttcagcacatactaagacaccacttgggccatcaccacctccaggaaccgtgaccagcatatttgccccattatcaacctgctccgaccactttctcgacacatgatttagcccaagatcaagctcataaaaggtcaaatgtttctgtgcctcactagctgcctgcccagtagaatcctgatctgcctccgagtagtccaactcgatggcagcaaatattgggttatcaaacccgcaatcaactccacaaatggaataaactatagtatgtgatttatgagcttccaaaggtgatgatatcgtcaatcttgccgctgtatccctattcaaaacataaaccagcttctgcttctcgcaagctcctatcataacagctctaccctttggatcaatggccaaatactggcccggaactatcctacgacagccggattttccaaaagtctcttggtgaattttatcaaaaacatttttctctttattgtactcaagaattacaattctacctgaatctgaaccaacaacgatatagtccttttgggcaccagtgagtctaaattgagctaaagacctaatggcaccgaaaatttcaacagagagaacagtctggatcttaccactgtcatcgggtcgaagaagatcgagaactttgcctctgccaacgactatttcttgtgccttcccgccggagaaatttccattaatggcggatacgatgcccgtcggccgctggagggtgaggctgtaaaggtacatagctcagataaattgatttgaaagacagctgaataatagggtttttaaaaacggcgaagatgaagaagaagatttcaaagtagcaggatagaaccaagttggagatttaaaagaaattcatgtccattgttgtgggaatgatgaaaatggtattgtagggttttaggttaggtttggggtgaactgagcgagtgagactgaaagtgaaagcgggagagacctcactcaaatctaaaccctagatcgctaaaaccacttgggctttgttatcctactcgactctccacgacgaccggacaggtggcaataggggttgcccatcatggtcttgccactacccgtgtttatccaattcaatacgcactattttactcaaagtgcggatttcatattttgaattcaattcaatccgcattattttgctcatagtacattccatctgcactaggaggcgtttggttgggaggaannnnnnnnnnnnnataggaatgggaatgagaatgagaataggaatggaatggaataaa

SEQ ID NO: 161269 - DNA, 5970 bp, Cannabis sativa
gtgttaaaatcatatcacatatcacttcacaaaattggagaaaaatcatgaaaagaaaaaagaaaaagtcaaaagcatttattggatgtgaaaagagaaacacattttcattgtctgaaagaattggatatcatccttttttcgtgttgcaatctcttcactctttttatactagttttggaaatatcaatagtgtccattaaaaggatattaataaatgcaaatgtttcttctgtggacttggatcgaatttaacacttgcaatgtttctaatactatctaacaatcatccgtaaatctcgtagctgctagctgggttctttctttttcattggtaacttttgctctcttttagattacatggtacttgtttggttttggatggatatagatttttacattaattaacccagatggcataatcaactttcttattcaggttttgtcagatgagcttagttgtgatgttgatgacataatggatattgagttgaatatttgtgatactcaaccaagctgccttggtgggggaaacaatgaatttattttttctggaagactagataatcttgcttcaagttattgtgctttgagggctctcattgactctagtaaatctagcagtgatttattaagtgaacaggcaatccggatggttgctttgtttgataatgaggaggtaatcaatccatatcaagtttacactgtagttttatcttcatgcttgttaattttcattgcatttaaacctgaaatgccgcgtatatggaatttaatgtatatctacctttctagaactacaatgtctattttattaaactcttaagttatgtgattgaaacaaatgcaagtataaataatggatcaaaaaaaaaaaaaaagaatccatttttaaatgtatcagtagttgtttataaattcatctagcctaaaggcagcttgttttttcttgaaaatgattgtcattgtgtggtctcttacaatttctttcgtcttggatcccagttttactcggttctttgcttatcagataattatgtatgtggagagatgatatatttggctcacaactattaattctaagtctaggtgggttcagattcagttcagggggctggtgctccaaccatgtttcaggccattagacgcataagtagtggtctaacagattcatatgctagtgaaggtgcttttgagcgcacaattcgccaatcatttcttggtatgatatatatttctttaaaacaaaatatcttttatcattctaaccgaaacagaacaccaatatattgaactgactcaaagttaaggcatttcaactgcaagtgttaatggccaatttagaggaagttttcacaatatgtgtcttgtttacagttttgctgatgtagtttctattctggagttttatgttgctaataaagtttctaaactcaatattctggtgctatttaatagtttctgcagatatggctcatggagttcaccctaattttatggataagcatgaagaacaccaccgaccaatgatgcaaaagggacttgttatcaagcacaatgctaaccagcggtatgctactagtggaatcacatcattcctctttaaagaagttgggaagattcataaccttccatttcaggtagtattcatttgctgtcatggtttgattaacctattcaatcatttcatcctgttcttaatgagtcagtaagcatccaatcacttgaaacttactcagtgtatctgaataactaattttttcattcttacgtttactcaagatttttgtgaaaacaagcaaaatgatattccctcttccaaccaaaagaaggttatataacatgaaattcattatttttgtgaactaatgctatcagtgattccaatgaaatgaagtgataatatttactttttgtcattagctctagaaatagaacccttgttcattaatcttaattataattgttggtccaaggaaaaaaaaatcaaattaaataatttttggtccaagactcattaactcctgcggcttaagtctcaaaaccccacctaaaaaatgaattaaatcaggaatcagaagttaggtacttattctcaagtttattcatcttcaacctttcaagtgagggatgtaaattataatcatacccctgatgttctatagtgtagtcattcttgcctccagatttagtttgaagcaccggggatgagatagggtatatatggtaaacagttgacacttatagtgcggaattctctagaatacttgctcatttttgtcgacacacatcaggtttcacttcagacaataagtattaatttgagctatatttttgcttttgagtaggaatttgtggtgagaaatgatatgggatgtggatcaacaataggtcctatccttgcttctggtgttggcatccgtactgttgactgtggaatagcccaactttcaatgcacaggtatctatgactatccttcctaaattcagtgaagattctcaccgtaccctttaaaaagatgcaaacatttagtctgttgttagtcttcatttaatttaaatttctttcttcaaaaaaaaaataaagaaaaaagctcattcaaggttaaacaaactttcttagcataattgtgagactatcaaatttgtgggtatagcctttgtgaagtaaagatgaaagactgtcacttagctcattgaacagagatagaagaaaagaatgatatatgttctcttggatcttggtactaaaatcattaatgtcttatttatattgccctttttacctgcagtgtgagagaaatatgtggaaaggaagatattgatattgcttaccagcatttcaaggcattctacaaaagcttctcaagtattgatatgaagctaaatgcagactggtaaagttctcttcaacctttgtgttatcacgatattttcatcttgaaagatagagcagaggggttttgtaagtttcaggtctggccttctcttgagatgggttaaatcattgcattattttgggtgtcctttttcaatacttcattttagttcgtctttttttagagctaaatgacgaagctatccattgatatgagagtattattcatagatactcttcctatatatatatatccacttatatatcaacagttttattatgaattttgaagatggacttctatttaatggagatccaaaagtcagtaattatgctaatagcccctaaagtatgggcatgattaagagagcttttattcataatttttcaccaaacaatttgatagtttaggacattattattttatccataatctcatttttcttttgcttctctctttttgggactggacatgtatggttgactaggtaacaagaattctagttgaagcaaagatacaatcattctttgtttgaagattgttctcactcaaggaatataggtttcaaaaaggtaaaatgacttttttgaatgatcaagatttgctgaatttgattgaacccgaggaggaagtggagttatcatcacttgcactgttagaattctgactggagtttgctctagacagtttccgtttcagctcggtcagtaaagcttgattctccttactgagtctttgagctttcttcctcaacaattcattttgctggattatgtaacaattctgcaaatacagctccgagttcactttatccatttgagactgctctgaatctgaaattatgaagaaaaaaaaaaggataatgttctcaaatataaatcattgttggtagtaagaaactattgagtagcatccaataaacacaaacaattcaattaacatagtaaaattgagggttttcataaggttagaataaaagtttgaattgaatgtgcatcaactctatctctcaagaatttatgggaagaaaggttaaatgtattagcctcttgggactaattcaataggccgggagttttcttgtctttttttcttttagcaatgatagcttcattgataataatatattctcacactaactaaaattaaaatatgtaaataactttgaggaatatattctaaccaagttgtttatccattctaagcaaatctattagcagcatgaattaggaataggcacacactcttggaactaggttgggtgagtagagtatgaatggattgaatgaactatgaatttcatgtgcccatatatgtcatctcataaacaataatcttcaatctaggatagaacaagaggcatggacaaaaaagaaaccccaaaatcataagaggactttggtgattgacattccaaggattggtgtcatatggaaagagttgggagtaaaaagaaaaacaaaccttttatcttatatatggagaaacaggcggaggcaaaatcttagacagagatagagctattgttttgggttgaagaaatttatataggaaacaaaaaagaacccaaaaccatatgatatactggaatgaacaaacccccattagcaaaagcctccttgtctgcctttttccagtatgaaaactagttcactttaaccgttactagaggaataaaggagagaaatatgggttctactcattagcatgtctcaagaaaagaatatctttaaagtgaagttgtttcagaggtgcacgtaggagtgactaggcttgattgagtcacaaaaaaaaatagaggatataaaattagagtaataatagatgtacacttattttacacatttaatttgcccatcatgatgtgacatgcattttaaacaacacaatgaatctcaccttaaaaaaattgagtataagacacttctaaaaactcaaactatacatactttttacatgtgtttaattttagtcatatataattttaaataaaaattgtatcatcgagattaattatgcatgtaaaaagaaaaaaaaaaattgaatacatatcatattatggtgtgtaaattaagtatgtaaaatgggctgcatctatgatctatcattactcataaaacgaagggaaaaaagaattagaaaggaaaaaaagagttagattgctttagatcaattagagaagtaaatgttatgtttatctgaaaaacagaaaatggatgaaagaagcacagcactcgtgtttgtatgcttgttgtgactgttaacaacacaaagacagcaggattaggggaaagttgagttcatgcaatgcaagccatcagtcacagcagaacagaccatagtttgggtttgtttctaaattggatatactttcatttcgaacatatactatgcaaacacacacacacacatagtgagaaaaagtgttttttaaaccgtctgactgatttcgttagatttaaatcaaacgtttaaaacggttaccgtaaatgattactttatgaacttgtacatacattcttgcacccttactttatccaatcagcataataattggcttagtttttttaagcaaggtaagaacaacattggtatcatattgatattatactcgtgctttgcaagcgatttgattgtgaaactcgtggggtcctttcttacaggttacacattacaatacaagggctgaatctgaatgaaaatgatagtgtagtaacagatattgcaacataaaataagtcattgaacaatggaggaagagggttaaccatcaaaagcttatggaggagaaagagaaaaataattacagattttggtataacaattataattgataccagattatgatatgcgtttacaaattttcaaaaactcaatataattaaataagaactaagaaaaatgaatcaaatataagaaatagaaatgaagatttttacgtgagtattaacaaactctagttcacaagtcatttgtattgggttaagagctctagctctttactatagtgtttaagttatgaatttccaacccttagcatgaaggaataatgtagtgaaattccgtattttaatattcccagtttgattat

SEQ ID NO: 161270 - DNA, 6298 bp, Cannabis sativa
gatgggagatctcaatgccattctcagtccgaatgagaagagtgggggtaataaagctttgacgagagacttcagatggttatcagattttcttcagaatactgggagcattgatgtgggttgtagagggggaaagtttacatggcaaaataaaagattcaagggtggtttaatccgagaacggctggatcacgcgataggctcctttgactggatcagtctctttccaaaagcttgtgtcaccaaccttcccattatctcatctgatcacgcacccataatccttgatacggtggctgataattcaaagggattcaaagcttttcatttctacgaagcttggtgcagggaaagctcctgtcaggcaacagtggaacaagtgtggaaggaaaacactcagctgggggtaactaattgcattcgcaatctaactcggaccaggagagatttacagcaatggaaaaagaaagactttggggttagtgaacaagatatcaagaatctagaggctcgaataaattcgatacaacaaaaaaatatttccaatgacttgtgtaggaagaatgtagattgcaagcaagacttgcagaggaatactgtcgactcgagagtcagtggcttcagaaatcaagggaagtttggctcaaattgggtgatagaaactcaaaattcttccatctgtcaaccatgattagaagaagaagaaaccatgtttggacaatcaaagaaaatcaaggaaacagttgggaggatacgagacgtatatcaggtatctttaatgaatattttattgatcttttcaaatttgatgagctgattatccctatgagcctggatactttgttcgacaaaaaactagatgagggtgataatctcaaattcagtgctattccaacggaggaggaggttagaaatacagtcttcatgatgcaccccctaaaagcaccagtgccagatgggttttctggctgcttttttcgacattactgggatgttgttggaggctcggtctgctctgcgatccaagatttctttgtcactggggagatgaataaaatcttaaactatacctttatttgtctcatccccaagagagaacttcctgataaagtggatcaatttaggcctatcattctttgcaattttatctacaaaataattgcaaagattctagcaaaccgtctctcccctctcatggatgggctgattactccattacaatcagcttttatcctggggaggtggatagcggaatcttcggttctcactcaggaattggtgcacaagatcaaaaggaagaagggtaatggatgtctgatggcgttaaaattggatatgcacaaagcttatgatcgaatggagtgggctcttcttttaagagttcttattgcaaatggttttaatgaaaaaaattgtaaactccttatggcttgtgtcacttcagtctcttactccattcttcttagtggaagtcctcggaagaaattttatccgggaagagggttgaggcaaggggaccccttatcccctttcctcttcctcctttgccaagaagtgttgtcaaaattaattttgaaggctgagagtaatggtgacattcacgggatccagattgcaaggacagctcctcttatatcccatctcatgtttgcggatgacactatcttgttcttaagggcaaatgaaaaggaagctagtaacatctctgagattctctttacttatgagagatggtctggccagaaatgtagcagggcaaaatcgagtgtactcttttcaaacaacttgaatcaccaaaggagaactactattctcaagcttctccatgtccagcaggcttcgggggaggaaaaacacctgggtaatcctttcatttttaaaagaaggaagaaggaagtatatgagaatttaagagaaaggatgaaacaaaaattggaagggtggaaaatgaaactactatcctttgctagtagaactactttggtaaactcaatagtagctgccatgccagtttatgcaatgtcaactaataaaattcccctttcatttagtcgatccctagatgccttggctaggaaatttttgtggttggggaatgtggaaaaggaaagactcctagcactaaaatcttgggacactatctgtcaaccaaaacaatccggtggcctgggttttagaagatctgaagacatgaatcgggctttactctcaaaactggcaaggagtttggctcaacaagaaaagaagccttgggtgaattgtttgcttcaaaattactgtaggaatcagacattctaaatagttcaaccgaaaagtggagatttggccttgtggaaaaacatcctgggtactcgaaacatagtggcaaagggatcctgctggttaatctcctatggcaaatcagtggacctgtggaatcaaccatggatcccatggatgcagattggtgagtttaaagaacttatgtctactatttctactcattttccttgcttaaacaaagttgcagatatctctttaggggacatgtggaacgaggatttggtcctcaatgtttttggtgatgatctggggagaagaatattggaaattcctagacttctagtttcttctcaggatagtatggtatggaagggcaatggcaatgggagttttcagtcaaatctgcatactacttggatcaggaacatcgattcaacaataggcgagaaatctggagatggatattgaacccgggtattcatccttgtttggcaatcatgttatggcgtgtgatcagcgattgtatccccacaaaggacaatttgcatttcttgacagagaaggattgtctaatttgtgatgccgaagtggaatttggagtgcacatctttaaagaatgccctctcgtgtgggccatctggtttacaggtccgttcccctacctctcatcttaaacacctggcaatgatatgcttaatttcttggagaacttggtgaaaggtctcccttaaagtaccagaaccgaagatttgaaggtggctggttgcattttcagtgaaatttggtatgcgagaaacttgtacacgacaaaagggaaactaatggacagtaatgagattcttgcccgtgtccaccacaagctcaaagagttctcccctactcttcaggataggatagttgaggatcagagcactacaactgcctctgtgcctatgaatttggtttttccaaacaattacatgattacggacgcttcttggtcccagaatgtggctgggttggcagccctttccatcaacagggctgaagcaaagtgggaagtgaagacaagtaagaaggaggctatctctcctatggatgctgaaattcaagcaattttgatggctatcacctgggcaaaagatcaaggatgggaggatatcaccatttttttttatgctcaagttgtagttaatgccttgaataactctttgtaccctccggattggagaatcatgagtttatctctcaaggttttagatttgttaaagtctttttctagttatagttttatctacattagtaggaacgttatgtcttttgtcgacagtttaactaaaagtgctaggagatctagccagggtgctaaacattttcaaggggagggtgaaccccctgttgccccattttttccttggtgttaaatgaactttatcattttcaaaaaaaaaaaaaacttataaggctttctccttacaatgttattttataacattgttgaataagagaaaccttctaagcataatatagggcaagtatgggggtgctcctcttatgagtggtggagagatcagctttagggtcctctttcttgggggtgtggtgcgagaggtagaagcccttcataaaatgaggtggagtgaggcttggagtccccacgcgtggggtgtagtgtaagagtgggagcccttctcgagtcgaggtggagtgatgtaacattcatcttagttagtgtggtttggtaccctgtttagagtaccaatagagaacattttatgattatatcttttaatgccataattactctctatttaaattataagcgcatttggtaattcttacccattaggatataaatgtggattttatgtgcactaaagctatattattatatagtgtgtcttttgtttggtactagtggatttggcgatatagtcacaattcataattttaggatgtaccaaaaatttcagaatacactatgaatttatttggtagaacttttagtaattggtattttttagatgatttagcgattcttgatcttctttgatttaattggttgtcttaaggggaaaacaatagtatttaattggttatcttctttttatgggtcatcatataagttattttgttaattaaaaaagtatttttgggatcaaaacttggcagctcacctcttctaccactaatcgcctctccattttctctcaatagtttagttcttaagttttcttctctttacttgatctactgaaaaattaccaagtaatttcttcaaactttgagtaccaaattgttgtgggccatgtagcatgtccttcaaattcataaaaaaattaatttggtacgaaaaaattctttgagaaattttttgtctacgttacaatctcaaggtcttcctcatagtattcttcatactctttgtcatagtcatccatttaattctcatcttggccttcttggtcgtcctcctcaaggggagtttcgtcaacatgcttttttggttgctagactttctgagggggactgctagctacttatgatgcatcaacgtcaccgtctccttcgacgtcttcctaaacgttcactagaagatatttatgtcatcgacagccatgtcttccttatcgttgtgagtggtcagcttccgagttgcaattctagttgtgaccatagttgtagatgacaataatattggaaaccttttttggctctcaatgaaagcaccaaaatatttactaagttttttaaaaattgaattaaaaatagattgagctaaagaaaatgagattagaaataaagaagataaagaattttatgtggttgaggtgttaaagagccttgctccacgagacaatattattgagttctttggctatggagtatttttgcaagagagttcttgccaaattttcttaccagagtttgaagccaaaaattgtaaccctttccatgaagggttagggccttatttatagggtagagtcaggtttttaggtaaactcgaacacattaggatttgcatgtaaaaaaactcactgatggggtaaaatacattaggatattgactttgggtcaggttggtgaggcccaatttaaggggtgatggtcgtccgtacgtgaccataccactgatggtgacaggtgggtgtggatcatcgatcaagtatagtgagtgtcagagtagtggatattgaacacaatgtggtttgctttttttatgtgcgtcttcccaaggcttgaaaaagttgacaaacccccgattctttgcgatttggtgttggaagcactccacgttagattggtcctggatggtcgacactctacgacactccttcgactactcttttgggatacccttgagggtaaccgtctatacttctttggatgcttgataattaggttaagtatcaatcttttagatttatcggtccaactttacccgtaatagagcaaaggttgaatttgaatcccagcccaatgttgttcttagaccaagttgttggcttacttgggccttgtgaatgggcccacaagtaggtttacatatgtcttgttcctgaaaacgtcgataacaacacgaaaataaaattaaaaaaaaaacaaaattttggaattaattctattttaggcatataagtttagaattaaggtctttttattttttttttatttctttatgacatgataagatattattgtaattaagattagggatgttcatccaatccaatctgcactattttgctcataatgtatctaatccacactaaatttgaatttcatattttagatctaattcaacccgtataatagctcaaatccaatccaatccacactttaatattaaattatttaatatttattaaaaaataatttttttacaagactaacaacaaaataaaataaattattgttgttttatgtcaacaacaataaattaaaataaataaaataaaaaataacaaatttaaaagaagaaaaaaaaattgtatgtagaaaaaaaatgtttaattttgtttaaattgtatgtagacaaaaaaaaaaaaaaaaa

SEQ ID NO: 161271 - DNA, 2724 bp, Cannabis sativa
ttgtcatataatattttgttataatttaaattgctgtattatttgcaattagttggtacaaattaaactaaattgaataactttgtgaacaaaaaataaatctttgagacatgaatgaaacaaaatggtacgacgagtcaaggggtaaaatagatatttaatctcgcggcctatcaaaaaccacaagtctagtccaaatagatgtaatgatgtatacatcttaagacaaaaagttaatatacatcggaaattttgacataattgatcgaattttctacgtcaaacacaaactaaataagtaaaataagacaagttgccttttactgtagcaacaagtcaattttttgcaaatcacttacaacaggctttttttatttaaaaatgtaaaagtgctgtaatggactacttttattactttttaagaaatattgtaccaaaagttcctaaaaatttattttcatctaaataaatttccaaccttaaaaatatcagcaataatttttaattcttataagtctgttagtcctctttttaacagatccattaatttcttttcaaaatgccgcgtgttgatattaaatacggcataagtcttcaaaaaaattactttaatacagataaatttctaaaaaaaaattatttttaatatagataagtcttaatctcgaaaaattatagttatcgtctataggtacccaacttaatagttttgtttacaacataaaaattatgtaagaaaaattattaaaaactttaataatttttgttattttcttttattaaaaattagaaaacattatatatatataaaaaaaaaaaaaaaaaaaaaaacttttacgattcgccacccacccttctcggtggtggaggcttgccaccgacaagtgtcatcccttcatctccacttttttttatcgtcccatcccatgatcccacacagaaaactcagaaaaggaattaagaaaaaaaaaacccaaaaatccttaaatagttgcaccttactctgaccctctctattagaagtccttactcatcatttcaattaagttggttagttcattataggttattatagagagagcttgttttctgttttacaaagttacttcgtcccagttgtattgtaactaactcacactcgttctcactctatatatataccatattttgggatattgaataataacaagtctttcatttctaatatggtattagtcgcttaaattctctctcatacacgatcgtttccatggatagaataagagctacttgtttaaggaactccgacaaacttccaggctgcacaattcatcttccataccaaatgctcctctaaattctctgatcatttctccagtctctaccgtaaccttcgacattgttaatatacagcctaatgtgacaacatgacctatccatgaagataggtccagtccatatttcttgaattctggtgaatctcctggcctcacctaagtcactcctccgttatgtgacaagaaatttcagtcatgtcattgtgatttcaagctttttgttagtgtgcgaaacaaaaatgtcttcctcaaacgtaccttccacaaccaccagtcgacgatcctttgcatcatcttggcttcgctgtaatcagatggtgatgttatggattctccactccgtcacacctgacattaaaagcagtattatgtcttggacatggctgctgagatgtggaggatactcaattcgagatgtgatcaaggtaatggtcctcgcattttcaaactcaggaaagtgctaatcactctgcatcaaggctatgactctataagttcttattttaacaaacttaaatgcatgtgggatgagatctaagaacttcgtctatgaattccatgtgcttgtgttgcttccgtttataatatggcattcttgaatcaagaacaggttcttcaatttctaacaagactaaatgaatctttctatcctgttacagctcaagtccttctacctgatccttttccatccctatccaaattattctctatggttattcatgaagaaagacaatgtaaactcaacaatcctcaactcccctctctcattgcttctgtccaagattctactcaaacatcagctcttgctccaaatccctcaacatcaactgctaatcccaatcaaggacgcaataagaggatgaggccttattatactaactatcacaaactcggtcatcttaaagaaaactgtttcttcctcattggattttcacctgggtatggagataaaaggaaaactgaaaactaggcatatgcatctactgatcctctctctcttttggaatatccgactaaaccaaaagatatccagaccattatttcacttctgcaccgaaagcttcatccaacaacttccaattcagatgcttctcaaccattcgcatcaaacatttttggtaatattaaacaaccttcaaactctgtatggatagtagacagtggtgctactcaccacatatgttgtgacatatcactcttctctcgattgcatgatactgctattgctacatctataaaattaccaaatgatttgagcattaggatacacaaatcaggagatcttatgtaataccctagaatttagaatggattagcaaaaccctaattagataattgtgaataattgaggaattatattattatatagttcagtatatgtgaattgatatgaattttaatatgttaa

SEQ ID NO: 161272 - DNA, 3406 bp, Cannabis sativa
cccccccccccccctctcgctacaatgtgagtctgcccctgtgcatacatatcatagtccataaggattagtattaatatagctagtactgcagcaaaatataaagtatggatgaagcttaggaatatttcttaagctcaatttaaggcaatattgagaagaaaagaaatgtgcagtatttaataatatgaaaaaggtgatagaatctctagctttatgtaaccgaaagagataatcaagatatatgtaaagggagtgattattacggcttaattaattattattatgccttgccgtaataacacattaatataccttcacaccatctatatataataaaataaaaaattattaaaaggaactacgtgtctaacacttttttcagtgtcatacatattgttattgctgtaattacttatcaaaaatattaataattaattgtacggtgctatttataaaagatattgaatattactagtgcacaataacaatccttgataaaatataataaggcaagaaattaaagggtataaagtgaaagtgaaggaaactcatcatcataacatctcattttgtacatatacaaacaaatatattattatactaccttttatatgcctctaacacattgtgaagattaagaataatatttcactttttttttttttttgatcgtgcgcccaaggaaagaataatattaactctctctatatatataaatgatacaaccacacatacaaatatagtagttaattaattaatcgatcgatcatagatcagaaggggtacgtaattaatggagatgaagataagaggaccattgatcataattaatgtcattttgttcaattattgtttgggtgtgtttttgtttgcttcacttggcacagctgaaaaagttatcacccctcaaaacaaggtacactactcaactatatatatataaattgttatcttatcacctagctagtaataaccatgcatttacatatatttgcttcaaatataagaactacctcctcgaactatataaatatcttacaacatcatgtatagttgatctatgctatatatgtatatattttcttgcttatatatattttgctttgaaagcttctacaaatacaatctggttacctgactatttttcatgtattcaaaattctctattttaattgatgctaatattatcaatgaattttttagagctcggccttgaatatacatcttgtttctaaaactattttctcaataaatatataaatatatttaatcaacgtataatgcatttacatatatggaacactttaggttaattgagacactaattttgctcatactctaagaatgtgtctttttttttttttggtatctagacaaattatatccacatttatttttataattaattatttcatgactaattttaattaatgaaaaaataaaatcagaaaaattgcacgtatacagttaccgtggaaacaacatgtacaaaaggagctgagacgagaagcccgatcagcataagattcggcgacaaaaatgggaatgaggttttgattaagcatctgaacaacaaacatgtaagaaaggttgaccctttgtaccctgatgttcttgatgatgttcctcgtacaccatttcaggcttgcatggttgaccagtttagggttcagggtcaatgccttgactactcatcatcatcatcatcatcacctatctgttatttgtatcttaagttgtctggcaatgatgattggagacctgggtttgtacaagttagggcattagggtatgttaatactcatgattctcatttcttttactttcgaaggtacttacctagaaaggtttggcatgggttggatttatgtgataatgatgtcactccttttgggattaagcatacaaggaaaatatttgtgcagaaaaattaatattggaattatatgtagaaatatttgcatttgaagttaacctccatacatacatataaaataaagggattttagcggctgaactattcattttgttacacaaacttattttttagagccaaaccttctaaatttattctgtctaaatttttttattaaatgccaatataaatagcaagtgtgtatacattgtaacaccctattaaattaggagtgttattgtaatttcttaatgatctgaacacctttgctaatcaattaaagtgattatgaaaaaatatgaataatttaaaaaatttcttatttaaacattataaacttaattaattaaactactttatgcatttagggatccgttttaaaaatttacaactgttacgacatatttagttacaaaagttatcgtctagcgactaccaaaataaagcttgttgccccgaagatcgaacactctaggtctaatcgccctgatatgtacaatcttcatcaactcgagctcacttttgattaactttaaccttgctcttacctacatatacaaacaatatatgtgagtcgacagactcatcagtaagaaaagtatataataatcttatcataacaacgttcgacgcccgtactattaaccataatattagcttacactcgatacactagtcgtactgatgcgatagcgccaatcagtactttgccaaacatacatttatcggtattcagtgcaactctatatgtacactaatactgtcattactgatatgttttctaacaggtattcgtaaatatgcacacttaacatgtaatcatatatgcatattattatactaattttatcttaattttaaattcaggtgtgtgtcggtcaacctgagtagaaatcgctgctcgacgatttacaggcccctaagtcacaacattcgtagaactaacaagtgatacgctaaatcacttttcagtgacttaaaattaaaactaaaagtttccctatcgataaatagtatagcaatactctaaatatcgtcaaaacacaacaaattagagttccaaaactaatagaaccgataaaccttattataaaatatgaaaaaaataataataattaaaaaaaaacatcgtttttaaggaggaagatgaagaatttttttttaaaaaaaataatttattatttattttttaataatttatcatttttttttatatttataataataattttaatatatttaaacaattaaaattacgtaaacggttaaaaatatgtcatatatgtacaattatatacacatcaactattaacaaatttttttggacgaaatactaaatactagaacataaatgaagtttttaagatactatcattcccaaatgttcaatttgtttgtgtaataaaataaataatttagtgcactactacaatgttagcctttagaggcagttttttcaaccccatttataaaaagggaagctaaagg

SEQ ID NO: 161273 - DNA, 4802 bp, Cannabis sativa
ctctctctctctctctcttacacttatactttattgctattaattcatgtattagagccacattgaagtgggcaactaaactgtaatagccaaattgatgcaggcattaaaaccagttaagcttatatatgaacaagggacttgattgagaaggggtttatctgataatttaatgcatctaatttcaggtgtatctgactttgcaaggccaaactacagaaaagttgggtgatcagaagaactcgtcatcgttcttgaaagccaccacaactacccttcttcacacaataagtgaatctgagaaagcatcatatgttgctcacataaacagttatcttggggatgatccctttttaaagaaatatcttccactagacccagctacaaatgatctatttgatctagccaaagatggagttcttttatggtattgaacatggtatacattattatacaatagttatgccttaaagctgatattatggtgtgctaaagaatttcatggattaatgcagtaagctaataaatgttgcggtacctgggacaattgacgagcgtgctattaacaccaaacgaatcattaatctttgggaaagaaatgagaaccatactctgtgcctcaactctgccaaggcaattggctgcacagttgtaaacattggcacccaggacttggttgaaggaagagtgagtttatattgttttacttttcatacgaataaagacacataattgtgcctttgtgtaacctgaagtttatctgttttttttttgcagcctcatctggtgttaggattgatttcccaaattataaaggtagggagctagactttaattttgacactgcataatgggatttccatcatggggattcatctattcgtactttcacattttgtgacagatccaactgttggcagacctcaatcttaagaaaactcctcagcttgtggaattggttgatgatagcaaggtaataagttctgtttatttattatttattattatttttttcattccaagttttatcttctaaaaacattagcatgtttatttcaagttttctgttttgtttattaaggatagcgttgtctcacgttttttcatttatggcaggatgtagaagagctgatgagtttacctcctgataaggttttattgaaatggatgaacttccacctacaaaaagctgggtacaagaaacctgtcaataatttttcttccgacctaaaggttcagttaaaaatgctttaataatttttcaagaaatagataatcgtatgttaggaaaagattaaaatgcagattgaaattgtcttagagtcaggtgtgcagttactacttactagacataatgtctcaccttaaaaactcatggtgtaggtcatgaactatgcataggtttttctacttggtactctttttctatttttcacttcaataaagttagatgcccgctcgtgaagtaaaatgaaattagattaactttttttctgctgaactgatttttcttatcatgattttaattaaaaatgatgtgtatatttttgctaatgcatgcgcaggatggagaggcttatgcttacctgctaaatgttcttgccccagaacactgcagtccaaccacgttggatagtaaggatccaaccgaaagggcaaaattggttcttgatcatgccgagagaatgaattgtaaaagatacttatctccaaaggacattgttgagggttcatcaaatctaaatctagcatttgtggcacaaatattccacgaaaggtttcaaattgaaatctaacatccttgctcatatttttagattgttctttttcccctattttattcttctttgtaatcaggaaacagtagctcttgcatgctgaaaacaattgaatattcttctacataagttgacttgagactatgccttctgcagaaatggcctttctacagacaacaaaaaaatttcttatgctgagatgatgacagaagatgtgcaaacatctagagaagagagatgttatcgattgtggatcaatagtctaggcattgctacttatgtcaataatgtgtttgaggatgtcagaaatgggtaagtctctaatttttgcaattacattagtctaggaaagttctcgactaagttttgagtcaataactaccttttgaatcaatgtactcaaaattcttagtagaattttttatacctcaacatctaacttaatcttgatttaatgcaggtggattcttctagaagttcttgataaagtttctccaggatcagtgcattggaagcatgcatcaaagccaccaattaaaatgccatttagaaaagtagagaattgcaaccaaattattagaattggaaagcaactaaaattttcactggtaaatgtggctggaaatgactttgtacaaggaaataagaagctcatacttggtaaattttactttgttattgtttgtgttacatgtctttctttcttttatatataggtatatatttatataccaaataagttgttttgccccttctctgctggcttcaatccctactatttgttgtgcttcacgtgtgaatcaaagtttttgaagctgaacaaagctaataattgttctgagtactgtctgggcagagaaattgagcttttattattccatttcctgaattaagtttgcgtgatgttgattgtagatatatgtttctaaagattttttttttgtggctgaattttttgttacccctgcagctttcttgtggcagttgatgagattcaatatccttcaacttttgaagaacttgagatctcattcccaagggaaggagatgacagatgctgatattcttaaatgggctaataagaaagtcaaaagcacaggcagagcttctcacatggatagctttaaggtagcacataattattaacccataaatttcttaggagtgttataaaggggttgtataattagtgttgtacttgtcttcaggataagagcctttcgagtggtattttcattcttgagcttcttagtgctgtggagcctagagttgtcaactggaatcttgttacaaagggtgaaagtggtacgatttgcttgcagtctttcatgattttgcaaagtatgtttaatttattaaaactctatatgaaataaactggctttcttattctcttgaaatgatagatgatgaaaagaagttgaatgctacgtacataatcagtgttgcacgaaagctgggctgttccatcttcttactaccagaagacgtcatggaggtgagactgcaagtggattgttatatatgtctaatattcatttacttttaattcattgcgcagaggtagcattttgttgcaatttgattttgtaaatgactcgtaagaaatgtaatttcgcccctcttggctgaagaaatcaagattaaatcagcagaaaatatgacacaggatagattgatgcacatgtttctctttcatgtaaggttttgagcttttagaatgtttgaaactgaatgatcggttatcttgcaggttaaccaaaagatgattctcactctaactgctagcataatgttctggagtcttcagcagccagttgacgaggcaaatgggttatcatctgatgctgatgcatccccagcaccatctatcagtggtgaggatgagagctcctccataggtggtgatctttcaaacttgagcattgatgatgctgcctctgatactactgtctcatcccagattgacagcgaggtgtcttcaatgccagagtgaagtaggctctgagactaatcactgcctccacgagaagggtttcttgataagaaagaaaaggagagaagggttgtcttatataagttttgatctcattctcttccttggttgaagtaaagcaaaaagatggttgaagaaaaatgctttgagaacaagatgtgaagagaaacaaaagagcatactgtaaaaagtattagttgttaattagaaaaagttgttagatacaccaaagttgaaagtaaaaaataaaaaagaaaaatgttgagaatacatgctggcttgaacattttcttctctagtcttccaccactctgtttgagtaagctgaaattttatatgtattctttgacaattatgacattgatcatattcaataaaataaagtaccaattcattaagaatatgaggaagactaaacgcataaatagtatgagtaggacataactatgtcagtcagcgaggaccgatcacagatctgacattttttttatataaattaactttgttcaatggacaagttatctgctgctagacaagaaatacaagaaaatgtaagaaggctcgtatatcgagcttcttgatatgatctaatattagaccagaattttgtagaaatgagggtttacatttacaatgcttgtccaccaaatctatcaggtttcatttcatcaggtttaacattttttgagggtgataaaaggaattataaacttagaaaagcaacattaccgtatttggttgtgctcagtaatattatgataagggtgagaatataaaaattactgacataggaatagaatgtgaatttttctttttacataataattatttattttttgtaaaatactaataatgtaatactttttttttctttttaagtattaaaaataattttaatttattatttttcatataattttataaaaaaatcaacaataataaataattatatagagtaaaatatacatatatatagcaatgtcaatcgggctgggtcaggcttcacccgacccgacatgatctctttg

SEQ ID NO: 161274 - DNA, 2278 bp, Cannabis sativa
gctaggtttcattctcttctacaaagacacgttaatttaggaatttatcacgaagactactgctaagtaatatactaatatatatatatatcaatcgttatcaagttatttgatctttattaatttttttttcatcaacaatttaattagtttacatattcatctcaacaataattttagatagttatttttatttcattaagaaactaccagaaattgtcttatgcaaaataacaaattagtttatatagatttttagcacaaagtatataaattaaaatatttgttaataagaaattaacatacaaaaatcaaacaaccaattcatatatataaatatattatatgcatatatatattgaatggataaccaaacaaactcatacttaagagtagttaaaatatcatatataggctcactgatacattaaagaaaagtgatgcatgataagaaaatatggtcttctcagtctgagataaatcagtcaaaactagagaaagataaagaaagagtacaaatggctgtgtgcatgatgacatatcaatggagaataaaagtgggacgacttttattataattaaggctaccaattcatatttatatatatatatatatagcttataaaggatgcaggcaaccatacatgaaattttttggtcggtgggtttgttaagctctacaaaatattaccaattttttaaaaaatgaaactcacatataatctttcattgtaataattatatattttttttccttcctctaatgatctttctgttcaactagttatttatacccaatataaaacaatatttattttttcccataaatctatatattaattgaaaacattgttagcgcgccatagagagaataggtcaaaatactagattaaaggaagcaaagattaaattttaattataactgccagggcactccactagatgaattacccaaagtcaagtataggacatgaaactcatgactaaatattatttgaaaggattaaaagaaggcgaagacgaaggtgaaggaagctctaacagatcccaagaataaggagaagaaaaagtagtcgaacgagtcgaatcgatttctcgtccgacaaagaaaggatctctgcacttcgtcatgggacgaggggcaactcaatataagaaaaacatcgttttttattttatttatgatgagtagtatacttttaccaagtattaaaaataaaaggataaaaagaaaggaaatgaaatgaaaattaatttaatagttttatgagataattcatatatatacacttgtaaacggatcacgtagaaaaaaaaaatgaaaaattgacaataaaacaaccaattacgtataaaattacctagttttgattcatattatgtttaatgattttggaaaaaaaaaattgaatttactttaagctaatttgaaggtgaccctcactattgttataattattataatggtatttctcaatatatctttatgatcaaactacaactttaaattataaaaaataagaaataaattcaaacaattgttcaaaaagaaaaacataaaactgcagtttttgtaacaaaccccactaatagtctctatttgcggtgacatgacaacacagtgattaaattgtgcttaacttccaatagtatttcctcgctagtagttaactctcaaaatttaatttttaacgataaaattttttaaatttaagttctgtaatatttaattaacattttctatctatttttggtagttaaattataagttggctggttgtttcatgtgtatagcgtattgtccacaaggacacaagaacatagtatacacataatacaatattattggtccacgtaaataaatatttaaaaaaataaaaataaaactaataaaaaacttattatttaaaaaatatattaaaaaaattaattatttctattttttcccttgttaccctctttttcttttgccttctcactctcttttctatttttctctctcaatgggatctattgcccagagccaaccaaaaattcggtgaccgattattgaaacaaaccacaaaatcgaaatcctcggcccctaaaacctagatttgcctctctctctctccctcatttttcactttcattttttttttctatttttgatggagctgcactcatgaaagttgtcgattatgacctatgcatgattatgcccttgaactttttaatcagttttaaatggttcctgagttattcataacattgtaaattgatcattctgttaaatttt

SEQ ID NO: 161275 - DNA, 3267 bp, Cannabis sativa
ttgtggtgaatttcttgatcgattccataataaattgaagcgatgagcatggactctaacaatgggattgacaaaatatgaagtggagaactggacaaaatgattttggataatggcaattgaagacgatagattttctcgttcagctgtgtcttgaaattgctctataaagagatgaaggtctcacgtgaaccttgaagacaaggacaagaagatgattcttgataaggctcattatgcaattatactgagtcttggagataaagtgttaagacaggtctccaaagagaaatttgcagcagggatttggtcgaagctcgagagcctctacatgacaatgtctctattaaattgcctctatttaaatcaagctttatattcttttaagaatgtaagaagatatgtctgtttaagaacagtttgatatctctaacaaactaattttgatatagagaatatagatgtatttattagtgataaagatcaagcttcgtcgttgttatattttttatgaagattttacagcaatttcaaagagacattgttatatggaagggattccttgacccttgaagaagttcaagaagctctaaattcaagagaattgaataaaaggaaggaatccaagtcaaatgttaatggtgaagggctgatagcaagaggaaaatattaaaagaaggaaaatctcaatgaaaagaaaaggtcaaaatcaagaaatggtaatgggaatggaggtggaaatgtcacgggaataaggtgctaccactatcgaaaggaaggtcacactagaaggttttgtctagataggcagaaaggaaattacaggaatgacaaagaaggtgaattagggaatgctactattgcagaagatggttatgatcatcagaagctttgatggtgtctagcaagggttcagatcatgaatggataatggactctgaaggttgttccttccatatgactcccaacaaaatgtattttgaggagtttcaagaatcggaaggtggttcagtgcttcttggtaataatcagccatgcaagatcacaagaatttaagccatcatattcaaattccatgatgaaattgagaggttacttgaggatgttagacacgtacttgacttgaagagaaatctgatctcctttggagaattagataagaagggttatgtgtttaaaggagagaattccatcttgaaagtaatgaatggttctatggttgtgatgagagggatcgggcaaaatagtctctattctctggatgctcatgtgatagttggatctacaatcactgctatagaaaagaaaatatcaaagactgagatttggcataagagattgggacatgtaagtgagaagggcatgctagaactatagaaacaagaatttctagggaaagagaagttggaaaggttaattttttgtgaacattgtatttatggcaaggcttgcaagttgaaattcaaatctggacaacaaaggacaaaggaactcttgattatgtccatgctgatctatgggtactttctaagccatgctctcattctagtgcaaggtacttcatgtccatgatggatgactactccagaaaactatgagtgttcattgagaaaatcaaggatgaatcttttgaaaatttcagaaattggaaaactctaatagagattcaaactggaaggaaggttaggtaatttagaactaataatggactagagtcttactatgatattttcactaagttttgcacaaagattggaatagctagacacaagacagctgtcaagaatccccaaaaacatggtctagctaaaagatttaatagaaccactttggaaagtgtaagatgtatgctattaaaacaaacatgcttaagatttttggggtagaaataatagctactgacgtgtattggaatgaaaacactagaggaagtctagtctagacatccaccagatcaatcaatgctgagagtatctggttgtcttgcctatgttgatataaggcaagaaaagttgactgaagtgcatatttttaggatatatagagggtgagaatgtatacaagttgtagtgtttagaacctagacacaagaaatttttgataaacatagatgttgtgtttaataaagttaaaatggcttacaaagagaagagatatttggcaaacttagaactgatatagacaactacctctaaactagataaattgaatttttaggtggagttggatgataagccttaagaagatcacgataatgatgagccacaagaagaaactgatgtacatggtgaggattggtatcttctaaatagagatagaactagacgacaagctagagctctagagaggtatggatatacaaattttggctttctcctcgttgcagcaagtgaagtcttagaagaagagccttcaagctataaggctttactgaaaagtagatacaagaaaaaatggctcagagccatggatgaggagatgaagtctttgcatgataaccatacatgggttctgatcaagaggcataaaagcatttagagtggtaagttataaatgggtactcaaggtaaaagagggtattccaaatgttgaactcaccagattcaaagctaggattttagcttgaggctttactcaaagagagggagtacactacatcaatgtattctcactagttgtcaagcacagatcaatcagaattttgttagccatggtagctgagcataatctaaaactagaataggtggatctaaaaactgcctccttgtatggtaaagttaatgagacaattttgatgacacaaccagaaggattcattgagaagggtagagaagactatgtgtgcaagctaaacaaggctctctatggcttgaagtaatctcctacgcagtggaatagaagatttgatgaattcatggacaagatcaagttcgtaaggaataagtttaataattgtgtgtactttaagttcctgcctagttgtgactttatcatattgctattgtatgtagaagtggcgaatgccaagaaggaacttagcagggagtttgagatgaaggatttatgtgttgttaagaaaattcttgggttagaaatccgaagagtatctcaggaggagtatctcaagaaggtcttgaataggttttgaatgtcaaatgttaaacatattgtcactcccctatctcaatcattcaaattgagaaaaaaccaagcacctaaaactcatgatgaatagaagtacatggagagtataacatatgaaaatgt

SEQ ID NO: 161276 - DNA, 6846 bp, Cannabis sativa
  modified_base (6795)..(6804): a, c, t, g, unknown or other
tcttccactatgcccctctcttttagatcaagttacttggtgtttggtcatttctttatatgggtactgatctttttatttacaagcataatctagaaaagggagagataaagagaggcctcatacatttttttgatattgcatttcgtttgtccatggcttggttcttaaatcaataatagcaatgatatgtttgttaattaaaattttttaagttacttgtttatcttcatttaaattgcattgtagacctgtatttcacctaaatattatttacatgttattgaagattggttttttattcagatttagtggaaacttatcttgatgtggatcatggtagttttttattaacttgtattattactctatgcatatactatgcagctagaattttaatgttgaaaatttgtgtaggttctttgccccattgtatgtttctaatttcttgactatatggcaccaagacactttgtcaggttgtttggcttgttcaattaattcgtggtgtactataaggagacattgattaccatgcaacacaaaaaatgatcatgagagctatagcttatgagtgcaaaaggtgttacactttatcacctcaaaagctatcttcagtttttgaattacacataattatatatttgtatatatttataccgtattggaaaggaaggtcttgaagagcctgccaaaaggtcaagaggtcaatcttgcttgctgactctcagccacttgttagaagaaagtgcaacttgattgtcgagctacagtgaaactaccgagatatttgtaaacaactgccgcaaaaaactttagtgtctcttttttatgttaataagttaacacattaataaattttaagtatgtaaagttagtggtttttaattttaacgagagtattattgggcattccaaatatttattgcattttttagtaactaagaattctagattgtggtcataggcttatcctagtagttccacacttctcgtaagagaatgtcccaagttcgaatctcccctcccccaatgtaagaaaaaaaaaaaaactcaattgaaataaaattaaatattcatgaattattagagctacttgagtctctctcttttttagttcatttctacgtaattttataaatttgtaccactcttgttttttcatctcttttttttttcttttgttgaaattattttttaaattttttattctttaattcgtgatttagttcattcaatatttaactcaaaatcaaagacttttgtcggaattctaaggtaatactagtaatacaatttaaatatatttttagtttaaatatatgtagttacatgtttttccctaataacgtaaattaactattttcagttgtgtcatttaccttaattaagggtagtgatttacttttttaatgataaattatatttttgtttaccatatttaatgcacaacgtttacacaataaggggcgatgtttaccttttttaagacacttagtttacttaataagacgttttgtttaccttatgtaagacttgcaatatatctaataaggtgtgtcattttcattattttaaggtagtggtttagctcttaatgataaattatgtttttgtttaccttatttaagacatggagtttacctaataaggagtgtcgtttaccatatgtaaggtatgcagtatacctaataaggcttgttgtttctgttattttaagataatgatttacctttttaatattaaattatgttttgtttaccttatttaaggcatgtaatttataataaagcatgtcatttatcttattttaagggaatagtttacctttttaatgataaattatgtttttatttatcttatttaagacatgcagtttacctaataagacatatcatttagcatatgtaaggcatgcaatacacttaataaggcgtgtcgtttccattattttaagatagtggtttaccttttaaatgttaaattatgttttcgtttattttattcaaggcatgcagtttacctaataaagcaagtcgtttaccttatttaaggtagtagtttaccattttaatgataaattatgttttagtttatcttgtgcacgaagtttccttaataaggcgtattttttttatgactcttaataagacgttttgattaccttattttgaggcacaacgtttacataataagttgtgtcgtttagcttaattaagggtagcaatttatttttttaatgataaattatgtttttatttaatatcattaatgaatgatgtttacacaacaagatgcgatatataccttgtttaagacacgtaatttacctaataaggcatgtcgtttaccttatgtaagacttgcaatttatctaataaggtgtgtcatttctgttatttatttaaagtagtggtttacctttttaataattagttatattttcgtttatcttatttaaggcatgcagtttatctaataaggtgtgtcttttattttatttaagaaatgtagtttacttaaaaggcatgtcgtttctgttattttaaggtagtagtttaccttttcattgataaattatattttggtttaccatatttaaggcatgtattttatctaataaagtatgtcgtttactttattttaaggaagtggttacctttttaatgataaattatgttttggtacagaatttacctaataagacgtgttggtttaccttattttgaggcacaaagtttacacaataagtcatgatgtttaccttaattaagggtaattgtttacctttttaatgataaaatatgttaatgcataaaatttacacaataaagcatgtcgtttaccttgtttaagacatagagtttacctaataaggcgtgtcgtttaccttatttcaaggcacactattcacacaataaagtgtgtcatttaccttaattaggggtagtggttcacctttctaagtataaattatatcctggtttaccttagttaatgcataaaatttacttaataaagagtttcatttaccttattttaagacacgacgtttacacaataaggtgcgtcgtttatcttaattaagggtagtcgtttactttttagtgataaattatgttttgatttactttattttaggcacgacacttaaacaataggacgtgtcatttatcttattaagataagtagtttacaatacgtgttgtttatcttattttaaggtaataataagttgaagaataaattaaaaactaaattgactacatgaaatttagtggattttgataagctaatctccacttttaagacaagaaattattcgaaaaatggaaggaaaaaaaattaaatacatacaaacttttgagactaaggtatggttaacgaaaaaaagagatgacaacaactgctaagctagagtattaacaagaagttgctcatatagtgaatctaatgaaaatcaataataagaagatttgctagcatgttgtaatattacttttagttgatttcttttttcataaaaagccaacaaaaatttcaaaaacaacaaatgttaagggactggtatagtagtatactacgaatttctttattagtgaatttatgttgagtctttttggcttggtttactattttccaatgatacatatttattttaattttatatgtttttggcactcattttgtttctattgcagcttcaaccactcgtgcctagttttatggacaagcacaattgagttgcacaatattttgtgtacatagctcttgcagttttccaaaaatgtattacaagaataattaagtaaaacttatatagatgtagataattatcaacacatgatttggttacttgtgtagagataaacaaatgtcaaatatttctattaattgactttcaatatgcctacatattatattttcatcagtcaaagataatcaagtcgattcaacacgccaacatagatctcaaaacttttggtagagctaaaaagagtgattgtgtaaatcttatgttgataatacaaaaacaaaaaaaaaaccaaaatcagtagacttgtttactttatttaggcacaaaattaacctaataagacatggcgtttacctaaattaaggcacgttgtttacttaattgaaggtaagaagttacttaaaaggacatgtcgtttacctaataagtcatttagctaatttaaggcacattatttacctaataagacatgttatttatctaatttaaggcacattatttacctaatttaaggcacgttgtttacctaataaagtatgttgtttatcttatttgagggtagtggtttttacttacctttttttatagaacattgtttacctgataagacatgttgtttactttattttagagtagtcatttttgtttaccttctttaagtcactataagtcatgctgtttatctaatttaaggcacttgtttacacaataaagtgtgtcatttactttattatataatagtaatttttgtttaccgtatgtaaggaacaaaatttacctaataatatatgtttttttacctattttaaagcacattgtttacctaatttaaggtatgttgtttatctaataagacatattatttatttaatttaaggcacgttgtttacttatacgatcatcgtaataaacaagtgatgcttaaggtcagcgatgtttgaggcaatgattgcttgcttgcttcaatcatccccttgaaaagagaaacattaacaaactatatttattattttttttctttgatgtataaggaaataactttctgctctattgaatagtatattactagttcatatttataactacttgttcatgtttatttgttggctttaaaattatggaattattaagcaaatagaaataaaagtttttttttttttttgaaacaagattcatttaatcacaaaatgttaatacaatgtaatcatcaagtctagctcaacaacttgacgagcacaaggaggtacaacttctataaagctctaggcttgttaattaagacataaatggataaattatggggcactttattggcctctctacacacaaaataaacaccaacttgttctctttgcaaaagagtcttgatctgaagtagcaacccatcaatgtctcgacataccatatcagtgttgtgtatcaattcaagtgcctctagacagtcacattccacctcaaaagatggctagtcccttgccaaacctcttgctaaaatggccagcaactttgctattaatggaggagtattactttctgaatgttgtgcctcagccaacacgataacaacaaagcttgagcacttcagtttagcattacctcttgcatcaacattgattttaagaaacctagctttcgaagcactccattgaaccatctgtcaagcctcacatttttttcctccctgaacaaagttataatactcaatcagcctgtcttacaatatacaaccaaaatcatcaatgattatgtaagactagaatttaggaagcgagcataatttttctaacagatctgttcttaaattgtttgtaagagtgttttgaaaaagttttctgcaatctcttttatgttgacatcaggcaactaaatcatcacgttgacaaggttaaccatctgagcgtagagcagtagttgcttctcatctatgtctaatatacttttaaccgatgttttacttttaagagaagtggatcaagtataaagcttcttgaatggagactcgagtaagtagtcattaataaacataatatgtgaaatcaaacataatctacattcttttctccaagatcattaactagtaagtgatcacttcttaccataaaacctgagattctctactcagagatcttacaaacagacaccgaattccaaaggaccaaatcatgtaattcttcaataagaatgtactagttcattaaatatttaagcatgaaattcagttcttaattcaaatagacaaaaagttcttgaaaatctagcttaagtttctagcagataatcttcctcactcaataccaatttgttaaatttgtgcatctaatggacattatccgatgggatactcaactcatgtcctaacactaaaaaatcaaagagaataataataaaaaaaatattaatttataaatttgtaaaactaaagatagattgagacacattggcacatttgattaaacacaaaaaaggcaagagtactctggtttttctaaattgaaaagaagtattgagacaattgataattgtatattttttaaaaacaaatattcaaggttttcgattttacatacataaaagagaaatagttttaagcacacaaaatagagatagaggatgaaaaatttacctactaacaaagttcacaactaactcatttttgctcttagctcctgaatcaaaatcatataaaaaggaaaaaagaaagaatcaaataagaaacattaaaaagtagaagttataattatgagaaaatcgtagcaccaacagcactaagtgtacaagagacttatcaacaaactatacatattaaagtctagaaaatttaccacctatgttttcattttacaagaacttaaaacatatgtttttctagtagctcaactcggagacacttgatccaatagatactactataactattactagataaagcttcatcaactttgtcctccattacccacaagttgtaaaaattaggtttgtaattggaatgtctcatcagacatattaaaagaagcaaggtgttatagtgagatttctcnnnnnnnnnnactcgagaccagactcctatttaagggacacgtgtattcaga

SEQ ID NO: 161277 - DNA, 7447 bp, Cannabis sativa
aaaaagacaaaaacaagccactcacttttgtttcttatgagcatccattcttctatgtatttagataaatataatatgatatgcattattatcattaccatttgaagtaatgtgattgtgcagtaagttattttttataccaactaccagacattgatttaatgtttccttggttcctttgtattgatacttttctgcataagcttacgtggaattagctttgttacttgcagttccactaaatgaatgacttccacctataataatgtaccattttacttaaatgtgtttcacgtaatgtgtaaaacctgccataggatctaccattaataacattagttgaaaagtgatatttcaaatctttgtttagatttacggcataagttagctagagcttttggaagacttattgtgaaacaccatgtgtcaatctaacttgctgttatagtcaagaaaggcttctagcttggtgttatagtcaagaaaggcttctctagcttggtgttttagttaaagaaacttctacttgctaaagtaaatatcattttgagtgggactaaaattatgctttccaatttaaatcagtattttaatttcttggtttgccacatgcaaggattatagacccaaaaaaaaaaagaaaaaaaaaactttgttgaaagttcttacataaaaagaatttaatacaacaattaggtgactattagaacatattacattgtttcaaacctgtttagattaggtaattaatactttccaacaaataagtttgacttgaacaactttaggagcttgctcaaattagatgttatcaaattgtaatgcatattttcttttctaactttacttccatcaaaatattttttccaagtacttgtgaaaacctattctgattgatttggagaggaaatatggcagaatatgttgttcccctagtggtagaaaagttggcaagccaacttatggaggaagccatttccttgtcaaaagggaaggaacatgtcgaatggatcgaagcagaactaaggcgaatgcagtgctttctcaaagatgcagatgctaagcaggataaggatgcaaggattagcaattgggtggtagatataagagaagttgcttttgatgcagatgatttcattgatacttatatttacaaaacaaatggacaaagagagaagggtcttgtcatgtgtttcaagaggtactctcatctatttttcttatgcgaattagtttctaacttcaaaatcaacaagaatatcagtaggatcaaatcaaaaatccatgaaatagcagatagcaaattaacttatggtattgaaaacataaggcaaaagagtgaaggggcaactttaacagttagtgaactacaggagaggagaatatcttctcctcatcattttgaggatgatattattggtttggatgaagacataaaaatattagaatctcagttgatttatggacagtcgtgtggatctgtactctccataattggtatggcaggtttaggcaagaccactttggctaagatgatttaccatagcaatggaataaaaaataattttgattgttgtgcttggatttatgtctctcaagaatatagtgcagaagaagttttgagggatttggcgaaaaaagtcatgggcttttctaagatagagttggaaaagatgcatagagaagatttggtagaagaaatttcgaagtttctacagaggagaagatatgtcatagttttggatgacatatggaagaaacaagtgtgggataatctgaaagatgcttttcctgactcgaaaaatggaagtcgaatcatgctcactactcgtttcaaagatattgctatacatgctgatccgagaagtccaccccatgaaccaagtcttcttaatgatgaggaaagttggcaactactttccagaaagatctccctacaatggaatgcagttacaagtttgcctccatggactgatgagcttggaaaaaaaattgttaaaaaatgtgggggattgcctctagcgattgtagtactaggtggactcttgtcgagaagggaagcttcctatagtgagtggctcaaggttttgcaaagtgttcattggcagctaagacaagacactatacaatgcgcagacatcttagctttaagctactttgatttgcctttctacctgaagccatgctttctttactttggtctttttcctgaagactttgagatatctgctagtaggttgatcttgttgtgggttgcagaaggatttgtgcaaccaagaggtcaagagccaatagaagatgtctctgaagactacttagaagagcttgtaggaagaagcatggttcaagttgctacaaggaactcaaacggaaggatcaaaacttgtcgtatgcatgatcttttgagagaactcgctatagcaaaagctacagaagacagatttcttcatgtcatccatggtgaaagtagagctggttctataaggaccctctcaagaagtcgtcgacttgctatacacttcaattttcccccatctaagaagacaacaatgaatttacgctccttgttatgctttgacctcaatgagccagttaaagttcaagtaaagaggtttaaactactgagagttcttgatttagaaggttcatatatatctaagcttgactcagctattggaaagcttattcatttaagatatttgggactgagaggtacttggttgaaaaatctcccacgttctctacgctatctttccaatttggaaactctagatctgagatcaactctaattaatccattcccagatgagattttgaggctgcaacaactgagacacttgtattttagtgatgtccaaccaatggtgtcaataccacccaccatccctagtacatatctccctgacctccagacattaaagggtttatttatcagtgagattagtagaagtgatatagaggatttcttgagcaagctaaccacaatgagatcattgagtttgcatggtcgtctttgtattaagaaagaacacttgggaaattgggttgccaagttgaaaagccttgaatgtttaaagctcaatgcaacaagacttatgaccgaggatacaattcatgcagcagttccggagtgggatttgtcatgcctcactcatctttacaagatacatttagcagggagtatgcaaaagatgtttgacatacaatacttcccaacaaatctttctgagttgaccttgacacaatcctggctaatggaagatcccatgaagacgcttgggaaactgagaagcctgagagttttgaaactaaagcatgcagcatacgtaggcagagaaatcacttgctcaagtggaggctttgttcagcttcaattgttgaagctctcattcatgaactcagtagaatccttgagaatagaggaaggagcaatgccaaatctgagagaattggagattgttcagtgtaaattgaagattgttccaagaggcctatggccagtgcaatctctcaaaagcttgaagttgggatttatgcctggtcatgatattggacttaagattcaagaacgtgagggagagaattggtatagaatagaacatgttcttccaatataagaacatgttagtccttgttaagagtcatttcagcttctctctgtaccgaatttgctccttgttaagaacatgttttggtaattgaataaatgctctttcaaattcaatgagctatacaaactattaccctcatattgtttatatgtaatgctgcatgtcgtcaatggcaactcctgtctatcactttaaattttaatgacaatgtccaacagtcattgaaaattttagtatcaataactgctatacatttcactttcattttaatctgtagtgtttggcacccaactgacttttacttcaaatgcatataaaagttcatacaataaactaaagaacatagaaaaagaaaaatgaaaaggatttacctaatagtaatttgggatggtgctagtcaaatctctccttttttttttttgaaattaaactccatttattttcacaaacttaagacaaaactgtagctaccacaaaagtaccacgtgggtttagatggggccaagtgaagatgccacatcggacatcacagacccaatgtcttctattcaattctcatcaatggccactgatttcttgatctttcggccacttattcctcatcacaaactcctcctttgatctaccatcattcaatatttcactattcaagtcctactacacacagcaaaacccaagcttcgtagctggcaaagatggcaatggagatgaccatccaagcttcagccaccaccaacaacaacaacacaagacctcaattgtctactcctaaaacttttttcaagccccaaattagaccatcttctgtttatctacctgcatcatcaactacaatcactctcttgggcctcttcacacctcttcacgaggccaaggctctcactctccccaaggaccagattacttcttccttaactgaagtaaggaaaattcatgcaaaacatctgcttgcttttaggatattagttatggaaatcgttgtatatcacgtttctagaaagaaaagaaaccatatcataaatgaatgttttactttagcatgaaatgcttggaatttttttttccttttctcttttttatttgattttagctgatacccatttcttgaattgttgattgtgtcaattttgtgtagtttgagaagacaattgaccaagttcagcaagtgggttcgagtgtctatgacactacaggacatgttcttcaagttttgataaatgctgcgaggcctgtcattgaagtggcattaccaattgcaaagcaggctggagaacaggctttgaagatagcttctccatttgtgtctgaggcttcaaagacagcccaagaggcaattcaaagctccggcttcgacacacagccggttctgactgctgcaaaggtttaccccaatcaccttgtttaacgtttttcagctttgcaccagaaaaagatagctattcacaaccttagacaacatgctgtatcaaattagagaacagtagttttaatttaaaaatctcttggtctgatactgtgtccgtttactaattcccccgaagctttagttcttggacgaattggtaatctaaaaagtatttttaatttgagtagaaaggcttataaattgattggtatttgtgcattggcaaatttaaccagatggagctgataatgaaatgatattaattgacttgggacttgggttttgctttgtgtgagtgttaagaaatgccgctgtttaaaatatgggtggtataactagttcattcaacgttgtgttatgtggtagaataagataattatttatccattgtttgagacatttatggttacatatagatatttatattcttcttggtaaaaatatcaaacgctagcctcctttgtttgaataacagtgttactgagttgtgaagaactataatgacttcataagtatttgatttttttctcagactgttgctggtgcagcacagcagacaagcaatgtaattgaaggggtcaggccaattgcttcatcaacttttgaaacaatgtcttcttcagaccctcttacaattgtaggatctgccggagcattgttccttacctaccttctccttcctccagtctggtctgtcatttcatttaacttccgcggttacaaaggttgattttaactcacgtattatctattttctaacatacaacattgtgttcatatgcatccataattatatggctaaaagggctaagcttttgctacacttcaggtcaacttactccagctcaaacccttgatcttatatcaacgaagaattacattatgattgatattcgaacagagaaggacaaggacaaggccggcattcctcgccttccatctagtgctaaaaacaaaatgattgccattccgtgagcattttcactttggaatttacttagcaatatctatttcctcaaaataaatcttttgattttttttaatcatggttcttcaatgttggttctatttgtattcattcagtttggaagaggtgcctaacaagctacaaggcctcgttagaaatgtaaagaaactacaggctgaaatagcagctctgaagatttcttatctgaagagaatcaacaaaggctccagcattgtcatattggattcgtgagtacttcctttgcttattttcatagcagcatttgtttttgctaagtttgcctaaacttttatttttgcttatagctaagtataaaataaatataagatttgatgaattttttttaaataaaaaatgctttctaaaatgtttgtatattattaaaaaaattgttttgtgagtaaactaagaatgtaaattattttaattttaaaaatagtttttcaaaaatcttttcgggattttctagttctaaaagtaaaaaaagatcttatagaagctaagtcaaacaatcttgtatatttttcttcaccatttggctcgctataggtattcggattcggctaagatagtggctaaaactttaactagtcttggcttcaagaactgctggactgtggctgatggcttctccggaggcagagggtggctgcagagtcgtctaggggtagattcatacaacttctcgttcgcagaggtcatttcaccatctcggatcattccctcatcagtaagacgttttggtacaaccagcaacacatctcagtctgctcaaaaattgcttccagaatgattcatgtcctaatttaagtataaacaagaaagacaaggggaaagaagaacatcgttcttattggaaaatgccgtcaatgtgaacaaattgtttagatccaagtcttgtctaaacatttttgtaaatcttttttttttttttctttttttgatctggtctcacttttgttgtataatacagagcactcagtacagattcgtcttttacttttttcctcataatgtggctcaaatgatttgagggcttaaaaggagaaaaccttgcccaagagaggtaaagatccttctataagaaaagagaggtaaattgcaaagccagtgcttgggaattgggattgagagggtaggataagataattgataatccattctgaaagcgaaacaacaaaagagaaggcaatctttcttgatggtttgtgttcactactatgccttttgattaatttaaaatattcccccaaatgtcctaaattttgaataattgcaaagtgaacgaataaaaatgattaataccgaagtgctgtttcggccggtgttggctttgtattgtgattgtgcttaataaagtcattcttttcaggtattagcaatttttttttccgaattttgacatgtgatgaattatggctcctaaactttttttgtcgttaa

SEQ ID NO: 161278 - DNA, 7615 bp, Cannabis sativa
tatatatatatattttcttttttcatgaacaatttgaacactgaactatgaggaacttaaaaatcaatgtcttagtttacgaattttgttggaaaggaagttttgaaagctcggccatttattatgtgggggtctcatcacaatgcaattgtagctttaaagaggttgagaaaagagttttaggacatgctacaatttgatatttgatcttttccttttctgattaaataagttttctagaataaagtcaaagatatttcagtttgatcaagtgaaattcacaactatatattatatacatatgccatttataatataccaaaaggggggtgaaacactaccttatttgccacattttatcaaattttgggttgagtcttgtcatgtctatttttgatttcaaggatgaagagttaacaataagaacatgtctaacacaatttttcaccatgtttaggaaatgttttgaagatggtctgtcacagaatgtgtcaatgaatgatgcttctgtcactactacatcttctaccccttatacgcctccaccgaatgcaggttctctttctctctctctctctctctctctctctctcgctctatataaatatgtatatatataaatatatctatattaaaatgacttactagtactagctggactgagcaatgagtgcttaacacaagataattttactgaaaatttatgtttttaatgtccatattctgtggcgataggcatagtttagtgatacgaacatctcttaaaaggagtttccaaactcagatcgccaaatatcaaaatttagatccctaacttaagtgagacatcaaccctattgtgttaacatctaaaaataataattagtattttagtactaacaattaaaagataaaatgtgccatttattagaggtcagacataattgtgatactaatattaggaataagtatttttattttgtttattagttatatttttattacaaatttagtgtcatcatgccacattttacttcttagaatctagtagttaccgttttattactcaccacacataaaaaaacataagaaaagtacttgcctcataattcttgaacatttgtcaattaccaagctggcttgtaaaatccatgatttacataacatgtaagataaaaccttacaaggaattttcaatgagaccactattgtaagacatatcagatgggctattggtgaaatgcccttatgtagaaagaagaatagaatggggattgtgtgaatagaagagagagtggcttagttagttaataataaatagagtagtgtgagagagggaaggtcatgggatttttgtgaattgttgggatggttagactctcgaatctttggaggtttatttacgtatcaagtggtattagagcaatccgattttggagagaatgagtcaaggtagagtcgaagcacttgtggaaagattggttgtggtgcaagctagaggaatgacaaaaggagttgacaaggttgacagagttgagagagaggggttatacctatcaagaaatttcaagagtaaaactaacataccaatgttggggtgacaagtctatctatgcaaatttattaaacataggaggcaatgcaataaacattagattttatggtttcacatttggagtagttggtgaattaaacttaattcaatacatccaaagagaaaatcactatgaatggagttcaacacaagcgagcaagagatccaatctaaaattcgtgtttctcaacggttgggatttctcacttttggtggtttggattcagtaggtggttgttgcaggtaaagaggtatttccaacttagtcacatgttgaaaatggaagttatggtggtcaatatgcaggggaaggccttagtttggtttttatacatagaggatttgctttgtttccacacttgggaaagttcaaggtagtatttattgtgagcttatgttctctctatgaaggctctctttgtgttaagtttttaaacatttgttaaggctctacagtggaagtgtactaaaaattatttgagtcaatggtgttgccattacatggttggttatctcaagaggtgttggagagtatgtacatgtggttatcgcaagaggtgttggcaaataaatacatggaaggccttaagcctactaatcgagctaagatgcaaattatgaatcctcaaggattgatgaagatggaggcaaccctaatggttgaagtcaagaatagggtcatgcaattggatcagaacatgttgggtgagaattggactagacccattaatttggtccttgtttatacgagggctaagttctcttctattaagttcatcctaccaagtcctacttggacagaaccaatgtcacaacgtctggcggagcaacgacaactaaacttgtaaaaattccagtgatttattgttctaaagctggcacattgatgtcaaactttagacttggtagctgtgatgactagtggttctgcacgcatagtgcaagaattgattattaaaggtgcttctcctacacatttcaagtgcggtcaaggatcctgatgacgaaaacttctagactatttggcattgatgctggtggggctagaggaggctaagggtacaaaataatccatgaattcattgttgggatccaccatgtcacacgcacaaccacttgggtagaactgactcccaaaaactagcctaagaggtgaaagttcttaagtagctatatactactaaccaatcccatacttggttagtgtgggatcttaacagttacctcgaccacaaagcttgagatcattgcattgaactagtagaaggaatgatccctatttcagtgagatcatactagtattgacacctttcaagccttgatgaatgatgtgttcaagcaatatctttttatttttagttttttcatgatatccttattctatagctcatcaatgcaagaaaattttagtcacttgcagcaagtaatggagattctttagattcattcactgtttgtcaattcaaagaaatgtttattcaagcaaactatgttggagtacttggggcacattattatggcacaggggtaggtgctgatcccacaaagatcaaagcaatggtgcaatggtctcttcccaagtctttgaagatgagcctttgtcaccatgaacacatcttccctggactctagcacgtttgtgtagcatcgaaaacaagggatgtattttggctccgccttatcctgctttgcttgcttatgaccatcttggctctggtcattagtattccttttctttccagaacagttgttttgagccagggttctcagtttgacacagtggctcctaccaacctttgatttgttcggacatagttcttctgccaactcaatcaagatatacttatctgcttgcttcaaaaattctttcatactatagctggccctctctgggggctcccaaaattcagattttggctgcaatctatcatgtattgtcatgaacacattttcatccaccatctttacctttgtagcttcttcattgaagcttcagagactcaatgggatgcttaagaatcacaagactattttccctcctttggtcatgctcaagcaactttaaaaaaaattaattccgagaagaattgcagccagggatataattgagttcgccgcaaaagtactttaaatgtcaacattcaacatcttagtataggctattcaagagtcaatattttaattgatcagcatatggttgattattatttcttggtttgctgctataaatatatgtcatgacattgtttctaacaaaaggtttaatagcacactttttttagtaccatcattagtagtttcatatggtagttgggagttatttttcattcacttgtatatcactaaaccaggtcgactttattaggtgattacacatactgggattccatggcttctcctgaagacatggaagagatgtggaataatcctgaagtttttaaagagtggagcaaatcgggagagaaaaagggaaaggtccgcttctcccaagatgaaaagaaaagaccatatctttctcgaatagaagtaaaggtatttctctatatgtcaacaaaacaagtcctcaaatttaagagctattcaacaatgtcataaagttattttgcttttccttttcatgtgttttaatcttttgagatagcatataacaaacaagtttttagtttgcttaatgaacacagcacaataaacaagtatcttttgagataccatacaacaaaaaagtgttttcagtaccaaaaattgacatgatacaatggcaaaatttgatgtttgcgaattgtcttcttcaaatgtatgtgtaattcaaaatcacatttcaacttttttgagtgacaacacactttcatatattcatatagggagcatattttgtcctatttccacaaaaaaaataatcttttatggtctaagttttacacttgatgatattttcctaaaaataaattctgcattattaatctgcatccatcataaatgttaaagaatgaaatttttccacatattatggatgctacacattaatgatgttgacttacttgcaggcagttgcagaaattatactttcgaaacacttcagtacaaagggattgaaacctgtaagacactttattttttatttttgttgatgagacacacttgttttaagtttgtatccacatgaatcccatatggtatctgtgttagtgatagtgtatttgatagagaatttaaagtataattttcataaatgaataggtagatgcaatttctaagtttgattttattcacagtcagttctttgtgcccttgcggagcttcttagcatgcgttttgtatatggtatcggtccaaatgctggaataatgggactagactattccacagccttctggctttacatgtatgtaaaataatgtaaattattgagtaatgaataaattaaaattatcatttgtttacccttttggtaatattagccaaaatgtttcttttttgaatgttgttcttgtgcatagggagttgggcttcagggcttataaggtggattccattgatgatctaaccaagccatttgtgtccatgtactttggtgcagcatacttcctctggttatctgaatatgaaggaaggtatgtttatttagttcaaaactaatttgaattattacacttaaatactaatttacttctgcgacaaaaattgcacaataactatctgctattaactttacattagaatctaacaacaaagttacaagttgattatagatattttttttcggtcgaaaaatagacttagactactcaagtgcaatttgtatattagaagctattcatgtataaatttttttacattcccttgatgaagtcatgtctaactgatgatgttgaaaacacagggaaagaactccacaatttgtagttcaggcttatatagcaggaccaaagaatgtgaattttcaagagacaggtccaatgtggctcaaatttgaggaagctttaagttattttgaagacataaagaagtatgccttttccttcttatgcatgatcagtgatagtgtagaacttttctctagaaaataaaatcatttctaagagcgttcacattagcttttctactttatttttttaaaatatttaaccaaaattatactttctctattttacctcaaacttttacattacactatacatcagcttttttattttatttttctgcattcatttaaatattatttctttaatatatataaaatacacaataattaaataatgaacaaaatatattattaaaatattgtttgaagaatgaatagtacttttctacatgtagaaaaatactttaacattctttaaaatttgaactaaaatagttaatacaatgtatgtagctgattttttgtcattttttcaccatctcttctttattttgaagaaaagattctcttgcaaatttacttgaagatgttgaaataatttgaaccaaaatatgcatgtatacttttttgtagggatcaagggggctgcatcatcatgtaagttgctcaccccttcatgttgttgtaaacaattctaaacatgccaaatataccttgagaattttatttctaacattggagaaggggtttcatatttgagatttctttgtgaggagaggagaaatgtagtattaattactaaccacaattgtattgtattagttaagggtattttattgtatttgtttttttattgttgtaatataataatattttacaatgtagccattggtacttcacacattgtatgttatgtataaattttattaggcttgtttggaacacatattttattgaggaaattttttgtgatagaattgttgtggaaattgttccacatagaataaatagtagagaattgagccatacataagaacatgagctactccactcattgacaattagttttaagatggaaccccatgattctcaacatggtatcagagtcatatcccttgcgggcaagtgatcctatccgatccgcacctatacagatagtgactatgtccactctgatacggttcaagattgatgagcaaaaaatagtcatcatcttgagggagaatgttgtggatattgtcccacatagaataaatggtagagaattgagccatacataagaacatgtgctactccactcattgtcaattggttttgagatggaaccccataattctcaacaagaattagtaaagataggaaaaatacttttctaaaattatctacaacaattttttgtttttaatctttcacctttttgaatagatataaagtcttggttatatatgtaaaattcttaaatgattttatgaaaatgcactttatcaatttttttatttttatctaaaaataatatttatgctgaaaaaattgtctttttgctgtaaaatattgagaataaccaaactaaaatatatgtaaaatatagggaaagagataagtcaaagggtactgtaatgaactagaaatatatatgaaatgatttatgagtaaaatcaacaaaattagacttaaacccaaattcacaaaattaggcttaaaccttttataataaaattaaagaaaatcctactagtaacttcaagtcagaatccaatatatttcttggtattttaacagagatgaatatctatatatacataataatataatttcggtatggaaatataaaactaaaaaattttaaaaaataaatttaaatacaatttataatttaagtggataatttttgttttttttttcaataaattaattctaaattaaatgcattttttttcactaatatttataaaaatcttgctgcataaatcatttaaaaaatgcaatatatatttcacctattatataaaaagtctataaaatataaaataaaatttgttgtgcctaccagtttttgttgtgctttaacataatatgcatttatactttagggtccgtttggtatgcaggactggatttgattagacagactaaattgtctaatccactgtttgggcatgttagtgttggaatttatttta

SEQ ID NO: 161279 - DNA, 3690 bp, Cannabis sativa
tgtataaaaattaaaacataacatgatttgattaattttctattttcttttttaaaaaattactgaaaattcatttccagaaacaagtgatttatccttcatacaaattaaaaacatgattttattattttctcacttgttttattttctacatttttctctttcgcaaaagacatttttatggtgttgaaaagttctttatatgatattgtttattaaaagttttcttcaacctttaatggctagacaacttggaaactattaacaaaaagattcaacccaaaaataaaatcatatttagcacttcaccaactttcttgaccttccatacaaatactaaatccaataccaggactttaactctgtaatgaaaatgtaaacatgccatcttctaccactaccacatttacaaacaaataatgagaatataacaagaccttgaaaacaacccttttaaaaaataactaaacaaagagaaagattagttagattcttatttggcaggacctactgccttcttgtaggtataccagtttgcaatcaatagatatacaaagatgtttaccaagctgaggatggccaaaacccagtagaagtagtcaaggtgacctctgttcaagttatcaggaatccaaccgagttgcccgttccttgtggtaacattggttacaatagtaacaagcaaagtgctcaagtaattgcctagtgcaacggttgtgagggagagagccgaacacatacttctcattgcgtcgggtgcctggtcatagaagaactctaactgccctatgaaagtgaaaacttcagcacatcccacaaggaaatactgcgggacttgccagaaaatcgacatgggaatgtacttgagatcatagtagttgttcttgcgaacaatgtctagacggatgacttccaaaatcccggcagtgatcatggcaatcatggatatgacaagaccaattcccatccgttgtagctgggtgaagcctctttctcggccagtgaacttcctgacgtatggaacaatgatcttgtcgtagacaggagcccagaagaggacactgagagtgtcgaagagggaaagagacgcagatggaatttcaaagtgaggccccatgtgttggtccattgtgttgccttgcaaaacaaacatggtgctcatttggctgtagacagcagcaaagacaattccagatgcccatataggaagcaaacgaataacagccttcagctcctcaacttgagtaactgtgcaaagtctccaggggtttgccgatccgccctttttttcatcagtgtcagtctccacagctgccttatcaaagaagctgcaatattacattgataggaaaaaccaaaactttagatgctaaagaaaacagaagaaaacacattcaaacattctataaaaaatcagatatttcaaggattttagaagaattgaatgctatactgactttaacttgtccgtatgctcaagcttccggctcccttggatagtacactcctcatcagcagtttcatatagaagagacttgtctttgggaactttaacattgaattttctgaaggacgcgaaaataacctgagcaatccttgtaaggggactccctccaggtttttgaatacgatacaatcgactacctgagaagaaaaacacaactgcaatggccattgcaacagcagggactccgaatccccaaccccatccgacattcatttgaatccaaactaaaactgatgaagcaatcagtgctccaacattgattgaaaaataaaaccaattgaagaatgaacttttctttttcctctcaatctcgtcagtttcatcaaattggtctgcaccaaatgatgagacacaaggtttgattccaccagtaccaagcgcaattagatacaatgagaagaagaaaaaagaacgttgtgacgctttagggtggcaaccagagctgttgcaggatggctttagtccaggaacagaagaagataatgttaagaaagtcacaccctgaagggaaaattgaacactaagtcagttaaatggataaaatatgttcaataatgagtttgagaatgtatgctgaatggatttgaattcaagaatgaaactaatgaaacacatacttgatccaaacacatatccaagtaagaaacttacaaaaacataaataatggagaagatagcaattgtccaaaaccttcccaagtatgcatcagcaaggaaggcacccagtaatggtgtgacataacatgttccagaccaattcgtcacactgttggctgcagcggcatttcccaggcttagacgatcggtaagatagttcacaagattagtacctaatccatagtatgccaacctttcacagcattcatttcctgcaagaaaaacatcaaaccatttcagaagacttcaaaccattttgctggtaacaaaaaagacatgaaaaaacttaccaagaatgaaacgacatgctttccaattcccggttgtcttcttattagctggtttattcttgatatccacagtcccatcttgtgtgtaattgtcttcttccatggtgttgttcatgttgtgttttctgctaggaccctgtttagcctagtagttatctgcatataatcatgccaattcatgagattcaatcattaaaaacacaacacacggctgcaatgccatcatcatcatgacaagattatgaaagtgacacaatggtacatacatcatcatgctcttttcttttgctagtgcttttggtagttgaaatgaatagggtgggaacacaatagaaaaataatgctaatatgaacatacatatctcaacaagtacatgatagtaacataccacaattatgatagttggataggtgattagcgatattctataaaagttgttatattaaattatgttgacccaatacttaattataacaataatgatatgacaccagtagtatctaacaccctccaaactattagagaatattgctaatcaattgtgtaaggccaacctctaaatgctcttaagaatattatcataattcaggcagcatgacattagtagacttttcttgcacttttagaacgaatattacactagtgaagagcaacaccacacacaaaaaattcatatataatatatatataaacctgcaagaacgggagaataatatgattacatcaatttctttgagagattataaaatattaacatgattaatgggtttgactcagccagtaaaaccttttaagtattctttcgtttgtccaaggcacaacctagaagcactcaccctgattttaatatttcaataatttctattaaatctaaattgaaaatatgaaaatccaataaaaaaaaaaggtacatgtgcatcaacaccaatcaatggatagaaagtcaaattttagaatcaaatgtaaagaattcatttcttaaaccaaaaatcaagtcgtggaagaaaagttgaaataaaatataaaagccccatgaataagattcttaaaacatagagtttgattattttagtgcaatatattcatttgtttacactatacgagtcaaaacaaaagataagattgagttcaagagtgcatttttaaaccccttaaagcaaaaatttggaatctttaaacaatatttggaataaaacgagagaacccattactgtaaatatgttttacaattcaaa

SEQ ID NO: 161280 - DNA, 3068 bp, Cannabis sativa
  modified_base (2910)..(2910): a, c, t, g, unknown or other
ctaactgtcttaacagtcttaacagcatggaatggaagaaaaaagattatggtagcatatctagttgttcattatagctagaaatgtccttaattatgtagcaacacttaattaataattatattatgggtttgtgtttgcctattaaattgtattatatagtattttattaaattatattttataatatcattatgtttagtattttttatataatattaactattgaggctagctaaaatagtcatatatacatgtgtgttggggttataggattgaatttcatgtatgtaaagcattttttttttttttttgaaaaaaaagaagtattatataatttgtaattgtatatatatacatatcaatataaaatattttaatacaaattaatactacatgatattatgtaaatatctaatgtacacataaaacataattaatgcacggaaatttaattagtaattaaacaacataattgagtgttgttatgagagtaacttaagatgcctacacatgtttattcatagagatcttatttagttgatcaataataattaagaaaaacaaaaggaaaaagtagaaaagaagaagaggtaaatttcctttcttttctttttttcattttttgccttttattaataattttgatcaaacttacctgataaagcataggtaggaccctatactgagagaggtaagaccaaataaataaattaaaaaatggcaagagagctttttgttgggtatatagagttgtttaaatattttatataataatatacttatatgtaccaaatacatgcatacacataattagttgaagcaatgtcgatagtatagttggcttatgtaaaagcatgcaccatgaggatgttctccaattattggcatgtggtaaacaaatcaaaaatggccacgtcaacattgcaacaagtagatcgatgagtccacttatatattctataataatagaaatatataggtatataaataattaataatcttatattaattgaaaagaatatataaggggaaaaagaaagttacaataataaacaccatgtaattaacttttctctacacagaaagattagatttaataacacttttataagtgtgattttctggattattggtcatatacccgacataagtcacattatattattggtaatatacctagctccaatgataactgctaaattagttatatatttatcatgaaccagttgatcatgtctatatccatgtggtaataattataagctctacacacgttaactggtcgttaatgcagttctgatcatttgtcggataataattatatatatacatatatgtaggttggtatatatatatatatatatatatatatattattaattatatatataattttttttttgagttggacaagccattatggaaagttgtgcacgtgacatgccacatttataatgtagagtattgttatcgggtaccagtagtgactattacttttaaaacgtgtcgtattacgattgactagcgatactccctaaaagctattatatttaactatatgggacccgatattaaatttaatcaatagcgatagtaaaagtgcttgataatactagtgccttttagcatttctcaattatcatatatgtatttcatgacaagccattaagaaccgtttatacatgtacgtgatgatatatatggatcattcagttgatcaccttgtgtccatttgaagaccacaaaatattaattgtggcaataataataataatgttaaggataaacaatcgaaagtgatgaagtggacgaaagattttctttttcgatctcttctttatatatacatgataatatggaatattattatatctgacgtgccaatgatatcatttttatttttcatatatatgtataatatatttataatacgtgtttaagattaaaaattaagtagggtttttcttttttctgaacaacgacaacagagtagggttcaaaaagcaatatataaatttatgcagcatgcactgcaccaggacgccattttaattaagaaaaggacttgtcctttttataactacactataggagaagatcaaagaaatttgtgtggagtgaagaccctacctacatattggataattcttatcatatatacatatagggatattcataaaattgtcgatccaatccaatctgcacgatttaattcaattcaatccaaagtgcggatatctgtacttgtgcgaattggattggattagaaaattcaaaatccgcacatgtacggattagatgttgattgacatgtaaaagtaaccgattcaatccaatccacacatatttataaaaaattaaattatatatataaatgacattttaatataaaaaaaatagtaatttaaaaatataatacaattatatttcaaaacttaataaatcaaatgtatattctatgcttatatatcatccacttatatacaatttaaaataaaattaaatatttctttatacatacaatttttccttccttttgttatttactattttatttgttttaatgttgttgaagacataaaataatcatactttgttttattttgtaactagttatgtgaaaaaaaaatattttttttcataaatattaaatatttaatattagaaagtaaccaatccaaaataatcaatcaaattttcgcacttttgcgcattggatttgagctattgtgtggattggattggatccaaaaaatgaaatccgcacttagtgcggatcggatgcactatgagcaaaatagtgcgaattggatttgatgaacacccctacataattacatttctacacatattttaaattctacaaatattttaaatataacaactctatatctattctatataaantgtggctatataacagaattcttagtttatgagaaattattaggtgaattttttttaaatagaaaaataacaaattattagatgttgtcacgtaaatggtcagcatccatgtacttagttaaacctaaatatatatataattaatccacttaaagtgt

SEQ ID NO: 161281 - DNA, 3819 bp, Cannabis sativa
  modified_base (253)..(256): a, c, t, g, unknown or other
  modified_base (850)..(860): a, c, t, g, unknown or other
  modified_base (897)..(905): a, c, t, g, unknown or other
  modified_base (958)..(968): a, c, t, g, unknown or other
  modified_base (1036)..(1052): a, c, t, g, unknown or other
tactattactattttactcttgtgagaaaattgggaaaatgtatgtattatattttgtgtgaggattaaggatgcatttcctttctctctataagccgctcttgtgttatttaaagaagagaacattgattattctggatattattgttttgattcgagaagtggggttttaggcgaacaaagaaaaattaaaaccttaaataaaactaacaatacgtggctcgccacgtaacattcacctagtatatatatnnnnatatatatatatgtatatatagtgtcttcctatgtaccactttggtttgaagaccacagaacaagtgaagaactactcagcaatcaaaaagcttaattactataccactctttatgactaagtcaattggcataattctattatacacaaatttataaacaaataatttatctatatgactaattctattttagatgacaatattaaacaaatacatgtattgattatttgaaactatacatcgtattgaattatgaactagaagttaatactttatcaaccattagttaatttagactcgattattatatgctagctaatattttatgcacataattatacataataatctccttatatttataaaaatatgtggtcccaaaatatatcatccccaagcaagtctattatagaattatttcaatagggaaattttatttacaccctattttaataatttatatatattttaataaaatttataactttaattgtacaaggttttttttttaatttttttcttccaatttatattcttaaaaaatatacctatcaaataaagataaataatattttaaatattatgacaaaaannnnnnnnnnnaaaattatatgaattttttttagaaaaaaattaaaannnnnnnnntatatatatatatatatacacgagttaggaaaaattatgaaaataaaatcaannnnnnnnnnnaaattaacataaaataatatgagcaaaaaaattttaaaaaaatattaaaaaaatattaagagtaattnnnnnnnnnnnnnnnnntttatattttttttaataataaggtgtagttatcttatggggtgcaaatataactctctttcaatataataaaattttggggtatttgaggcataaatgcctatattttttttttttttacatttatataccatttgttttttcttttcaataaattaaataacactgttatatgtgctaacttggttgcgttgattgatgtgtaactctattaattaatggtcattattattaattgagtttaaaatatattaattataatttcttacttctatgtccgaaatcacatattaaaatatattttttttttatttttttcttaattatatttgttataattacaatatcattcacataaattttttaaaaaaatgtatttaaataatttactataccgataaaatagagttcctaatacaaaattttagacttatttttgtcactataaactattcaaacttcttaaaaaaatttacagagatggtgttttaactataacaaacacaactataaaaaaaaatattttagcctgtattttcctcaccgttgctgtcgctgctactcatgagaggggaccatcgagtgagcgagagagagagtcgagagtgcgagatagagatatattttgagagatcgaggagagttgaaactgagatgagagtgaaagagaaagagatatgagagtagaaagagagagtgaaagtttattttgaggtttaatggtggttttgagaggttgaggaggtcaagtagttgagagcacaatagaaaagaagtagaagagaggtatattttagggttttttatcgtgtgaccggaaaatttcctatccatccctaaaatctaattttcaaaaataaaagaaaatgttaggcacgatatttgtggtgcttaaactaaaaagtcggccctaaatattatttttgattcagaaaaaaataaaaagttttaggcatgatattagtgtgtcgaccctaaaagtctacactctaggcacgattttttgacgtgtctaaatacaacctgccagtatcccattattcttgtagtgtctgaagggttggggcccgcctccggtttggacttggccttcgcatgctggaaggtctaagttagtgatgacgcgaatcaattacattcttagtatgccacgtgttgttcatctaaaaacgtggataacaatatgagttttaatatattaattagttatttttactttatattttagtattttattatttaaaatacattttattaaagaggtttaaaattatttagtatataacaagctactatagtaaagtgtcactacaaaattttttccttttagtcataacaaaatttgtggctaaaactaaaatagttgtaaccaattataaatcattatatatatattcttatgttgtgactaaaaagttggtggctaaagtattagtcacaaaaatcacaaattgttgtgactaaatatatttttagtcacaacacctattgtgactaaaactaaattagtgataatttgcatgtgtataaatattatgttttagtcacaagtaactttttattgtgactataaaagtcgcatttaataaaaaaaaaaattatgttgcaactaaaaaattgtcactaaaagtaattgtttttttgtagtgtgttatttcaaaaatatatattatacacgttttaatcatccatatttatatatttatgataatatatatagtacaaatattgttggaaaagcgttaaaaaatttgttataatataaacattgaaataaagaaaacgttgacgtaaaattataattaaaatcgtataaagggtgcatgagatgtgtaaaattccaatattttatggaaaggttactgattgactaattatacaatgggtaacattaacatttacgtaccaccaaatctagcttgcccacaaattatgatgtgggatcacatttatataataaattttaaggttgttggagattatatagttcaacgcataaaccctaatagagatatgaatttcacattgatcaactctcattaactgggctgatgtgttagattgactcaagtacgtagtacgtactcataaatgatccatatatgaatatgtgagagtttcaagtcaaaaggtaataatagagaaacttgtgaggttaaatatatatataaatatatatataggtactcccatactcatgatttgctgctacaattaattgatataatttcttattgaactaatcttatattgataactagggaactttacatattggggtcggtacgttaccaacaaatgcttctaataacgtctctataacattattggtgaataatcgacacctcattccacgagtactagtcaacatgtgctggccaacagtgttgctgcacgttcacttacacaaaacatccattttaattagtttaaataataataaaagctatatttacataccattgttattggatattagtgctcaggtggcaccttaaaatttgttagcgatattatttaaaagttattttttaaaattatatgggacccgatacttaattagccaataaaagctgatgtatatgacaagaaaggtgctagccaccaaaaatacctttaagcaattctctatatttacatatagattatcgagcacctggacccggtgctttctttggtggtggatcaggagctactacaaaaacaccctttagaggcggtttttaagccctttaggcgtcggttttcgcgaaattcgctaccgacg

SEQ ID NO: 161282 - DNA, 4458 bp, Cannabis sativa
ttcaattaatgaggattcataaaaaattaatataaatgttattgttaaaaaattattagtatacagttctctgtagtaactcagaaaaaacacaggaggttcgcataaatggcataatactatgattatcagatatccaattctatgtagtatgttcatcagctaaacaaaggatgtatatgcatcattcctgggaaaggtgtaatcctttagaaagctactaatcactcctaaatcctaaccatacgcgtgcttccttctcactctttcattcaggataagatgctcttttcatagagataataccctagcttctacacatcaaattcagtctctagaaaaatgacaaatggcaatgcagataaaaataaaaatgaataagttactaaaactagaaacactcaaattacataccgaatgaaagtgtacaaatgcaaacccccttgaaacatgagtaaatttgtctctaacaaggcgaaggtcctgcaagaaatcattaagacctctccttttatatgctaaaataatttattaaaaacaaaacataaaatctaccgtggaagtagaaacataagcgcaaatataggaaaagtaactcagaatttacaaaccttaatcggagcatgcttggaaaattcataacgaagcatttcttcatcggcattttcatccagtccacgaacaaccaatacatgagtaggacctaagtagaaaatcatttaatcacatacacacgtatatttaaatccaaacttagttgtaaagctaaaaatattaaaacaaaccaaccagcttctaatcctttttttcccaaaggtgttggatttgactgagaaatgtctgcggggggagcatcttcagatcgtgcttcattacactataaagaataagagaacactttttctttatatatatgtataaaagagaacttatacttacagaaagaaagagatcactttttttaataagagaaattatactaagagtgaaaggaagagcttcaaatagtacaaaaagaacctgggcaaggaatgacaatttagttatagcaatccttaattaaaagtgagaataattaagcacaacccgcatatctaaatttcatattttagatactgtgctgtgagtgtttggagagggtgtaattatcatgaagctggaaacacacaaaattattccacacatgtaaaacaagccattctcatcagtttagaaattcatttaagatcctgcatcctgccctgtaagaacttagcgatgaaccaaattaaaacaaaaacaaatgatgaaagattttttttattattttttttataaaatggttgactgcgatgttaaccggaaccaggtaacaaatgttgaaagatttcaacaatagataaaacaacaaacctgaaaacaagatgtcctccgtgcaaaattaatgtagccacaactaatacacatccaatcagatggcactgtgacgcttctatggttacccactttggtggatccttcttgcccaagtgctccaccagcccctccagttggcttactactgcatcacaacataattgaaaatggcaaaattaagcatagacaaaatgcaagctaaactacatcataacattgcaagagcactggtaggaaatattgcaaagaattactcgcaatttgacaatttatactcatcaaaatgccacaccatctgacctccaaacattattatacaaccttctatcctataaaacccaagttatcaagaaactgtatgtgtgtgtgaattgaacacttagaacatattactctcattccttaaacaaaatctaatatacacagacagtcatcacatacaataaataaaaaaaactacattctaaatttatatgaaccaaaaacaaatagagtatgattataaacctatactcaaagaaaagcttcctgccatcaacaacaagaccgtcatctccaagcttctccatcatagcacgtgcagctccctgtgatagactttcctttttaactctaatcacagaaaccaaagatatatatataaacaaatatagattcataaaaatagagtaccacagaagggaaatcaataaaagcaaatccccgtgatatgccagagtttcgctcctttataactcgaacatgacgaagaggaccccattcagcctgatggaagaatttaattcttaagacatcattaaagaaaaaataaaattttagataaaagcattgaacattacgaggatctgataaagatcttcttcagttgttttttgtgaaagacccttcacaacgacagtagctgatggtgcctacagaagatcaacatcatttaagatttgtaagaagcgacatagttaatgagataattaaaaagaaaaaaaaggaacaagagataccacagagtagtgatcacgctgacgcttctcttcacggtcacgtcgcctctcaaacctttcatgtctttcatgcctagcatcatcagagctgtcctctcgatgacttcgaccatggctacgaccacgaggagatcttgatctagtatggccattgtcatcacgtccacgagatcgagaacgttcatgccttctacatggactgtgatctctttccctatcatgccttttgtagggactttgatctctttctcgatcacgcgattcccgcctcctccaattaccatctttcctaccacctctatcataatcagaatcataactattccgaccatagtcatagtctctttcacgactgtcctccctactactttgatgggaagcacgagacctatgatcataatcatcatgtgcatactcatcctgatcacgtccccctaccctagcagatttgtcaaatccaatatcacgatagttttcaatatttcgatagccatcccgaaattcgtcaaattccttaaaagtatcaagctcaggctcatgaaaagtatccatttcatgatatggatcattgtatggtttctcatgtcgccttgattccctatcaattgggaattcttcttcataacttctccttcttgactgtggccaaataccaacatgaggatgaggtgggggtgggggtgggtaattatccctattaataatgtcacgatgaaatgcatttctcggatatatgttatcccttgagtatctttcatctaaaaaccttctgtcatcatatgacccaccaatcctgcaaaaaggaaaaaagaacataaaattggaacaagaaagaaagcaaaatcaagacagtagcaaagcaggaactagaaaacggcaatgaaagttactttatggtcattaataaaccaattacagccgagcgaacacaaagcaacattaagcactcaccgaaagtttggttcgtgaactgcaccatacccctccagagcctgtggattgaagagaataagctatgtcagcaacaaatcaattattatatgaggggttaggcaaatccaatccatatcctcagtgcccatgggttctcatttatcttaaggatgagatgccagaaaaaaatggacaatctcaaggtcctaaaaatttcttgtactatcatccgatataggtgattattaaggaggaaaccacaattacgctgttattatcccatccttgctgaagaccatagcgacccggatccatttctctagtcagaacagccctgcaaagcttgttgatgatctttcaggagatgaaacgttgttaaaccttttgctttttcttttcctgtataatatgaacaaacacagacagagttatggcaatgatgaaccaacaaccaataattcccatgatttgaccgaaccccatttggcttcctttccatattcattgcaaaaccctttccagaaactccaaaacatctcatagattttcatatacgcggtttctgactagtaaacaatagctaaaccctataagtatctaactacacacaatcttcggcaaatctttagatagtacagtaccatctgtaacaatctttccccctaaaacataaattatcaagctcgtatgaaatatattaagttaccatttcacgcaatttaatctataaggaaaacaaattggggacgaaaaaacataccaaagtgttgaaatcaatcagcggcgaaacagcctcttcgttctttcataagttttttagggctttccttagttttttctccttttgttttttctccttgttctttacgagttagggcgaagaacttctaacgacttttgtatcccatgtccacctgatttaattaatataatttaaataaattttaaattgtattttggaaaagttactttcatttttttttaacaaaaaaagaaaatttattccctcactaacatttcggccattacaggggctgtttagaataagttaattctagtaagggaatggtaatgtgaaacattaccttgtttgtttggagggtttagtcttggaatgttattcccatagtaa

SEQ ID NO: 161283 - DNA, 9006 bp, Cannabis sativa
atttcaagctttagaaccatatcttctcaaaaatggcatcagccataggctttcttgtcctacaacacaccaacaaaatggtgttgctgagagaaaacatagacatcttattgaaactggtctaaccttgcttgctcaagcttctatgccactttccttttgggatgaagctgttagaacaacttgttatgtcattaatagacttcccactcctgttttagctcatgacactcccttgcacaaattatttcataaacaacctgattataatactttaaaagtttttggttgtgcttgttaccccaacactagaccctacaacaaacataaatttgagtttcgttctgagcaatttacttttcttggatatagtttgaaacacaaaggttacaaatatctatctccatctggccgaattaacatttctagagatgttattttcaatgaatttttgtttccttatctcactatatctactaatgctactacttctttgcatgtaccaaatgacattccatctgtcataccaattgctagccaagcatcccacccatctgcaccagcaccagcttctcatttgcatcagcaacagcctctgctccctctcctattgcatctgcaacagcccctaatttgcaccagcaacagcagcaatccgctgctcctttatctgtcaatttaccaacacagctgcagccaattaccactgatcctactcagcagcaacatcctcatctagacaacatacaacccccacaaccatctacagaccccccacctatacaacaaccccctgactctactgtccaaccaccacaaattaccaacaaccatcctatggtaacccgtgccaaggttggcacatacaaacccaaggttcttctagcttccaccacacctctcactgtggcttctgcactcaaatcccctcattggaattcagctatgaacactgaaatctttgcattaaagaagaacgaaacttgggttatggtacctctgccccctggaaaacaagctattggtgcaaatgggtgtttcgagaaaaagaaaatgctgatggttccacagctcaattcaaagcaaggttagttgcaaaaggtttttttgcaataatatggtcatgacttcactgaaactttcagtccaatcattaaaccaaccacaatccgagtcattctcacaattgctttatctaaaggatggcaaatcaagcaattggatgttaacaatgctttcttgaatggggaccttcaagaagaggtttatatgactcaatctcctggttttattgacaaagaatctccagatcttgtgtgtaaactcaacaaagccatatataggctcaaacaaggtccaagggcctggtttgacaagcttcacaatgccctgcaattgtttggctttgcctctgcaaaggcagacaattctctatttttcaggctcactgaatgtcacaccaccttcatcttagtctatgtggatgatataatcatcacaggtagctcctcccatgttcttacacaacttgtcaaagatctacatgcccaatttgccttaaaagatctcggtactctagattactttttagggattcaagtgcatcaaatgtcatctgtgttacatttgtgtcaaaagaaatacataacagatctgttatgcaaagccaagatggaatgtgccaattctctacccactcccatgagtggtggtgaaaaaatgtctgcctacaacagtgaccctattgctgatcctaagtcttatcgcagcattgttggtgctttacaatatgctgtgataactcgacctgaaattgcttatgctgtcaatagagtctcccaatttatgcataatcctctagaatctcatctaaaggttgtcaaaaagatacttcggtatctcaagggaactctcgatcatggtcttctgctcaaaccgtgccctgttctgtctctccaaggattttgtgatgccgattgggcatctgaccccgacgacaggagatcaacttcaggcttttgtatatatcttggttccaacttgatttcctggagctccaagaagcagaaaacaatctctcgctccagcactgaagcagaatatcgcagcctcgccaatgcaactgctgaagtggtgtggctacaatctctgcttgctgaaattggttttcccaagcttcccattcccactatgtggtgtaataatcaaagtacaatactcatgtttgcaaatcctgtccttcattcaagaaccaagcacatagaactagacctctactttgttcgtgaacgcataatgcagcaacaacttcatgtgaagcacactcctgcccaagatcagattgcagacatattaacaaaagctctatcagctcctcgattcaaattactaagggacaaactgagcttagtctttctatctcagctcaatttgaggggggatgttaagtagtttgttaaatgttagttagttacttacttatcagttataacagttagaggtagcttccctaactaactcttcttgttgtactgtatataaagggctgtactcttaattccaaatcaatgaaatctttctttcacttttacacattcaacactatatagtgcgtaccttactaatgctgtcacataagctgactagctgtagaaaagaaataattacttgacgctagcttaagtggcggtgcgtgtgcattggagattctgggttcgagtctcagattatacattgttgtaatagaaatatatagcattggagagagaatagagaaaatatatatgagagacttaagggttcagtcttcttcactcttcattgtcttcaaacaaacttaattttcatattcatttgaaatgggtagttattcaaattccaaaacagccatagtgtaattatattgaatatatattttttatattgggtgagagagggattggaacgtgggactcttcttgtgaggagaagtgtaaaactgttaagctatgtctataatttttttgctcctaaaatttcgacacttatatgattatgccttgcattattaatattattttttttaaaaaaaaatttctcgcaaactttgaaaataattataattttgcatatttagttgcatttcgctcatttttacaaatagtattttaatgtaatacttatttatggctaatttattgtaatttgagagtctatgaacaaaataattgcataaataatattctaacgataaaatatgaggttgtatatatgcaatttttgagttaatgtttgaatgtttaaagccattatacatttggttctagctagcattaatttggttaaatagactcttgtattgtaattatatgcatggtgtgtggtcacatcaataaattgttaaaaaatgaacaaaatctaacaaaggagaaaaattacaattatttctaaagttcgaagaacatttctttcaaaaaataattcaaagggcaaaattaagtgtcaaagtcgaggacaaaaaaatattatttacttaattatatttgtagggacaagttgattgttggtgtgcatctaaatatcgacatttgctggtactgaattatatatatataaggatggaagtatttttattgttaggagactttttgagtagagtctaaaagttaatctattaggtttatgtccaaaatgaacaatgttaatattataccaatatgaagatagatatattcaagaaactattataaaatcaggctgtaagaatagttaataatttttttttacataattattaaattaaaatatataaaatttaatatgtaattatgtaaataaaaatatatttaatgtaattaaatctctatataaagaaaataatatattatatatcttgtatagtggtggtgtccaacaccattttcattttatcattttttttttccaaataaaaacaaaaaagaatggaaacacaacaagaagattgttattttgaaaaaggtaataactaatgggatccaagactagacatatatattattcataggacatttgtaccaaaagaaaaagttattactttatattgcaactgtaaagataaaacatgtatatattgattttcatatggtgggtagtgacatttttcttcttttcttttttcaccataataaaatctaactagctactactactactactatatatatatttatatagttcataatatatatatatatatatatatatatttaatatatatatatatttatccatctgagtcaagtaggatgtgtaatgcactgatgatattatacattttcttccttactttcttgtctttgggcagcatttgtttcacttcttctcttgctattatcacattcaccattattattattattattattagtattatcttctttcttctttccccacaaaacgctgtagagtcctccaaccagcaaaattgccccaccaacactgtcattgtttttaataatggaataccatgtcagttaatttacccatgcatcaaccttaattataatttttttttctaattattatattacacacaataatgatcatgatattattatattgtgttataattagatagtatttttctttttgttgttgataagaagaaaagttgagatgtttctacactcaatttagcattattattacatggttcactaaatgacatatatatcaatactatcacatgacattataataaggacaatattcatgttcatgcatgctctctatatattcatttggtactattttttactttgtgtactataatgcatgtcccgactcggatatcatccgagaggggattttcaaacaactggttgagaatttcaatcagttgaattttcaaaacagactattttgtaaagaattatcaaatcacaatcatattaacaaataaattctaagtctatttctacttattttttttttaaattagggtttcatgcatgtgatacaataatttaatataggtctccatcatcatcagcacatatttagatttaactaataataatcaaataatataaataatgattttttcctaacttcctttgaaaaagatatgtataaaattattataagatttgtggtatgaaagtgtttagaccttccccagtaaaaagtttctttccaaatgaaagctgatatgatagcagttataattagggctaagggagtaaatagtgatgtgaaaactggaccctttttctctatagcccaaacttgaatccaataagttatgcctgtcacaactattccctgcaaaatattcaaaaaaaagaaataattaaaattagtatgcctttcaaaatttattattacaaaatttgccctaattagtaattgtcttgttttgtttttgcatgacttaaaaatagtataattactttatttagtagtctagtgtgaatttttttaatcatgtaaaataaatcttatcttttaaatactgcactgatgaaaatgaagtgttgattattataatcataacttatcatatcataaaggtgattgaatgaaaaaataaaagtcatcaataattgttatatatattataaataattatttaaaggcaagcatctaatattgataaaccaaatttaaagtatcctatgatcatatatagggacttgattagaattaaaggcaccactacaaagactataataatattgattgtataatataaagcaatgaatatatgtttaaataatgatagatctaatttaaataacactccaattatataataatataatgatgttacgaatcacttaaagcaattaacaaaagtaggctttattacatatcacttaataatttcaacttgcaagtaacatgattattattaattaagctattttttttttttaaatagatgatttattaaagtttatatatggggcaatcttctatttgtttgttgctaattaatgtcttaattataaaagttatatttataatttatataccgtcgcatactcatatatttgtatgttttatagttatattattcccactatcgatctcttatttaattaaaaaaaaaatcatatattatatatatatatattaattaatatatatagttggtttggtttgaaaatgtgaatgtttagttagagtattattaggggacactaataatatatctaacattattataaggtgtattgttttgtaattgattaaagattttttataatttttattaaaatatagttaatattgaattacactactactaatattatatttcataagaatatgttaaacactatcatgaataccctataacatttctcgattaattatgtaacgaatcatatgttgaataataataattaataaattgagttaaatgatttcttgcatagaaaaagaaaggcacaacgtcacaatagcattaagtaatttgtgagtgcttcaaataaataaatatttaaaaagaaaaaataaattaggagtgagactgtaacatacacaataagcaacagaaagaagattaatgtcccagccaagtttccatgatgatgggtttctgtccattgcaatggctacaaatgctgattgtatgcagctaaacaagcattgaagtgttgttagcctcaactttgctggatattgcttcactataccaccctacacacacatatatatatatatatacatatttatggttactgtataaaataaattaatttaactataaatataaatcgatctaatgattaataataaagcataaatttaaatttttacacttaatttagctattttaattaaaaaaaattcaaaaaatatcttttttttttttttttatactatataaaaagaaatgtatataaaaatatctaaacttattttttttttttgttattatttgttttgtgaataacttttttttgttattatttcttttaggtacgaatacttccaacttaaatagtataaaaatgagagttaagtataaaaatttaaatttttttaataatgtcattaaaagtgcttaacaccttatatattttaacaaattgtaacattttttttgaaaaaacaaatagttgttaacttgacttgacacacatgtaatgttatgatcactactattttgtacaacacatttatgatagaatccattgaatccaacaccttatgtaaaatatgtacttcacaatttaatattaaattagattgactatcaaatataataacacacacaagtgataataataagtaacaaacatatatatattaagaagagaaaatatatatatatataatatgatattgaacctgcaaaatgagccataaagaccaagcagtgttggctgatagcatcataagagaacctttaacccattcatgtctgtggtaattaatgggtttttgatcatgatcattattatttgatgataaataccaattattcttcatcaacttcaactgtggaccctttacaaaagcatacaccaatgccccagatagactcacaattgaccccatcacctttgccacaccatccacattttttatgcatacactctcaattctgatcatcacatcacatctcatcaaaattaaattaaattaatcaaaattaattaattaattaattataactaattaaccttagtaatactgccataacaaaagtaatggctgggatggcgttagtggtggctgcagcaaatgttgctgaagtgaaattaattgcaacatagtagagattcaagctcaaagttatcctatatgttcaaaataaaattaaaacaatattaaataaataaaaattatatatttttacatatattaataattcatgaatgattatatttatattaccccatcaaggaaatgaagaaaattttgcagagcaaaccccatgacaaaggagtcactttcccactgcaataattaattaattaatatatacataaatatatattataaaaattataattcttaccactgagctagactagctcagtggtaagagagagatgggacaaaaggaaagtgcaagggttcgaacccgagactcaaattatatttattagtattacgtcctaatacaaaaaaaaattacctttcaaagaagaaagcaaaaggagccaaggcgaaagctgcaaaggcttgacgataaacaacaaaaacaaaaggattcattccttgagcaattgcagccttggaaaacaaagccatgcctgcataaacaacttgtacaaaaatcatagcaatataaggcttttgggtttctaatgatgccatgattggatggcctatgatcaaactactaccactcttcatctctcttttatagtactaatattgattagttaatgtgtatagctagctaaaggggttctttttctttctttttttttttaactagattttgtgtgatgttatttgggataagtaataaaaataaaaaatgggtgggatgagttttggtatggatgtgggatgtccttttataattaattgccaagtagtatagtacaattttggttggttatgatctcagccctaaactatgtgtgccataattgataaagtggcatatatagttcaactccaccactcactataatttgattatatattaaatataaatactatttttagcacttattctttttcaactttattttaagaaaaatcacacaaagccataacttatggaaaaaaacatatttgccttagtatggaaagtgttgaaagtcaccacgttcagtgtgccaaaataaaaaattatataaattaataaaataatatagggtagggtaaaaaaaggtgaacactgaagaacgaccaaattctagtgaaaaaaaaaagtgaagactcaaggatgatgtttgctggtgtgtaaataatttgtggtgtttatattaaacttagtactagacttaattattagaatatttctaattaaggaaataaaataatattattgattctgataaatgaatattttat

SEQ ID NO: 161284 - DNA, 3238 bp, Cannabis sativa
tattacttaaaatttactaaatctgtgtggatggtaaattaaacaactcaacattaattcaaagatactgatatagtttaaaaaataatattagaataaattaattaataattagacaaaattaaaaataattttatttttttttcattttttatttttttctctctcaaaatgcataccttttcataatcaataagtatttgcagccatatcctctttctcaatttaaacacttcatcaatccttacaaacctaataaacaatattagtatattattaactaactattaccataattgctcgtaattatgtttcttaaactatataataggtaagacatataaaaaagcctaatcacatgccttgcatgtcatttgcccctagtatacatacatatgtatgtatatatatatatatatataaattttcactctccccttacaacttgtaatagatataatttgatcactaacagcatctccgaattataagtggtagaaagttaaaatatagctcatttagcaaaaagtgtgctccaatactatagtgtgctaaaaagtgatgtaaatttgatacatagcaaattttgtggtatatttagcacaacatttgctataatgtaaaatttacaccacaataaatacactactttttcatttacatttatgtcatttatattattttattagtacatttaactatgatattaaattatgaaatatttatattatttttttattattattttacatattaaaataataataaaattaattataaagttattaatttttattttttttaataaaatattaatttgatattaaattttacgtcaaaattttgaaattgtctattatagagcacatagctaaaatttgatataaattaaccataaaattactttttgtgtcaaatataacacaatttttacatctcccattggagatggtctaataattttgttggaaattagtgcttgtttgccattaatatttttttaaaactattttttgaaaataattaagcgtgttttattaatttattgtgtgtttagaagacagtaataagttacaaaaaaaaaataaataaataaaaataaaataaaatatttgaaaacaacaaaatgttgatttttgtcaatattttttattcactttgttttacatcatttcctcatattattttatctttcctcgtttttctctctcatcactaattgtctttcatatactatttttcgagcccatgtgcgaagccattgcctaggttggggtcatgcttagggtgattaggggtcgagtttgagttcgagattcagagctaggtccaagtcggggtctaggtttgtggtcgtggtccagagttggggtcgagtccgggtcaagctgtttggtgcagggtcaggggtcaggtttgagtctagggccagggttaaggttagggttggatctgggccaaggtctgggtccggggttggcatcgaggtctaggtctagtaccgggtgtgagttaggggttagggttgggcgcctcagggtccaaattcgagtcggggctaggtcaaagtcaatggttagggtcatggtgagtccatacaaggtctcgagtattgaagtattttttttttatggaatagaaatatccaaaaagtatttttaaagaatattaacaaagtgtgtgtcttgtgttttgaattttgcaaaaaattatttgttattcttatttttgaaaacaaaattttgaaactaaaatgcagaaaataatggcaaagctcttagtttataacaattttcaaaacaataaatctatatatccaaattatagctactatatataaaagtgtgtattattatttttttagcacaatacttttgacagaatcgtacttgaaaaggttatatatgcaaaaatgtcgactaagtctgatgtatactagctaaaatttgcgttgaaatttaacacaaaatatagtaaaaaaaaatttatcttattataaaattttaacttttaattatttttcgactattttattaatgtagttaaatatgaattaaataattttgttaatttttcagtttattgatttgtattaatatattaaaatataattgtaaaatgtgatatttactcattattttgagtgttaaaataattgtacacatctaatagagatggtctcacatttttacacatacataagtaaattgctctaattagattcattaaacatatatttgcagaccccaaaagggcaaataatgacaggtaatatatgatccagagttaattatatggatcgtaataaagatgctaacaatattagaattaatgaatccataagctgataaattcaacttctatacatatctaacacttaattaatgaagttctgaaaatcttgtttctaaatcgcatacttgtactaagaatattattggaaaatctatatatgcttttgtgtaaaaaaccacactactttactagctacagattctcataataatattctcatatttttatattttttataatatccgaatacacactaaattaattataagaatatatattatattatattattgcaaatatatataaatcatcacgatgctaccatgttccattatatgtggactgcaattaactatgctcacatatataaatatatatatatatatatatataaatatataaactggttaatttgttaattttaaaagtatataactctttgaattagagagagagagccgccgagatctagtaaacttccgatccaagtaacgtttatgactttgaattcttctcactgcaagaagttatacgtaattatatatatattaattgtgtgtataactatgtattaaatatctaatacagaatgaagaattaatacaactgaataaacgaaaaagagagaaaagtcgtgattttgcccatccatgttcttacaaaatttaaaatcatcaataatttgcgcaaaacttggatactaagtgtcttataattgcactttatatccttataaaacaaaaatacataaaaaagtccatacactaaaagacattctctaagttcatacataaaaagttcatgcactttgtatcctatactaagtgtcttatactaagtgttttatgtaagacatttatatgtataatataatatatatgtatgtgtatataacatgcggaataaataaacatatacactatatgaatataaggatcgaaat

SEQ ID NO: 161285 - DNA, 7430 bp, Cannabis sativa
ccatatcttcttttccattaactttatatcttcttggctgctccatgtagatgtcttcttctagctcaccatgtagaattgcagttgtaatatccatatggtccagttcaagatcaaaatgtgtagctacggatgacataagttttattgtcttacacttggctactagtgagaaaacctatgtgaaattaataccctcattctgattgaatccctttgctactaaccaagccttgtatttcactagctcattcttggttttgccttctttgtgtttgaaaatcaacttccaggttttcatatttttgactttaggtcttggtacaatcttccatgtcttcttatttatgagagcccatttcctcacccatggccttgttccacatatttgtagcttcaccatttatatacttttcgtagttctctagttcaagtttacttaaacctcttacacatatgagagcataggcgataacttcttcccatacattaaaattatatttatgatttggcttaggtactcttttagatttgtctgtagctaacttgtagttggacaagtctttagcttctcgatgtgcctcattgttaggttccacatgaacattgttttcatgttcttagtctagggttgcttgaccagtctcttcttgagtgtgttccacctgatcaggttctcttagtttattggtgcttcctagtcttgtacttaggtcgattaatatacttgcagagttagtcttaagagtattgcctacactagaaacattgttaggagagcatggaaaaacctcttctttacatatgacatccctgctactaagggccttaagacgaggtttatgtctaacccaaagtctataccctttagttccttcataacagcctaaaaaaattacttagtggctctaggttctaactttcccacacattgatgttcatatgctacacatctaaataccgttaagtttgacatattaggaggctttcctgaccacttttcttcttgtgtcttgcattcaattgcatagagggacacctattaattaagtatgttgcattaagtacaacctcaccccagattcctttagacaatccaaattaaatcatgacacatctaaccttgttcatgatggttttgttcatcctttcaacaacaccatttttccgaggggtaattctagttgtttaatgcctttgatcatcatcatctttatagtaagtatcaaacttgtcatcatagaattctaactcgttgtatgttctaagggtcttaagtctgtggtctatggttttccattaatgttttccagtgaacatactattgaaatgtatcattcttttgtttgagaagacaaacccaaacctttctagagtaatcatccactatagatagaaaataagtacactcctatgtactggagttctttgtagtccccagagataagaggaacataatccaatatgtgcttagacttgtatgtacctattctaaactttaatcttttgtgtttacctagaatgcatgatgcacaaaaatctaccttgctatccttgtcctttcccagtaacttttgttcactcatgagctgtaatatcccttgtcactgatgtggcacaaccttctgtgccaaagcagaggtttctgatcttctagagactcgacagtattgttatgatacttggtaattggctctccttgcaggtacaatccaccttgctttttccctttgataattttcatggaacccttgcttaaattaatggtccttatctcaattttactcacaacaccaattttatcttgctcactaattgaaattaggtttcctgctaaattataaacataccttactccaattaatgatctaacaataccatcaaacatcttagaacttactttgccaaatccctcaacttgacatgcttggttgttccccaatatgactcttcctcctttaatatccctaaaatcagtaagaaaaatatttgttattagtcatatggaaagcaaattcataatcaaggatccgatcatccttaaaattggttgcaaacatatacttccccactgtcataaccatcactgaaatttgcttgatcatttttgttcttgtgatgattgttgtagttggatctgtctgaatcttgactgattgatcttcctttgtttcatctagttaaaagatcacaatctttctttatgtgccctggatttccccaatgaaagtatccactaggatccttgggagcacaagcttgtgatttccctattccactattgtatcctctgccttgacctcttcttagattcctttctctattctgatatggcttcttatgcatgttctttctttgacccaaatgtaactcacaactaccaaatctgtctttctcattttaatttccaagtctttggatgacttcttcaagtgtgatagaagtccttcaatccctgaatgaatcaggcaatgaattcaggataataattacttgattctcatcaattagagcctatttttcttctgaaatttcaatctctatgtgcattcttaagaactcatcaagattttggtccaaagtctttgagggactcatcttgaacccaaagactctttctttcaagaaaatcttgtttgtaaggactttttgctgaaactattcttctagtttcttccagatcttggctggtgtttcctacttgtcaactagacttataattgcatatgatagattgaatattatgatactggttgatgtctccaacatatcttcttgtttaatcatggcaatacctttgagaaatttaatagggtcttcaagaacccttgagaacttcttttgagcaagaaatgattggatttcccctttccaaattctgtaatcatttgtaccatcacgtctagttatgtcaattttaacattactcatttaatagaatcaaaatcataaagagactgagttaaaatgtttgtgttatctggaggatcattcaaatgaatgtcctcaaactcctatgtcttgaatcctaaatctggtggatcaggttcctccaaatttctcttgtgtcttgatcactttgtcttgagtcaatgaactttttgcttgaagtttccagcattgatacatctgttggaatttagtcttgaattcctacacaactcacaagctctattagcaaacacgtggtctaatcttgacctctgaacacaacagtgcaaaaacacaatcttgtgccacacacacatgcacatgtttttactttaattttgttattgtttaattgaattaatattcccttgttttggtttcgttcatgaaaaattttagacacttcttacgaaaacattgtacagaaaatctactagtaatcaaaacaaagaaccagatcgaaataaagaaagtgcgagagaagaagatcaaaatatatagaaaatccactttttattattatgcttatttaatctttttttttgtttgtttttattttagaataaaatcttttattatataaatcaaacatattcatttacaataatagataatataagggaggggaattcctctaaccaaattaaatcttcatccaaatttaaagcatgttttgctaagccatgattgactttattagaatctcttgaagcatgagtgacaacaactctggagaaaaataaataaagatcaaaagcttctacaataatatatgtaaaagaagataatatagatgaaacaaatgagggatgatttattacctcaagctcgtctgattcatctaatgagtcaacttcaaaacaccaaaaaaggctccctctcaattgatgaatatcttctcaagatgaagaatcttgtagatggattacgtgccgctggaaatccaattacatatgatcaactgatactgtatgttcttactagtttgggtccagaatatgaagctatggtagtcaatttgacctctcgtgaaaatctcactttgcaagaagttcaattcttgctgcaaaatcatgagataagaattgaatctcatgttgctgctctatccctttatctcaatggttcttctacaaacatggctcaattcaagaagccaccatttcccaattccaatcaacaaaatcaaaacatgaatcaaggaaatagaggctcaggcactaatctgaacaatcgagatagaggaagctcaagaggttgagtccccaatcaaggtaatcgtccaatctctcaactatgcaacggagttggacatatagttcaaagatgctacaaacaatttgaccgcaactacaatggcccaaatgataatctaagccctgcttcaaacccacgacaagcctatgttgcttttccctctacctgtaaggactcaaattggtacctggacagtagagcctcaaaccctgtcaatgtagacaacgataacttgcaacaacaagcatccacaagggcaaagaaaagttggttgtcgataatggctcttaacttttaattaaaaatattggatcttgttacttagcagctagtaaatctcttcatcttaaaaatatactccatgttccctctattaccacgaacctaataagtatttccaaattcaccaaagataattatctcattgttaagtttaactccgcctatttttatgtcaaggacaatcaaaccaagacccctcttcttcatggaacaattaaagaaagtatgtacccattgtccacaacaaagcacactccaaaccagtctccctgtcactcacctcgaagacagtcttttcaatctttttcatgtactaagaatagcaaagatactaagaatgtatcccttgtaaatctgtggcatcaaaaattgggccacccttctaaacttgttttgaataaagttctcaattctttacatttacctacagctgatccttgcttttgcaatgcatgtcatatgggaaattacatcaatttactttcctttcttcacaacacagaaccacataaccatttgaaattgtccatacagacccatgtggaccatcaccctatcccaccaatgagggattcaaatattacaatgtgttcatagatgctttaactaaatacacatggatctttcctctacaattaaaaatagatacaacctatgttttccaatactttaataattatgtagaaagacagtttgtgtttaagattaaaagcttacaagctgactgaggagggtaatatagaccattaaaacctattctagcacaactaggagttgtctttagacatccctacccacacactcactagcaacaaggaagagctgaaagaaaacacaaacatgtcattgagattggactcacactattagaacaagccaaaatgtcactaaaatactggtgggactattttgtttcagccacatacttgatcaatagactgcctgtccaaagaaagcttgtccaaagaaacaaatacatttccccctttgaaactctgtttagtaaaaaatctgactacactttcctcaagaactttggttgtgcttgttttcctttcctaagactctacaatagacacaagtttgatttcaaaacttttatgtgtgtgtttcttgggtacaatccatatcacaagggatatagatgcctacatccctttcgtagagtgtatattgctagaagtgtcacctttgatgaaacaaagttcccatacatgcatttattcctatctcatccaccaccagtaccaaatgcttcccaacttgcagccttgcccatccccatacttcctatgccattcactgctccctgtcaaacacaagtcacccatgttgttccctaaactatccataatgtccccaacttcaggtccacaggacctcttgttaatctttacagaaccactgcttgttcctcagaagtacctcaatatgcaacatgcaccaccattgtcactcaaaaccaaccaactagtactacacctgtctcgtctaccatacagaccaataatccaccaatacaaacacccaacatctccaatcactgaatgcaaagagatccaagtctggtatacacaaacaaaaaatactagctgctacattaacaggattgaatcaaccctaccttgagcctaggtctgtgaaaaaggccctagctgatccaaagtggaactcagccatgacaatagaattttatgctcttgttagaaacaatacttagatttttgttccagacattgatggcatccaggtggttcaaaacaagtggttgttcagaaccaaacttaacagtgatggctcagttgagagattaaaggctagacttgtagcaaagtggtttcaaaaaatagaaggggttgactactttgatacatttagcctagttgtcaagccatccactcttagaatcatgttcactcttgtcgttactaacaattgggatatacaggtagtggatgtaaacaatgctttcttgaatggggagctcaaagaatatgtgtacatgcaacaacccaaggggtttgaagactgtgaacaccatacacatgtatgcaagttacaaaaaactaaatatggacttaagcaagcctcgatggcctgttatgagaaactcaaatctgctcttctctcatggggatatgtcaactttgtatatgatttttacctgttcatctcaaacaacaaaggtcatcctctgctggttcttgtatatgtcaatgacatactaattactggacatgatccagcagccatacaataagtcatatcagccctagacaacaaatttgccttaaagactttaggttttgtaagctacttttgaggtttccaagcacacaaaactggctccaaactgtattcaaatcagaataagcatgctcaagacatcctaaagaaagctaacatggaatactcttaaacttgtagtacaccaatgtgccctgtcaacaagctatttaccaacacagatgacttgtgtcatgatcctaaaatgtacagaagcatcataggctcccttccatatctcaccttaaccaagcctgacctatcctttgccatcaacaggctaagtcagtatatccaaaaccccaccaacacacactggatgcctacaaaagggtgctgaggtacatcaaaggcaccactaatcttggtcttatctttaaacctgctatctctatgaccattgaagcctattaagatgtagattgggcctccaatttggatgaaaagaagtctaccacaaggttcagtgtcatgctaggagagaatctcatcacgtggggttcaaggaaacaaactgctattgccagatcaagtacagaatctgaatacagggccctctctacaactgccactgaagttgtttggattgttgggttttgtgccttaaataaaacccattacaatgtgattagttatcaatttaagagattagaagtggtttatgttaacatgta

SEQ ID NO: 161286 - DNA, 4090 bp, Cannabis sativa
cttgtgacaaaagtattttgtttatttcagcttttactaaatcaccagttacaaacttacaaatacacaaacccagtgttactatattaaattaagattggaaacggttccattacattacaagcagttttgctagtaacaacaaaacaaactggcactactaaaacacgatgccaaataagattacaggaagcatttgctccaccatcgaatcgaaatataagagggttaaccaactgaaacaatggacacaaccaacctccaagactctaaatttaattttaaaaaaggggagaaaaggacatctctagaaggaaagtaaaaatgtggaaaccataatcaacttcttagtcttaatcagagactagaaatgagaccttaataatagtaagaaagaaaagaaatgaaacgaaaaaagaatgtcagaactccaaatgtacacaaaactcattccaactggagaccacttattgctcttgctgaagcagagctgaagaaatccaatccgaggcagctgtgtgaatttccaactcgataattggagaaggagagagaggagttattgaaacctgtcatacacaaatcaaccaccagctctgagtagttgcaaaaacattatctagatttaagacaatgcaaatttgagattgagaccaataggaaatgaccctgagaacttacaaatccgctttcaactgctctgaaatccagttcctcatccatgtcattctgctccttgtcaaggaactgcaaacaagtatatcttcttgtattagttttattgttttatagcaacaataaatagaagattctagcagtacatttctaatgtgttgtgcacaaagataataatgacaacggcaccaatatcaccaagcaacattaacctcaagcaattagatgttattcatcaagttgtctcacaatcgtttcgttttcctgattttctacattacctctagcctaaaaaactttttgacccgctgagactctgttttacgtgcagcaccagtggactcaatctccacattcttcttttgtgttgccaaccggcgagcagccccctgataaaagaatacaatccattattgaaaaatggagacgaacaaaaattcttgaggaaatgatggtctaaattattatattaatagtaataacaactagcaacaaaatgtaagccaactgtttacactgtcttttaataaaagccacttactgcagctgaggcatcccgaccaagctgtgcaagctgaatcccaaggctttgttgattagacataaaatgtcctgcagggtacctattagttgaaacagcttgccagttgggagtcgatcgccatgtactttgcttggtcaatttgaaaccctgttaaggatagaagagacaaacgtcgcacatgattataaaataactttacaacaccttgcaagtacttaaaaccgggtaactaatgttattatagcagcaaaataaactatttggacatgcaggcacagtttgcttaatttattatcagctgtaatggtgagacatacgccaaacacgtttaagcatacatcaactaagtttacaagtacgctagtctcagtgatctacatagaccctaaaaataagtactctataattgaagactttgtaattttagacacttacacaactaaagatacatctataccagtaagcaatctgtaatatttcattgaaatattaaaaggtaacaatagttattcaatgcactcctcaaaacgaaaattgtccaaaacaagtaatatgctttaggagaacttattttgcagtctcaagagcaaattcttttcctatcatatataatttcacctcaaatcagaaaacttaaaatctgaatgaaaattaaaaactgggtttatttcacaatcacatcactcaatggaaattgtattctttcttaaacgtaagcctaaagaaaaataaaattacatatcttttatatcatgtgtacattaatcaggtggtgttcaaatagtgcatcacaattatttttcaataaagaagccaacaagatgaggatactacttcaagtaacacaaaccttgtttgacaaaggcaaagttggaatttcaatgttcagagaacagttttttggaaaaacccctttttcaatatccctaacagctgcatttatcaaaggtaaacaaacagcaacagcatctttaaaatgactttcttcactttcatccttcttcctgtgatagattaaccaaatataaacggatgattccataaataaatgggaactaaatttctgatgagttatgacattgacaaccaactcaccaatgcagggatactgacaaagatggtacaccacatatcatagcttcccgagctcccgcaacagcaccagagtaaaacctggtccatttgatgtttgatttaatatgtaaatttcaataaagttcatattcataagaaggaagggaaagatctcatacaagataggagcaaagttatatgatgcatacaccggtttggataatatacccgaataataaaaaattaatgaagaaaaacaatgtagggaaacaaatgacacttacttgtgatggccacagcttgatcctcggttaataccactaataacctgaaatcatattgaaattaggaattgcttggctccaatatgagatataaatagtacttaaagattacagcacatagattctaaccaatagaggcttcgaccaagaaaacagtgcccctgacaatgctaacgaaacacaatccgcaggggtccctgagtagaagaatcatggtgaaacctattattatcaatgaccccaaccaaaacgcaaaacaaaagtacacaacatcaataacaaagaccgcatagacaacaaaacgaaaaaaacaaaattaggaaaacgagaagagtgtaaaaacacatagacacaattgcacctgaaacttcataagctatggcaccattaatttccgccgaattcacagtgaccgtttctcgaagagtcacagaatgaccagacactgatttgtccctaaagaattcaatttcaaagaaacaaaattcaaatgtgccaataacaaacaaaataagacacgataagatataaccgacacaagcaatacccatctgaaaacatgagacagagggagagattgagattactcacgattgaggagcgcagacatggacactgtaaagaccttgagaaacaagagcttcaacgaggcaagtaaggccaggggcatcaatcccatcaccattggtgaccaaaacaattggcttggaactatcaacatcggcatcaacagaatcagcatcagcagggggtgcaatagaagatgagggttgtgtggaatcagcagcaggttccttggattggtctccttcaccaaccttcctgctgagaaggacctgttggagattggagaccaaccccggaggcaacaagttattcttcacagaagtcgaagtcatagatagagaaacctgaacttgattttgatttggggggcaagaagattggaaaatccaaataaaaaaaaaaaaaaaaaccctagagggtgagaaagagagagatatatatatatatatatagaaataaagatgaaaatgaaaaggagggaattgttcagtggagagagagaaagttatagatatagatatagagagagatagaccggttctaacggagttattctagagagagaagaagaaagataattgcagaatgggctttttcatcttttctttcaataattggtaattaatatattgtgaagaagaagaaggtcattaaccactaaccagtgatgtaataaatgttactgggaaaacgatcaaatattatgaaattatattatttttttcggctttcaaaaataaattatttttcccgaacattgtatattcatataaatattttcaagatttttaaataagaaatattattattggtacattttaatattaaattttatggctaattagtaatttttttcgctgaactttgatatgtactaaatagtgcctcctaaacttttttggccgttaaaaatttctcctgaactattgatattggtaaatttaag

SEQ ID NO: 161287 - DNA, 2528 bp, Cannabis sativa
agctcctcaagcctcgtgcatataggcttggaaactgatggaatttgaggcactttgatccctagttaccttggtctttctcaaactcaacatactcatggaccatgtgacacttagtcacatatgctctttctattttaccaatatataatatctttcttaaaaaacctttgaaacttacccctttttccataaataattagaaattctcaacattcttaataagaaaactttgatattcctttttcttgaaaataaatcctttaaataataaaatataaaatattctcttcaataaaattaatttagctagttaatcaaattagatttttcctaatttaatttaataaaattagatttttccaatttgatttaatcaaatatagtttttatctaatatatgcaattaaattagtttttattcaatttaatttaattaatttagcctaaaaaaattatcaagtgaattgaatttattttcatatttattatttatttttaacacgatgacgacgcacctcgacatggatgggggactgacgggatgcgaccagacagcggtcaaggtgattggatgaggtggtttgcgtaaagtggcttagctcatgtcatgtggtgttgaggtgatgtggttgacgccatgacgaagcccctcaaccatgaatgagataaagcgtcttagtgtgatggagcaggtaggccacaaacaaagtagagtggtgtcgtggtggagtggacgaggtgatgacgtctcgagatgatgtggctcatggtcgtgcggtgactgagcacctagacatgcatgggcccaacgtgatgaggtgatcgggaagccactcgctcgcaaccaacatgaagatgttgttgctgatgacgtgaactgacgtcccctagcagacgtttaggcggacgttgtgggatacaacgaagcattagaagtgcatagtcgcacgcctcgcgaaggtcctcaactagaagaaaactttgacaaaacttcccctaccaaggatgaccgagagggccttgacgagaatgagaaggacgactaatagcaggggtaatattatgaggaagaccccgaggtggtgaggttaagacaagtggtaattaacgaactgacaaaggaaatcggcggagcaagaagaagctacatgctagatataagaaaccttcctacagccgtaaaacatggtagcaaaagggaaccttgatgctgaaaacccactagtgggaaagtttaactatcttggagttggaccctttaatccagcaaatgacaagagaaaggccaaatcggctaaacccctgaagaagagctatccatcaagacccacgtaaaatgctcctaggaacaacataaatatggtcgaccccctcttgcggaaagagaggaccgctcaagccccagggctagaccatcctatttatctgttgagtagagttgatcagaacgataggcatcgtgctcaagtactgaagcctaacatttgtggaaggaaaaatttccccaataatttttctaaccaaaccatcgaagtagaagacttaaatctcgaagatagcatgtcaaaaatggacctcagggaccgtttgtatgcaaaaagggaaaaagtaagatgtgaaaaagtcaggtctcgtgaaggagatctcaaaaataatatcaatgacagaatacggggacgtgaaatcctcgatgataacaccagaaggttgaaggatcaaatttttgtcttaacaaagatcatggaccaactggtccgtaaggaaagtggcactgtgtttgactctgatgatgaggacctggagccatgcatcaaaaggattttagaagcgttgctgcctgcacgcttctgcatgccctaaatggacttatacaaaggcaagacagaccccagaggtcacttgtctcgataaaatagattgatgattgtaataaccgcatacttcgaataaggattagtaaggaaattagcactagatagttatattatatgactaaatgtgacaattttatatatatatatggtgggctctatttttaagaaataggtattagggttataattttttaattctgaagattttattaaattctatgtgtattatatctgatatatgtgtaatttagtatttttataatttttgcttagtaacgatggaaatgcgacagtttagtcattagagtcacacagatatggtttagaacctttctttttgctggatatatttatttgatattagaaggactaggtggagttatggtaatagactattttacccttaggccttaagcttacttaagtgagaagtgagggacaaattaatcattttgcctacaaggttgactttgattttagtggaagtggtagaactttctaatgttttaattcagtttattacctaaggtttaacaaaagaaattaacagtattttattagataaacataagtaaaaagatcaagtctatccttctctctctctctctctctctctctctctctctctagttcggccctaagagaaccaac

SEQ ID NO: 161288 - DNA, 3777 bp, Cannabis sativa
gcaagatatacaacaaaaattatttgaaaggaagataatcatatttaatatatttttttacttattaaatatatacaaaagcattaatatttatttttgagggctacagctcctctgtttgcatgtatgtgtcagttaaatctaatgcaactatacataaattaattaattaacttttttatcatataatcttttttttatatataaattacatattgtatgagaataaaaaattatatatatatctgtatatatatataataaagaagaatcctgaggtggataacgaacccataaaggcgggaaaccaaaataaaataaaatagaaaagtagattaaaacttggcaagagagaatggaatctaatctctcctccactacactaactcagccatcaccccaatttccattctctctcccataaataaataaataaacacaaagcttaatgacattcttcctaattaaaaaattataagtatatatttgttgaaaaagagaaaaattcccttcaatagttttttgtttttattaaataataataaatttcattctttgtacaagataatttctttatttttctttcttattcttaagaaaacaacgacgaaattgcattttccgtactaaaagaattccagaaagcagaaattattccatttagtttattcagtttttattaaaaaaaaataaaattgaaatgaaatgaaaataggagaaaaattaactgagcacaaaatcttattgtctccgtgataaacgggaagaaaggtccaaacaaacaaaccctaatcccaagaggtggtttcgttttttcaacgcaaaactttactgttactgtaattgtgagctagtgagtgtgagtgagtagtactagttgaagaaaaataagagcaaggaagagatgagaccatgaacaatacgacgccgtctcagattcagcctcagtctcaatctcagcagccaccgccgtctcaacctcaaccgccgagagctgtcagaaagcttatcgtcgaagtaattgatgctcgagaccttcttcccaaagatggtcaaggctccgcaagcgcttacgtcgtggccgatttcgatggccagaagaggcggacttccaccaagttcagagacctcaaccctgtttggaacgaggcccttgatttccttgtctcagacccacaaaacatggaatatgaggagcttgagatcgaggtctacaatgataagaagtactgcaacgccactggaacagctcggaagaatcatttcttgggtcgtgttaagctctacggtacccagttcgcgaagcgtggggacgaagggctggtttattttcctttggagaagaagagtgtgtttagttggattaggggagagattgggctgaggatttattattttgatgagatggttgaagatggaccgccgcctgagtctcaacctccgccggatgatattccaccggagaagcctaataatgtccccccgacgatgatggtagtcgaggaaccacgaaggtatgaggtccctgttcacatggatgggcaacctcatccgtatcctcctcaggctcatcaccacaatcgtcatcctcacgcagtgcccgaggttatgcatacaccgccagttggagtgattgaggaaacagggccaccacctgtggtacatttacatacagagcctggacctggtgcggagccggacatgggcggtcgccagccacacccgccacagcatcaggaggttcattatccaccgccggagttaatgaagatggaaactcgaagacctgtaggcggtgagagagtcagaatgagaagaccaaatggagagttttctccgagagttatcgccggaaaaatgaaaggggaaacgacttctgagcgaattcatccctacgatctcgtcgagccgatgcagtatttgtttatccggattgtgaaggctcgtgggttagctccgagtgaagccccttacgtgaagatccggacgtcaaaccatttagtgaaatctaagcctgcgatgcatcgacaaggagaacccatcgactcaccagaatggcatcaggtattcgccttgggccatggaaaacctgaatcagcaagctcaacattagagatctcggtatgggacatgccgtccaataactttctcggtggtgtatgttttgacctctcagacgtccctgttcgagacgcaccggacagtcccttggctccgcagtggtataggctagaaggcggtgacggagatcataattctggcagggtctctggagacatacaactctctgtgtggataggaacccaagccgacgatgccttcccggaggcatggagttcggacgcgccgtacgtggcacatacgcgatcgaaggtttaccaatcgccgaagctttggtatttgagggtaacaattatggaagctcaggaccttcacattgctccgaatctgcctccattgacagcaccggatatccgtatcaaagcccaggtgggatttcagtcggcgaagaccaggcgagggtccatgaacaatcacagcgcgtcgttccactggaatgaggatctaattttcgtcgcctgcgagccattagaggactctttgatcttaatcgtggaagaccgtacaggcaaagaaattgcagttctcggccacatccttgttcctgtgagctccatagagcagcgaatagatgatcgccacgtggcgtcgaaatggttcggcttggagctaagcggaggagcaggaggcggtggtggtgggagtgggggtccaggtggtggaccctactacggaagaatccatttgcgtctttgcttggagggtgggtatcacgtgttggacgaagcggctcacgtgtgcagtgatttcagacccacggccaagcagctttggaagccgcctattgggattttagagcttgggatccttggagctcggggacttcttccgatgaagaccaagagcggaggaaaagggtccacggatgcttactgtgtggccaaatatggcaagaagtgggtgcgcactagaaccatcaccgacaatttcgatccacgttggaatgagcagtacacgtggcaggtctacgatccatgtacggtgctaaccgtaggcgttttcgacaaccggagaatgtttgctgacgtgtcacacgagaaaccagactatcgtatagggaaggtacgtatccgagtatccacattggaaagcaacaaagtctacaccaattcctacccgttactggttttgacgaacactggattaaaaaaaatgggggaaatcgaggtggccatacggtttgcctgcccgtctttgttgcccgacacgtgtgcggcttacgggcagccattgctcccaagattacactatctccgcccgcttggggtggctcaacaagaggctttgcgtggggccgcgacacgaatggttgccacgtggctcgcgagatccgagccaccgttggggtccgaagttgttgggtacatgttggatgctgattcgcacacttggagcatgagaaaaagcaaagctaattggtttcggatcgtggctgtactcgcttggctagtcgggttggccaaatggttagatgatatccgtagatggaggaacccggttacaacggtgttagttcatgtcttgtatttggttcttgtttggtacccggatttgattgtcccaactgggtttctatatgtgttcttgattggagtatggtactaccggttcagacccaaaataccagccggcatggatacccgactctcgcaagcc

SEQ ID NO: 161289 - DNA, 14564 bp, Cannabis sativa
tctctctctctctctctctaagggcttgagtttatcagactcggtgttcgacgagttctaagttcgtggttgataatgggctttggatctaaacttttttttatttatttgaatttttatgggcagcaatgagcttgtctactcaaatctcgtcggcagtggaaaaacattccaagctccagcacgatcaaggagagggagaatgagagagaaatctagtattttgaggttctcaagcattggcaaaacggaccagtggcgtggctgtcgtgagggttggggtggctaccatgagggttggagtggctggtggtgggaatcgacatgtggttggagatgaagatgaaaaagaaaaaaataataataatttttaaataatttatttatttatttatttttattataatttttttttaaaattaaaattataatttagaccattaataatttggcacgtgacaattttgaataagtaaacggatctgttcaagttggaactaacagacttacaaaacattcaactttgaggactattgccgctattttttgaagttggaaattaatctgtaccaaggtaaacttttagaagacttttgccgcaaatatccctttaataattctttgtaaaattaatttcaaaaaaaaaactttgtaaaataacctcatacactatagacaactggtccaatttttcaaataagtggttgaaatgtaatgctaaagaggtgatagcatcttgtgaagtgtaataccgctcttagtataatttaatatcgagtcccacttattttattttaataaagattataaaaaactattaactaattataggacgccacctcatagtggtgctaggcaccttagtgccccatagcagtactcaataatcaggcttagcaatgaaaagaccaatttatttcttacttgtactaccgtactgagttttgtcttaaagtcgctctcaacgatagtaaggtaatagaaaaagctttttcattacgaaaccaagatatctatcaatatgactatacaaaacttctaaacatcctttgtgcactaaattatctacacgtcatggagtgaaaaactatatcaaactactcgaaccagtttcagttattgacaaagaaaagcatgcttcaacaatagatgaagcatggaggccacaaaaaaaacagggaacttacgtaaaagctcgtccgtcaagggatattgtcaaaatattatacctactcctgcaaagggtgagaacatagttttcaagaacaatatacaaaaatctatgtagattattaaatgcattcacctagctatttgagataataacactaatgtcttagtaaaaacgatttgctcaaaagaaaacaaaggtcagaatgttaccgattatgtactagaacatcttatggagtgaaaatcatcgtagttgagtctcccagacaaaaaacagttacgaaagaaagggggtttaagcctcatgatttccaatctaacagtaaaaataaaacctggagcatggagtaccagaattcaagagtgaaagatttcaatgtgccattacatacagaaaattatatgcacaagtatttaacgcatagatagatgctagaggggataagtgtgggctggtagagtagaccctacagatttgggataatatgaagtatggacgtgtacgatttatttagacagaaagcttaccaataagaccaagttcacaacatcagtttatttccagctttgagtttcttctttagttttctcatctcctgttcttgttcctagtttagagaaaaactcaatttcagcaaataatacaattacaaactaaggtaaaaaagcagattccaatagttcactgcataaaaaatgattttgagcaaattcaatacccaaaacaacttcttccagagaaagtctgatctttcatgtagtaagatccactccattgccatatcatattcatatgtattaggctgagaacaatgtgaagtagacacagcatctctctggtccacgccacacacccaataaaacacgtattaaataaataaatataaacatttaatcttcgtaattcctggagctaataaaaatctgatttactagaggaggcaaataaaattagcatccaaacaatgtataatcacatttcataataaaaatatttattttgcgcaacaatcctacatgatgcattagctaccaacatcttttaaggccttaagtttcgtgggagtcacaggctgctaagaaaggatatatggagcccctgaagccattgttgctttcaaaaagcttaagaaagccatcaacttccttctagctctaccaaactcttgtcagcaaatcatcacagaaacaaatgcttcaaggtaacgattagggcttctttaaatgcaggctatccagagattgttgaatgcttattttattcaaacactcgatgagagtaaaataaaatatgaccatacttttggctatacaaaagtggacatacttgctcggaagaaaagttacaaaccgatcaagagaataagtgattagagcaattgttcatatagaatggagtaccaacataggttagggtatgaagttatcgttggattgggaaatgcttcaacaaaacaaaaaatagattgagaacaccaacttaaatagtgcatctagtttttcatgtgtcttagtttagacaagcttgagttggaaaggaagtgttgatccagtaaaaggaccagcttgagtttaaggcagtgtgagaaattttgatgctctccattaacaattaccaattttcacctaaatgacaatgttaacaattgggagataacgatagattcccaaagcgattcacttcaccaacactaaaaagggtaaatagtaaagtaacagaatgagagattaggagaatattggtctttgtagacgatattgtagggataagttttgttggggttgttatcctttactggttatcttatgttacaaggaaggggaattgtgagagatgatttgtttttttttttttgaaaaagagaaaagatccttttgtcattgacaggatccttcccgataaatattaaaagcctcccttgtggtggaagaaaaccatagttacaaacaattaataacaaaacagaaattctatgtgagagatgatttgtttggctatgtgatgagttgatgctctttgggagtggttagtttaggtgtattaacttgttgtatttctcaataaatggccaaatgtcaaactttcgttgatgggaataattctcttcgatggaaggagattgctagggaaagatagggtagtattcatttatatttattcatatattttatgactaaagaaataagaaacagtaaacattttttcattctcctatttttaaatggtatcaatgtgaagttctaaatggcttaccaacgggccatgactgaatgaaagaagtcttctaatgcttcaagtccgaccaaaggagtaaatggaggaggtacgatcaacaatagtataatctcaaagataacccatcttgtacaaggataggagaaagcactcagggttgcgacatattccaatttacatgtcacaaacttaacagtcagaattatttagaatgacctcaatgcgtgaaatcgatgattgatggactaaggaaagctcatggacgtctgaaaattcatgtcacgacatggctcatgaattccatggaactaggatttatggaagttgttagtgagaagtatgtgttaggatcccacatcgactaagtatgagattggttggtgggcaaataactacttgggtaacttcatctcttaggctagtttttgagtgaaatctactcaagtgggtgtaacaaatggtatcagagccatgcaccctcaaatgggaccaacgttgcagaaggagcaacctatggaaaaagcccaaagtgggccaccgcagggttggccacaatagaatgggtcatcacagacgtctactctcaaggtaagtgtgttgttaggatcacacatcaactaagtatggcattggttggtggtatataattacttgggcaccctcctctcttaggcgcatttgggagtgagttctacccaagtggatgtaaccgtttgtctagaaatgggaactaaagccatcgtattagcatgccaaaaatggaagccttatctactaggaaggaaatttttggaaaggatagattaaaagcattgtgaagtgcatttctctaagggacatggtttatgtcaagctcaaaccataccatattaagtcgtaagcatcgtgaaataatgaaatgttgtctccacagtattttggctcctaccaatcaatgcatattcaccttctctttcatatatccatgttgatgagagctgtgaaaagttgactctgactcgattgttcaatgtcgtcctcaaggctaatcatgaatggcatgttgaactcaaggttgtggaagatcttagttacaatgcgaatggtgagttggaagtccttttcacatagaagcacttccaaactcatgggaaaatttgagctactcaatgtccataaaggggtaaatgatagcccattggttaaacacacttatgtaagaaagaataatagaatggggactaagtgacatgtggctgagggaaacgggtactatgaggggagagaggctttagttagttattgctttgtggctgcaataaatagaatagtggtagagaagagatcgtgacaattttgcgaattgtcgtgaaaggccaggctctcaaatctctagtggtttatatttcttattgccattgtttttcattcttgaataatacaagcttattttatattgggtttccatttcctgaggtgtacttattgctagtcacgaatcagaggattatttttaaatcatttgagagggagtgatagactaggttcttttccaaatacttttctttatcatggagactttccattccttttctccccttccaattctcccaccagggctttctataattgttcgagaaattgaaatgataacttactcgaacaaaaaaacttgatagtacaaacgcacacttgcaagtatttgtgtacaagagaataagattaactgctctacctgctcccgcggcatctggtatcgaagcttatcgatagcaatatggccatagaataatgttcgctttccttctgggaagcaaggagttcctaatctacctacaagaggcctgcaatgtgtaaacaaaacattactcaagcacccaaagtactataaacaagttttaaaacacaaattatcaaatagaagtagttaatgaagggacaataagaaattccatgtcacatcttgtgagagagaagccaagactcatttgcatgttctccaaaatgtaaggcttcaaagctctttttcttaaagtgtttgcttgaagaaatgtggtcaagagaacacgagagaaagacgtattgttttaggatagaaggaaaaagtatgaaaagactagaaaggacttccgtaccaagcttagtgctctttttacataacatatgaaaatgcgggatccaaattgataattgagcttccaagaattttaacacgcaaagacatttgaccgactcataaaccaaaataagcttagaaaagggaaaaggatacactatttcaattgttatcccattaatcaccccgaactgcctcgaaatgaactccctacactttttcttcaccaattaagtcaacattttgagttcatcatgaaaaggatttaaaattcaagagtaggacaaattcaaggtccgacaaccttgtgaaagtgatagccattggagtttgacaaacaaacatccatgctttcattaaatgaactcaagtgtgccacaaactattaatgattttgtgacaaagttcattttcttttaaagaatttaagatttaaattctataaatttaatagtattgcttatttgatcatttatgtttgtattgtttatcttaacttggacagacatcttgctcccctccccgcactttttccttttttaattgcaaaatgataagtttctctattcctagtcatactttctttatataattttttttttttgaaaatactttctttatataatgaaagcgcaaccatcacaaataagatggccttccaccatagaagaaggaaaaagaaacctgaaacgacacatataatctatcgagctgagataaatatttctaacatatatttaaaaagaacaaggctatgaatattactataccaaattattgattatagaaattatgtacatgcatacctcccattcgataatagcaaacaaccctcatctaattttttaaccacccgctccgctatgtccttttgcttgaaaataacaaaagcttgacctacaacaagacaagcatgagtatataaaaacagaaaaacaagaaaaatgcttcagctgagtagttgtgagaaacaatacttgtgtcatgcaatacatctcaaagcttaatagtgtgaaacaaaattgactagcaggtcttaaagcctaaaagaggaaaatcatcatttatataggtatgaagccaatcatctcataccagaatatggactagaaatcattctccgttggatcatctttgcttcgcaatttgctttgaaaccatgccacacaatatcctaaaatgtattaataaatagttacaaccatgagaaaaaaaaatgtcaattattaaatgagacctcgacacacaaatagctaagtcaagcaattaaggaagtgataatcatgccaggcaaaaaatatatgcttttgcaataaaatgtattcgcaacttgcgttaaaaccatgccacacaatagccaaaaatgtattaataaataattacaaacatgagaaaaattgtcaattatcaaatgaaacctcgacaaacaaatagcttggtcaagctaataagtgataatctggccaggcaaaaaatatatgcttttgcaaaaaaagtttttaatgtccgtgactgactacctcccgaatttattaggaagcctcacatatggcagagggaaaccgcggtaacaaccattaaaattagggagatacagcaatagagaaagaaatgctatgaagtaagctaaaaaaaactctgttgctcagcacagtcgacttatcaaggcagagtatactaagaaaaaaaaacaataaaatttagtgcagaatgcatccccactctatgctaaggtctaggaaggatagcccctcaaatgctttagccttataaactcaagctgcaacccaaaatttgagcttctcccacaaatcttctgctgtatggacttaatcttcaaagatccttacatttctttctttctcttttttgagaagaaaaaaaacaaggcccacctaacccaacactatttggggactataaaaccatggcaattgctatggtatccacctacgaggggcttgaaccaaaggccttatgggaagaaaccatatgcctcaccgtttgagttaaccctcttggataaacacaacaattcaatactaatttatcaacataaaacaatgaccaatcatacagatgatctgatgaattctgttaaaaaggatttacagcaatgtaatcaacaaatatgtattctgcatcacaatctacggaagataagatcacccaaaagaaaccagtgctgacattacctttacttcttctttagtataggaaggatccaaattctggagtaaaacaagtgttccttgttcatacgcatttcgcatttgatcatcccaaggctgacaataaatacaggataagaacataataactattaattaggtcttccacttaatggcatcccctaaataattggttcagcacaggtgagcatatatttttacaacactaccaaatttaactagaaagacaaaatattttttttacccaaacaactaaagtacattaataaactgccaatgaatttactgggttggttgttgattcgaatatgcccaaacaacacaacacaacccgaccgatcaagattaatttaaatacttttctagttttaatcatagataaatataacatgtaacacaatatgcacaatctttcatattttttaattaatttttgaacactcattttatgtatgtacagataatttgttttttttttttttctagtttaaatttccttaaacaatatatcaaaatctaccagtcagtttggacacaatttcaaaataacaggttacaaattgtaaaagtacaacttgaattttgattggccagttggacaacctactcaaaccgataaatgcacacccctcaatatataagttcatgaattttatgataatccttgtctcaagtcctaagtaacaaaattgttgagatataatcaaagtagctggatcttgagctcaaggttgtcaatggtatattctccaaactaaatttcaaggatgtttacacatgaataagaataagagttgcaagttcctagaaaaacaaaacaatgttatgagaaagcaatacgatgcatgtgagagtgttaggcctcaaaaattagtcacaagaatagagttagtatgattaatgtactaactactgagttgttcatttttttcaagtggtcgagttatacatcttttatagagttgttgtgttgatccttttctttagttgtgtagcctagtatataagtgaggcttatctctcttagagagttcactattgtgtgttttgatagagtaaaactcttttagggggatcagtgacttaaaaacttagcatattgtaacaatgatatttatatcaatgaagattaatctctagggtctttcaaattggtaccaatgcagtcgaccatagcaatgttactcgtttaatggagatgatccatttgagtgggtgactagtgttgaagaatatttcacctccatcaaattattgaaagcaaggtcattgctacaaaagaatgccacataaaagttgcttggcattggtttcaaatggtggaggaacaagaaccaatcaagaacatgtagaattttgtaatcatgtttaatcgttgacatgtagtcgaatggagtgatgatcccttgcaggatttgatggcactcctatatgaaggattggtgaataagttccaaactcccttcgaaaagacggtagcaaagcttcttagtattgcagtaacctttctttgtaatatccttcgctaatttgtgttacaaaaatttgcaactagtgcaatctttctgacctagaactcttaaaaacgacagactaaggtagaaagggagatgaacaactacttggtgttttctgatgtgaatcgacaaacaagtgttcagccttgtcctttgggcaaccctttaacaaaatcgtttgattttgttagttctacttgtctccaaagaatttcagtgtctacttcgatggtggttgctccaattacaagctggatttttgttgtgagcgaatacagcatcaacaaggggcttatttggtgtagttggatgtccatatattattgttggtggttcaatttcattgaaacttgtgaaatacacaagcactctaaaagtcaatatgggaacaaatttccatgcagccctcaaccaaagaattactcaagagacaaaaggatgcaaatgcaaactagttcacatatcaattttgagaacattgctagacttacacttgttgggagaaaagttaagccacacttgttggggggaaatttaaggcttcaagaacatgaaaatgccaagtttgtgatcattttttaaattagtggatctaagtgtacaagcaacatagtttgataaagataccgaagaagatcaaacttcaaatcaaaccttacttgattgggttttttttatagagaataggcagagcatgaccatttcagggttaggcctaatattcttcaccttgaggacaaggtgaatgttgggacagcaggtaatgttaggtattagttaggattaattgttatttttaagtagctgaattgtaaatcttgttagtcagagttgctttgtaatgatcctctgtttgagttaagcgaggcttgtttctcttagagcatctcattattttgaaagaataaaactctttttggaagatcaccaagtgtctcgggagcttggaatattgtaaatgttatttctatatcaaagaagatagtctctaaatttcatatctggtataaggtaccagagagggttaaaaactcacaaacccctaaatttcaagaatgtttacacatgcctaagagtgaagagaaagcaataaaaattaagtgagaaggagaaaaaaaaacttacaagccccttgaaccattttcttctattctgtcaaaatttaaaaaataaaaaatgttaaatccaagcaaattatattgaataagaacaagatctcatttgtgatgtataacataagtgaattaaaattgcacatcaacagcacccatccacctagtataaatccaagcataaaaataaataagaaaaaaatcaccgatgaaagtaagaagcaaaagccaaagcctttcactttgattgtcttattagtgtcatttagagtattgatagacagcaaaataaatattaaaaaaaaatgaatctatattccaacctccctcccacacccccaaaatataaacaagtaaattgatgcttggacaaaaaaaggctacacaatacagagtcagtactacatcgatgcaagactgagaaaaagcaaaagatctcgttaatacttacagtatctggtctaggaacaacttctaaaccttgcccatcagatttacaatcatcattatgagattggtcagcaggtgctttcaacaacattccattagaaagaaccacagtttcacaatcactcttcagtttcttggaaatgcttttctctgtaccagaagaatccttacaatgttttgatttatatttaccatcatcaggagaaacacctggtagtgctgcctccttacaactggtatcaaaagtagatcttggcggacccatgctgcttttgcttccatctacatattcaaagttaagctttgacttcttagaaggtctatcatccaattcaacagaagcatttttgactttttcttcactcccaactaagcaagctttgcgatgtgacacattttctttaatctcattagcatttgccaggttagctgatgtaatgcataaaccagaagcagtcttttttgagggataagagttctgtttaattaaataaacatccaaattagcatcatgatttggtgaatcaacaacacgatacccatttgatgttccagcgacatagtttagggataggttcctctcagttgtactaactgtagcatcattttctccagcattttcactaacctctttcctttctgaaccaactttctgagtaccagcatctttcttattatccattttattaagtaacaatttaactgcaacaaagatagaaaaaaaattagattgaggaaaaatcaaactaaaaatgatcaaaagatagaattcaagttcaagtgattagtataaatagtacagaccatcaatcccagcaatttcatcatctatcttatccatgaccttacaggtaccaacatccaatgtccggcaaaatatgtagtctgccatctgaagctcttcatttgttggttgaggatttctgctatcttttgatacacaaacgacattgcatttcccagaaattgcttcctgattcaaggtacaaaaaaatattcatatgagttgtaatgtattgttccatattctacatgcaaaaaatgcacacatacaaacattattaaacaatgccgaaaataagatacttgaatgaaaaagtttatttcaaaatattgtcagtccagtcagaaaaagaaaaaataaggatactgagtttcaaggtgaataagatttgataatgatgagcattcatgtagctcctacctatctatttaaatgtggatatatacacataaacctgcaaattacagagattgcttgcaaaaaattataaagataaatgctaaggttgcaaaaaaaaaattaacaatgacaatggtctttcaacacaagcaataaagagccaaacatatatttttctgattttgaaagtaaaagcatgtcatataactaaactaaggattttaaaaagttaaacctttttagaagaactacaagcaagacaacaacaaattctttcaagtctgtttatgatgttataaagaacaagaacaataataggaatacaactaaataatttatagaattgtcaaaggaaatataaaaaagttgcaagattaaagtgcttccatggggtgtagtgggctaatgagattctgtgaacagtaatcttttcaattaccaaaggattgatgttgaaaaggccccgaccttcaccagatgccaagagtaattcattttcagaagcttcttccatcttaagaaacctagaaatctcacgaggtcgaaaaaaccatagaactttcactttcttttttttatcactaccttcccacatcttaatgagcttaccaatatgaggatcaggttcaccttccccgaaaagataaacagaatcataaagaaagtactccacaccatcatatgtaaaagagccataaaactgaacatctttcttcttcccaccctttttcttcattactccccatttgaattcaagaccttccaacttctcagcttctaccatgcctattacaaaaacagcagtagtacactttccagttacgactagaagtgaaattacacaacatgaaaaatggatatcttatcttacctatataataaatgcctatctaacataatttcttgtggcttaacagcatattttaagaaattttattagtttaaacataaacatgtcaaagactaacatcaatgctgaacagatgcaaatgaataaaccataattgttcacaacttctctaaacaggttattaatcggtaactattcattgaagcattgtctattttgcttctcctattaaaatacaggataatatttgaaacgactacaaattatctctccaatcaacaacacaacaatgttccaggtaacttatttgtcactgtgagtagttaaaataattacaattcaaattgcctagaaacacaaaaaattagatattatgtcaccaaacactttatacagaccaagatatataaattatcccaaacttagacacagtactgaaataaaatataaaatatgtgtaagaacaaataccatacaaatgggattcacatgaaaggagcattgaaccaaaatcagaaacttctgaaagtttctttggccctggcccttacatttcaaatggaaaaaaagattgagaacagaatctcgaaaaccatccagactagaacaaaatctgctatgattaacacatattataaactaagaatgacaaacctaactaatactgaaaagaagaaaaatgaaaaagaaaagaggattagataatagctacatcaattcatatcctgtagaatgccaatgtagaaacacagagaatcataagagaaaactcaaacaaccagaaaaagtttccaatcgtctctgtgtatttaatccctcgttaacagcctcaaaacagtaagtaaagtacctgttatgagtgaagcaattgtttatccggacaatgagtgaaacggaattcctactcttctccgacctccgatcagtagtgaaggaagttgataatatttttagggtttgggtttagtgacagaaccgaagaaagcggatataaagagagccaagaaaagaagtttgctatgacgttacaatacaacaaaaaacaactatgtgcttggcccaaaaaaacaatttgtaatatatttgcatcaatcttttaataattacaaaacttaatggagaatttaataaaaattacataaaaataatatttttcttacaaattttgataaaaaaaaataataatttctatcattaatattattatcttgttattataaaaaataaaaatatatataaagaacaaaaattacataaaaatcaataataaaattatacatttattcttacatcacaacaaatattaaatttcttttctcaaaaaaaaaaaacaaatattaaatttctattacatttaagcacattattaaagtatattttttttttagtattattctagtataaatgtcttgtcttttgacatggttctatagttttctttaattggttttgttttattagtttttgacgttagttactggttcttggttttgagtttgttcggctgtccatggcgtcgaatagttatcaacgaatagaggcagagaagaaaatggtaggaatttttatgctaaaatggcaggtgcaacctgaaatagctgaatttgttggtataaaagaagctttaagctggattgaccgtcattcatggggacgagtgattttggaaactgatagtttaatttgtgttcaagctgtgcaaggccaaattactttgtcatcctcttttggtcttttagttcataatgttcgtact

SEQ ID NO: 161290 - DNA, 2074 bp, Cannabis sativa
tatatatatatatactgatttagcatatgaaaccaacaagatttgtgtatttgcatatggatatcatttgacatagttctttttccccttcaatgaggaaatatggttgacctttgactccatatagtactgtgtgttctaaaatgaattatcctttaaatttgttagaaatatttaataattttctttttattttttgatgaaaatatttaataagttatatggaagccataataatcagttctagtactaatagttgaatcttgggtacttaattttcacctttatatgatatgtagtgaaacaaagcatttatttgatcgttcttagaagaaatcatgtgcataagtgcattctctttattattattattgttattattatttattgtatcgaaggtttcagttctttttaagtgttattgagaaataaagaaaaatagacaccggatattgatagagataggatactggaattaggaaatggatgaatatgtgggtaattgtagttaggggtagtggataagatgaaatagggttgtatcagagtctaagaaaaatgagtgaatcaagtaattgtaatgcattgagaattagctcttggaagagttctgggtcgtctttactcttttttatcttaattgaatataaatctaaatttctctctgtttctccattgtttattccaagtgtttgtgctactgaattgaggaccctagtgggctatgtcaaagaactactatttgttccccaatgtggcagtagacagaacaaattaaatcatgcaaaattttaatatttcaagtcagtatatataggttttaaaagaaaaattatttgcttactcccttatattatgctttcagattgatgtgcttgaggttgatggtgtttattacggtatgtattcttttgtttcactctcttaattttttttatttgtaaaatcattttgttgctatgcttatctgaatctagcaaaagatgaagatagaaaagaagagaataagaattaatgcgagaattaaaaaagaaatcttgatggtatcagaatatttttggtttatatgatctccaaaatctcattcatgtcatggttcattcatgctctataggcttctcgggttgtcatcgctatgaagctcatcagcgtcttggtctccctacaattcgctgcaaagttcgtcgcggaacaaaagaaactcttaggttagttttgctgagtcttaccaacgcattaattatgactgtattctaagtaattgagattttatattttaattttccttcttcttcatctttgcaggcatcaccttcgataataactctttgcagactgcctcttcctaatcgattagcaagcagcctgttaattagagatgcccggtattatatatttattaaattagttagtataaaacattgtacattcaaaataatgcaagtattttacaattattgttacagatccaataatatacgcatatatttagtgtttttgtggtaaggatatatggaaaatttataaaatataactttgatgtggttattgttttttattctctaaaacttgaagaaaaaaaaaagatctttttagtttgaatgggattattgaaacactacatccccacatttcttctcccgcaagcaggtccaatcaggtataaaatggatggatggttaacctcatcccggaagagttaatatatctccattagcttcatccttactattcttataaaatttataagtgttacatgaaagggcatagtgactaattagtaattgttagtattgtctagttagtatgaatatgtaatactattaaacaaatgggggatcaatgaatgaaatgagagaaaattaggattattcctattggagtttggcactgactcgaagagtacaattcgatacaattggtacatgcaagatgatcggattgcccgatcaagagctagcgggattcttgaatccccaatctccattcgagcagagagcttttcctctacctccggtgaattgcgattcaactttggttgtggtttgctgccatctcggatgagatccatatc

SEQ ID NO: 161291 - DNA, 1210 bp, Cannabis sativa
aacacccatataatttatgtataaatagatttatgttaatagtaacacaccacaattctgagttgaaagttcagtggatgcaggtgggagatgatactatcatgccaaccattaggtgatgaagctatccattttttttttggttatttaaaatttgagtgtacccagctgaaggttgtgttggggctcttttgttttggtctgtaaatatatgatatgttattatcaagtgtttagtttctgatcctgatctttgtttatccttttgtatttgattatgatggaaactaaactctacacaagtttttttcttctttaactctctctgtcatttcgtatatatcttcgtacgaggaattttgttattttttttattggttggtttaacctagtaatgaagaaaagatttttcattagttaaatttggtttatctacttctttctattgtatgttgttagtataatttttttattatttcaaaatgtgttgcataataaaatattgtttctaattattttctattttaaatttaaactattcatttttctattgattattcatatttcaattactaaatatgttattgttattattattatttggtatacaattaagtattaactcacattgttcacatgtctaaattttattttaaattaaaatattatattacttgtttatagaatcaattttcttattcttcaagatattattagcaattttataaaatcaagttgctcatttttttctttgactgattaagaacttctttcaatataagaaataaaataatatagtttcctaccccatctcctctaatgaaataatatagtatcatttggataaattaatactagattaatttataacattgatttttattcaaatttaagaaaaataatgtaaattaatacttaattgattaatagcatagataaatttttacttttatactcgatcaaacgaatgtcatgtatcttagggttattttcaccatgtatttgctgatttctacaagcttttattatttttgaaaatgtaattttgataattttttctaaaatgaaagtctaaacacttcttgacgttgatacgttctctagttatctttttttttttctatataaataaataataataatataaattttctaattaaataaagaaatttttacaccaaaaatctgttttgcacattttattactgtt

SEQ ID NO: 161292 - DNA, 7610 bp, Cannabis sativa
cagacatgcagtaaaacaaagtctactgtgctgttttctcataatacctcaaggaaagctgaagttcttaaagctttgggagttgatcaagtttgtggataggagaagcacctagggaacccgtttgtttttaaaagaagaaaagcataggagtaccaatttctgaagaataacatgagaaagagactaaagggatggaagttaaagctcctttcttatgctggcagacttacgttaatcaaatcggtcacagcctctatccctatgtacaatatgtccacgatgaaggttcctttatctatttgatgttcgatggatgcaatggctaggaagttttggtggattgggacatcggataaggatagatatttagcatacaaggcatgggacaacatttgtcaaccaaagtcatctggtgggctaggcatcaaaagatttgaagacttaaatagagccttactgtccaaacttgcttggagtgtggctcgaagagataacaaaccttgggttaacttcctgttaaggaagtattgtcgacatgaaaacttttgggcagttacaccaaggcagagtgattcgtattgctgaagaaatgtattggaagttcgaagtattattcttaaaggttctctagctatggctgctgacgaaaagttgatagatgcgtggagacaaccgtggatcccttggttgaagtatgatgagtttcggcagttgatggaacaattgaggagtagaaggtatacgtttaaaactttagctgatctttctaatggaatttcctggaatgaagaaatagtggtacagatctttggggaatctttggggaagaggatcttggaaattcctcgattatcctttccccataaggatcaaattatctggaaggaaaacgacaatgacgctttctctgtgaagagtgcctattgggtggatcaagggtaccgtatgaatccaaaaaaggacatttggaaaatgatttggaaaggtgagattcacccaaggctttctatgtctctatggaggtttttgaatgaagctatcccaattcgtaataagctgccttttgctggggataaacaatgccttctctgtggtattgagcaagagagttgtctccatatttttagagtgtggtgtttacagggccctttggatctctagaagttttcctctgttgataggaaatttccctggttcgtcaatgatagaatttgtggagcgtgtgttgatggctatcccgagtagtacctgtgcatccttcttggtgtacatggcgtgtgtctttgaagaagtctggagattaagaaatggaaccctgtttaagggagttcagacaagcttattaccagcgatcatgcgcattaggaaaaaattttgtgactttatgagtcatcctgagatcgtggagacaaatctcagtgtccctaaacgacctttttgcaagaccagtaaggactttgactttgtgcttactaatgcagcctggtcagcggatttagctggtctggccgtggtaatgatcaatgtggaagatggaccctggatgtataaggtggaattggcaactgctggttctgcattagaagctgaaactaaagcaatttagctggctatctcttgggtcaagcaaagaacagaatcaagaattctggtgtgttcagattgtttgactgcaattcaggcattggaaaaaaaagaagtgtgtgcctaattggaagtttcttaatgtttctctttcgattttagatttactaaaagtttttcgattttagatttacttaaaagttttcgagtttgtagtttttattttgttaatcgtatggaattggtttttgttgatggattggctaaagtgttagaggtgccacactttctgctggtgtttaccaaggggagggcatttcccttgtaatgcccatcattttctctcagtaattaactcttagttccttaaaaaaaaaaaaaaaactgcaataaataaaactagattgggagttttacattatccctatttcttttttttttttcccaataattggcacacttggtacttaatcaatgctctaagaacttcaaaatctagagatccaagattcgaacttggtctcccccgattcccaacccccaccactaaaccaacctagtggttcgagcataaaaaacagaactttcacaaatgattgaacctaagcatatggatctagtaaaacatattgcagttctgcaaaacgtaatatattatttgtttaagacataaaaaagcattcatacatcttttgaaaatgactaccagaacagataggtgggaatatgtggcattcatagttagaatctcatttgagaatgattagttaatgaacactaaataatgaaatcgagctttttgctaaatgtgtgaaaaaaatcacaagaattgtcaacgtggctctagtttaagcaaaagatacaattataatgcattaaaaagaatggaatacattttataaatctattaaaatgaaatggaatgcaacatatacataatttcttaaccggtgcttgagtaactcaacctaaaaatcttgatcaacatacattgctgtctccaactttccatgttatttgtattgtgataaagtcttcagctttttacctcgcaatccattccaaaaggacgcagcatttactactttcttcccaggaagctgaacttccaatacctatatgagtagttgtaaaagaaaatgagctgcagggccgcacgaaaaagaaaaggggaaacaagccaaatatgtagtttgtatagaaactcatcactttgatgtaaacgaaagatatgagaattgtgatcttttttatcttagttgtgggtgagggagtaatagattcaggtttcaacataattggtgaaatatggtttctaagtagtaaaccttgaccaatttataatatacgacacaaaattattggaaaaaatatagatgcaatagcaaaatatttatgagatgttgtctctaacaggaaacaaaaagtagtaaaacatgaaaatattgatagagtaatagaagaattatgaaacgcacctcaagggatgtgcatcctccgcaaggaaatattaatccacctttgacaaaagtaatgtcatctgcttcattccgctcaaaattgctacggctgcagactcgtgttgtgataattttaagctctagttctttgcactgaccatctccttcatcaacaagaacaattttagctcgagttcctggccatcctgcaaatgcacgaacctaatagtgattgtatgtcatgactgtataattaaattcaaggaagaagaaaatatgtaccttgttatgcaggactacagcatcttggtcaaaggatagccaagactcttcaggcgcaatctgcaaaattactaccaacaaaattacaacaggtaacaaattttgcatttcattctaattccacattgatttagtacaaaattgaaaaggaaaaaaaaatgtcaaacagaaaaggatgacttttcatgtgaccaacaatccgacttagcatataattttttttttttgcatgtgaatttcaaagcgaaataaacacgtggttttgtcacccacaaggtcaattcttctgcaacttgtaagtgatatctgtataaaatgcatgcatggaaacatgatttcacagttctgtatatatttttttcttgatgtgcaatatgcttcaaacatattttgtttgcagcggcataagtccttttttgtcgatgttcttattttttccaaaaattcattattaatgaaaatttgaatagatataaaaaaaaaaatattaaaaaaaaataaaaacagatgaccccagaaaccaaaacccacaacaggaaatatcagtaaatatcctgatagccgatagtagtgaacaaacaatttgaacactttcctttctgtagatattttgttttgtaaaaacgaaatcttagaggaccttggagaattatacaaagatgtacagccataattttgtcagagtaaatattataatggtttctttcgagccaaaaagttaaattaggtcaaaaaaaagtaaatattttgaacaaggtctaccttaggagctaatgtaactttagaatcatcttggggccatgctttttccttggctgatccatcaagtaaagaaggaagctcccgaatcaaaagtttagctcctgaagaatgcagctatgtataagattcttaattgtaaatgttctctcaccactaggagttgaaagtttgttagcaactaagaaaaaaaagagtattacttaaaaccatttttaagcaatcattaaggctcaattattacttaaaaccacttttaagcaatcattaaggctcaattatcaatacgagggcaatcaacttcacattgacagaattacagtttatctttgtgacattcattccttttccgatgagttttaaaattaaaagctgactacgtcttctgaacaaatgtgatacaacatacaacaccttcagaaaatagcagtgcaagtaaatctggtgcctgcaagcaaaccagtgtgaccatgagtcagaaaatgctttccaaggacaagaagtgttgtaactttttatattaataaatacattataaatcttcaaagttagtcatcaatgcaacgtggtctaaacatgaaaattgttgtaggtaacaaataaaccacaaccttagtttcttcagacacgtgaaaatttccaaattggtaaccgaatcacaaccagtaacccaattccaaaattgaccaaaaaattccaaaactaaatactattcattaaataactcagatagacataaccaacctttatttgatcatcaacttccaatctttcacacgcaattacaggcccagcatcaagtgcacgtactgtgaatgctagggacactcctgtttctttgacaccatcctaatcattggactattgataagatttacaaatgaatttcttgcgcagaaactagaagaatgtgaatttaaaattattcctgataaaagtgataacaaaaaacatataatagaacctgcaatgcccgttgaacaggagcagcaccgcgatactgcggcaacaaacttgggtgtatattgacagttcctgggaaatagcattttcaatcaacaacttatgaagttgaaacaagtcaatgcattgtttccttttcgcttcaaatcatagacgaaaaccaagtaaaagaaaaaaaacaaatgtttgcagtcattaatctcttatttcaaggacagactaatccttcctttctcaataactgcaaccaaaaatagacctagacatgacaaaagaaattgagggcttctagaacacgtgactggtatgaatcctgtatgtaacaagtctggggttcaaacagctggtaactatttacagtttcttataagaagaagaaagaaaaaaaaaagtttaaattagggttgtgattccaacttctttcccatatctagcctattcaaatgtcaagaattgaccaatgcaactgcagggtatgtttgacaaagacataagaaaggaaacaacttcctttcttttcaatatatgtttttcttttttgagctagactagagtctcaacaagtagttctcactaactacagctataaaaagaaatagacatgcacaactctcatagcctatatcctaaaaaattatacaccagagcaaggacatataaaactgaattaaattagtttttcaacaatattgtaaactgttcgcagctccatccataacaagattaacaaagcttgaaatctagccacatatatgaaaataattagcttttcatgaaagttcattttaaaaatgaaacaaaatttatcttttaaataaaaaaagtaaaaaaaaaagaatgaaaggtgatatttttttctaagattctcaacatatacttcaagaatcagaagaaaaaaaaaaagaaatgtgaacagcactgcattagtagataatgcattaaagtatcaaagaaagtgttcaacaaaatctacatactgaactgatgcattcatattgttactatacactaaataaattaacagagtaactaactaagcgtgaaacatcatcgctaaattgtaatacgataattgtacttctaactgtcaagagaattatggtaacttccattgtttatctatgctatgagcacaatcaattctttgatgaacaagccacataaaatttgtcataccgattactgcaccttccaaaggtcagatgtaaacttgcagtgcacacgacatgttttcatcttacaagcagtgactaccaatagaggtctctaactttcattagaaaaacacgtaagactaagtactaacctagtggaggtatatttaaaaacttgctcggtaaaatattcccgtaagctgcagtgatgcaaagctctggctgcaaagctcttaaatccgataagaatgcatcctgcacaaaagtaagaaagaagaatgaacccctaacaagaaatggaagataaataatagtattaaaaacagaagaaagcatcactacaatttctatggggttccactacttgtaatctatcatttgaaagcatagcattattagcatgtgatatacaccaaacattacttgaatataacaagaaaaatatctcacattacctcagcagctcgttcaggtgtgaaaataaggtccgaagggaagtttctatcaagagcatattgtgctattggagaaggcatcagtttccttcccctatcccttcttgaaggtggctgagttacaattgctgaaacctagattgtagtaaaaatttattacattagtaactaccatatcctcaatctatagtttaacaactctgtacttaatcaatatgagacaaaacaatccgcatgtggaaaggagttcgttaacaacaaatgcgtacttcaaaggaacaaagcatcaacagatcgttgagacactaaacttaaaaaaaattaccaagctgaatgtgaccatcttaaacataaaaacaacttaaaactataagggcattatgtatctgaaaaaaaaaaatagaaaagaaatcctaaacggtatttcttggcaatggaaacaaatgtggataaacgagaagtaaggcagataagtggcttcttagtagctatgaagaacgaaagagagcaaatttacaagctgaggagaaataattagtagaattacctcaaaggaggattgtggagaagcggatgcattgagaagagcatcaaggacggctgttgaaaccttaaaagagagaaacccatttggtcagtagagaatccatgagggagagagagagagagagagagttgaaacctgtggagaacccaaaaagacgagcggcttcttcttggtgttggaagaaaagcttaatgggtaagagggaaatgatgaagttgaggcactgaagcagcagaagcgacgaagcatcatcctcaatttctctccctcccactctctctctctctgcttcttatttgcacttgcaaataaaccgggtaggatttaaagcgagatttattttattattattattattatttaaaaaaaaaaaagagatttatttttagaaatttttacatga

SEQ ID NO: 161293 - DNA, 4545 bp, Cannabis sativa
  modified_base (3778)..(3781): a, c, t, g, unknown or other
acttagctcaacgttttgtaatagaatttgttaattctgttacaaattaccattagctcatttactttctattgatgcagttttttatcaacggatataagaagatcataaatgagcatgacaaaaataagaaattgttaatcaaagtgaacttgtttgtgaaagaaaatttgacaaagacgaacacgaggattttgtagtggttcaccccctttcagcggtaatggactaatccacttgtaattttattattctcaatgcttgaggatagatctttagggttatgttctccaagagtttactctccaaatgagtttttggagtaagacaatgggagttcgtgagaacgagtttcagtgtattcagagtgttctaagtgtgtcttttacaattgatatcatcacctcctttatattggtgttcatttaggactcacttaagttttttctccgatatatttgcctcccaactactgtttagtcaaatttaaagtttaaaataataataaaataacattttaaataaatatctagaaaaatgacaaaagttgaagatatcttatccattgcttatttttgtcatgaggaacacatgctaagatcgcgtgttgttggtaagtcatgagaagaacgtgaggcattccccactttgggccaagatgatcatctagggcctaggtgatggtgttggtcactacctagggccaagatgaataagcatgttgaagctcaagttgggccgaggtgatatcttctccttgggtagagatgagtgtcttggagccttcttgggccgagatgatcatctacgacctaggtgatggtgttggtcacacaccgcaggtcgagatgaatgaacatgttgaagtccaagttgagccgaggtgagtgtctcccctttgggccgagatgagtgtttagggcctatgtgatggtattagtcacccacctaggaccgagatgatggaattgtccccttgattggttttaatagtattggggggtcacccatgagtttcttcaatgcctaaaatgcttattcacactcttccatccattcaatcttattgcttcctcacaataagttaaagaatggtcaatatttatcggtggacttggacacaaaccagttgagtgcaactatgcatcccaaggctttaaacattcttctttatttttaggaaaagaatgtctatcaatgcatttatcttctctagattttctttgataccctgtgagttgacgataaagccaaggaattttcttgatgattgccccaaacgagcactaattaagcaaatttagcttcatgttgtatctttgcagtatagaaaaactctcttctaagtggtcaatgtggttcttggaaagtttagacttgacaagcatatcatctacatacactttcacgttgatctagatctgatctgtaaacattttatttacaagtcgctggtaggtagcaccaacattcttcaactcaaaggacatcatgttctaataatagagccctatgtcaaaagtgaagctcgtgtaatcctagtctcccatgttgatgggtatcatgttatatctagaatacacatccataaaagacatgatcagtacatggactgtaattagtgccgactagttgatcaatgcaaggaagcaggaagcaattcttggagcatgccttatttaagtcagtgaaattaatagatgttcatgttaaggtttatgctctgaaaagcctataaaaatatattttgattattaataaagagttgaatattttgatatatacatgaatatttaattattgaatgatttataaataaatatcagaaaattcattattcatatatgaggctatgacttgtagctgtacaaagaactaagatcacttagctatgaataaaacagtcggcaacatattaaagttatggaatcctttatcaatggttactagtacggttcactaatgcctgttctttggtgtaagtaatcttggttcgaattacagatatagtatgacatcaaagtgaaagtgttgtatataatagagattatatatgacaaggatcgatatgaatgaagctatctttatctaaaattttgtttactgtaaagacctaattcatatcataacgatgattaatagtagatctgcctaaattttgagtaaacatgaacttttgttcatgttattagtttctttgattcactcgttaaagtttcttagagaagatgattcttacaacttctgttttgggaatctaataatgtggatgactgggaacatgatctatagttatagaatcttgactttcttaacggattcaatgttgattctctttaagtgttaattctagatctgaaaagttgtgcacaaatttacttccactagtgaattaatggtactaaaggataaacaagtaattggaagggtaaaacggtaatatgaccaaaactaattacaaaccaacacatcgagggctaatcactggaattaattatatcaacggacactagagttaaactcagtaaatataattttatatattactatgaattcaattctatattaatagtggagtaatcatgaaaaaaaaaattacttgaagggactcaataaattatatattttattggagcttagaattataggtctatgcctctatggtcttcgaatcgtcaccttaaacattgttaagagaaggaataaagagttatataatgttgttcgaaaaaatctattttgaattagaaaaatagtaattatttacttttataataaataaatcattttttaaattaattaaatagccctttcaagtatagtaaactaaaatcactgaatatatacataaataatcactataaaaatattcctaactattaaacataattatttataattccataagtaatcgtggatctaattattaatatttgtaaaaaaaaaataataatttattaaacataattatttataaaatctatattaaaatataataatatctctaactaatcttttatttcaattttataaaatatggagtataatcaatatcctaattaatttgttgttatataattttaaaatatacatatatatatttatataaagtttttttttttgtagtttcttttaaactcatatgcataaatatttcataattttctatcacaaaataaatatttcatagttattttaaattttaaaaatgataaaattttgaaatattttctaaatttatcaactaatatatattttaaaaattttaagtcaatttatatttatattttgaaaattaattcaataataatatatttgttaatattaatttatttttcagaaaaataaaaatttaataatatagttactcatattaacatttaaaattttaatataattttatgacttaattattatcactaaatgaaatacaaccctacctacctgaatttattttcaagttataaaaataaagtagatgtatattttactattaaaagactaagttttgctataaaggaataatgaataaaaaagaatataatatttttttttcaattgcttaaaaacgtataccattattcatgtctcactcattttttaagaatgtatgtttttaataatttttaatgattattattagagttagtcccacattacttatatgtgaaaataaattgtcatatataagatgaatgggctactcctcccattgttaattggttttgagatggaaccccattcatcttatatatccccaaattctaacatggtatcnnnnccacttgtgatccgttgtgagccctaccggtccaaaaagtcgtttgtgatctgttgtgagtcaaagtgctaccagtccaaaaagatacttccgtctcccctttaactaacctccatttgggacctttcgactaatgtgtgtcaatttccagtgtttgaatgtttcaaaatccacaaattttctgacgtttacacccacaaatttttcagtatttggccttttgggattctttcaaatgtcacgttcggtcctgtagtctcttaaaggtcatttgttatacccacacttttcaggcacaaacatgaggagggtgtattagagttagtcccacaatattacttatgtacgtggaaatcaattgtcatatataagatgaatggactattccttccatcgccatttggttttgagatggaaccttattcatcttatctctaaattctaacaattataaataactttatgcgaaaaatatttttatttttattgtattatgattaatatttgtgttaatcatagagggattttatatagatttattatcagcacaaaaaaattaactattagtcacaacaaaacttgtgattaaaaataaaaaaattgtgactaattatcattattcttatgttgtgactaaaaagtacgcggctaaaggtattaaagtcacaaaaataatttgttgtgactaattaatgtatattttttagtcacaatacttgttgtgactaaaactaaattattgataacttgtatctaaatactat

SEQ ID NO: 161294 - DNA, 5769 bp, Cannabis sativa
ttctccttaaattatggccatgcagagtcttgcctctcattttttttttaaatcccccttagttaaaacaatcactgaaaatttgagtgactattactttatttaactgattatggctagccgaaatcaatttaattagtgctaaaaatacaaataatagctaaggtatagtctcattgccgaccactggtgcagacactaggggtgttcaaaaaaatttacaaacctgaataacctgtttaaaccaaactaaataaattgacaaaaaagacaacccgtataatctaacgaaaaatttaaaccggctaataaatatattggacaaattgaatattattccaacttatttaaataatccgaataaactgatttatatatttttactaaaattatttataataaaatatataattatatttaatagtgaactactttacattttaattttataatttagagcgtttaattttaacaatattttcagcacaaattatcaaattcatgtgttcaacactaattaacaatatttataaccaaacatagttataatattccaattaatcatattgttttgaattccgcatactaaatgaccaataaccaaagtttcatatatgaactgcatatttgtaatgaattcacattttttttttaaataaaaataaataaagattaaaataggacacatggtttttgttttgtatgtggtacataatactcaatgatatggagtgtaattattacatcagtaagtattgaataggaatagatatttaatcagtaaggaaggaaacatttaagcttaaccaaagaaaagctaacaaaaagcacaaaaggatttggcatagagagatgatatgattcctcaatcatcttcatcctaaaattacaagatgttaatttctactttcaacatttttgctacaactttgtactttctacattgttttaacaacacaaagacaaaagagagaataagagagtcacctttctatctaaattccacctttcaaaaagccaaattcgtccagtgtgcagctatagtcataagtcaactcctgcgatggccgtataaccttgatcgcaaatagcatcacatgcggcactttcacatcagaatgatcatacataacatattgggctctaagattaggagagttgctatgagtaataaatctagcaacattcccctgcattgtagcatcaattgtgaagttacctgttggaactgaactcactttaggataggtaagtaaacacacacgaccaccttcccatgaaggtttactatataaaatgtcgaacctttgatgaactttcttatccggaagaacttccccaatgtactcgcacacaaaacttcccttcggaatgtaagatctagatcgaacaccccatctatttggcccagtcttcaaaacttccaattggagaatgatgccattttgagttaacctagtggtacaagaatcagagcacttacaacaagaaccacactcataaatgatggggtttgatgtaacattacatcccttagagttatatggcctttccccaccatttttaaagatgcagtcacacttctccaagtctgtgcatccatcaacacaggagcaacaataagtggaaacaggttcaatataattcggatagatgctacttgtactgtagtcaaaggatgtgagcatctcttcatctactgaattcttaagtctaataggaaccttctcttttccttgagatatgtcattcatatggacaacgtccttcttgatttttgagcactttgaattgcccactgtctcttgaaaattgagctttggttgttgcaaagctcttgttaacctgaatttaaagaccagcttaccaaacttccctctttcttgccaatgttcatcgacatagtacagaccatcatacacatacatgcgggtactactactagatggcctctgaccactcaaagcaatatgaccagattcctttgaaatatgaacgttacgaatcactcttacaggtatctttgattcctcactatttattaatgcaagattcccttgctcatatttctgatcaactagtttcttttttgaaccaaccattggatttccaccttccccagagtatatcaacatgccagaagatataatgtcattttcataacgttgggcatcaactacacttgttgcaaagggcttcccatccttcttaatgtaagcaataccgcgaattaattggctatgaaggccggcaactttgagttcagctctacattgaaacttatcacccacttgaattcctggaataggccctatttgcttaacaaaaattgcccgcttctcgtgctcaaaatagatcttagatgccctgtaataagcaactactgcgaatttgaatttccctgaggcacgtaccttctttagtatgctttggtacaactctaaagcctccttcactttcttgcggttgtctatagcttcttcatgcaaaatcaagtcattatattttttattctcactatcatcattaagctgctcctccctaataagtgatctgctcattccaaaagcatctgcgtcatagttaatacaggatgctgaaagtttgtcctcagctggtaaattcaaattgtttgaatcgcttcgggaaggagaagggcaaggggagacaaaagttccaccagttggaaaatcacgttcaacatgcaggccttttccaacaccaggcacagataaggctttcacctttttcacaacagcaggattttgcatatgctttgcattgtcaccctcttcaaatttgctttggcaagttgaagaagcaaggtatccacaaccgtcaggaaaatctcgaacaacaccaaatttttgccgctttaagtttggaggaaagttacctttccttttcattggtgagtttatgatggccattatcaaacaaattatgaacacacctgtgtaaaaccaaacaatgtattaagtacagcattactgggagtctaatacaaacatgggcaatgcacaacagagtgaaatagaccaactataacacatctcaaaataggtagcaatatctagaaaatgaaaaaaaaaacaaaaacaaaatgtgagtttggttgatgttagtttctcatatcttggattaagataaggaaacctcacacaaaaagttttggtaatataaaagccaaagggtcctccctccaagaatccaagtcagtaaacatcaaacatgttcaagtcaaaaacaaaaaacatctaacaaaatcaagaaatcatctaatgacacgcagtacaccctcgtataagatcttggagtctgaaaacaagaactgctcctgagtgttattatggcagactaagcctcaaacaaatcattctttataccatttgaatattataatatattttaaatttattatatgaggagagaagacatatgagatagatattataattaaatacacctttaaagaataaatatttaatttatataattgacattcctcttagaacccattttaataatgttgacctaaatcaacttttaacatccccatgagcagaaaagtccacactctcactgttctgcacttttggtcatatttttgttcgcagagggaaaaatgaatgtgggacacttatactcaacagagaaaacaacacaaagaaaaatcaacgaagaataacagtgagtaaatttcattaactaccaaaagggtgctaatgcagaaaaagaaagatcctactacaaactaatttttcaactgcaaaagaaaagggtaaaataagcacaaatcacttcagagacaaggttgatacattacatttctcagcaaaaaatccatgattctgtaccacacttacactactacatatagtaacaaaaatcaagaaccaaaagaactggaaacattttactaaaaaaagaaaagaactcatgtgagtgagcaaagagagattgataacgtcaatggagaaatgtgttagtacatagattaagtgcacagaatgatgagtagtaagtacgtaccagtgagtatttcacccgagaaaaagcttgagaatctttctttgtcaaaatgaaaatggctgagaatctgctttcgtttgaccaaaacgttgttattgcatttgttattataatgggccccttcataagcccagtaccaatgtaaagcttttaattttcactggggtccctaaaattaaatttattctcaaataagtacgtacctgaactttctagtttctacctgcaattattttaatttattatgctcattgaattttttttaactccaaacaatgtcctttcatttaattttctacctgatcccaattaaattctttttatgaaaatttgaaatttgtccagccatacattttattaatcaaacaaaaagcttatatgaaatctaaaaataaaggaaaaattgcaaccaaaattgttatattagtataaaaaatttatttacaccctataaaataataaatatactctattattaaaaagataaataaacttaaataatttttaaaaataacttttaatatttcttaaaatattttttttattttaattttattttcatttttttttaaatcatgtacatatatttttttatattttctaagaaaatttcatataatttttcatttaatttttttgtcattatatttaaaatataatttatttttatttgataagtaaattctttaagaatataaattggagcaaaaaaaattaaaataaagtgcagtataattaaaaatataaatttaatataaaaatattaaaagaaaatgtctttgaaaatttttggaatgtaaataaaatttctaatctcttaaatatctaaataatttgtttagtagcaaaaataatagtcatattagtgttttggtccgaccaactgtaacgccaaaacatatgttacttgagtatctgagtgttacaaaatatcattacactgatattttatgtaatttttccaaaatattttaaagaaaatcagcttatgaaccatgatagtaaaggcaaaaatcaaaataaagaataaagaggggcttaaaaagaaaattttggaaagaatccctccacttcaccacttttctctcgccattcatttcatttcctttctccacttccccacttctagtttcgattaccaaaataaagacacatgttattgaaaataagggaaaaaaattgcaaggggagagaagcatcatccaaaatccgcgtagaattttaaaagtttcaccattaaattcaatccaaaagtgtcaaataatgaattaagtatatcattatatgacattaaaacaagaatgaaattaaaaaagttacgcttgtgcatttacaatacataacacagcacatgagtacgttactataaatatacataattctttttctgttattgacaaaataaacattattatacccttttgaaaagatacatgttatattggcaaattcttaattagctcatgagtatttttgaggatgatatttccttaataatacgaaataagcaagaaaaaaaattgttatgaaagattttacgtgttatgttttatcacgcaatgtggtcggtgattatgccaagttaaaaaaaaataatgcttaaaaaaaaaaaggaaaatgtatgtgttgtaatttcaacggaaataactttgagaattcaatcataaacctgcaataatctcaacacttgaacagtaataatgaacataaaccaattaatcaacacaatgaatcaaa

SEQ ID NO: 161295 - DNA, 14666 bp, Cannabis sativa
  modified_base (6685)..(6685): a, c, t, g, unknown or other
aagccgctaataactcaacaaattatcaaacctagacattcaaacaaactcgcaaggccaaaaaggaagaaaaatggaaaacttttgggttcagttgttcagtttgaaaacaaacttcttgggagcagaagcagctaaaaatgcactgatgctgtccctttcactcctgagaaattgaattgcagtcgccccactggaaaaacaaaacaatgctttgcaatgagaatacttatacttcagttatgaaagaaacatgaaaagtaaacagtgaagaaaaacaaaaagagtactggtcggaaagagatgtacatatttgcaggtaagcttcccaccacctgcatcctaaactgtagaaagacaaagatgccagagataacaaggatattcagaacagttgaagagccattttattcttgttttgtttccatttgggcagcttatagaaagcttcctttgtcatcccgaatttctccttgaattccaccgatgagagataggtctgcatgcatcaaaaccttaagtgtcagagctaaaagacaaagcaacatgtacttctgataataaaatgtcatttgaacacttttacctctcttttagtcacatcaatatctgtaacaggatctgttgatgttgttttaaggcggtcgtatgggtgtattgggaggccttcctcatcttccgcatcaccctctttcacatcttcttgtatcgtgagtgattctattctgctgctcatggagttctccttattgtttgtatctatttttggttcggccgcttttgggctcacttcaccacaaccccaaagagaaagagtgagtgagaggttattttagcatgggtagccataaataatgagtgcaaaaatacattagttttctaaaataaaacaaagcattagttttacatttaacagatcgcggtatcatagtttctctaggaggagctgttttctcaaagctagctgtgagtgccgctatagcttcagattttgaagccagcgttgctgcatctggagtcacagattttggatatatttttctagccattggaggtggagtagaaaggttcctggcacttggattctcaaaagtagctgccagggcattaaaagctggagacctccctctcacacgaacccggtcagggctgaaagacatgcttcttgaacgctgagatttatcggggacgctggatcttcccccataagaaacaggagttctccgttttggtttctagtcatacatcaagagtacaaacatctaatcagagcattggcatgatcaaactcagaagggtctagttattactttgaagcttcaaattctttagtttcaaaataaactagaggttatttccaaatgaatatattttaggataactttgaaaaacagttagggctgtcatataaagcactaacatggtaaaaacacccttaaacgttggattcttcttttttcttttccttctttttttgcgtaggaatgacaacttgaaagtgtgatttttaatgaaaacagttgatataaaaaaaagattgttcaatgtttatcacaaaaagagttcactgcaaacatacataggttatgtttttttcccccaatgcaaaacacctttaaaatatttatgcatctaactttgttcccaggacatattttcacgcactgtcaattttttttatatatttctatttatgcatgcaatgcaatgcatcacaatacaatacattacgctgtgatgcaatgaatatctgttctgtttacgattaaaatgaagaagaagaagaaaatatcaaagtttaatgcaattaaactggacaaaggggccttacctctgtaattggcggtgccccatttttcactagattaagtttcctctggaatgagtttccgtgcatctgcattaaaatgaaaattttacatagtttttaaatgcgaaaaaaaattacagaagtatttgattcatcaatgtgtatgatggtcacttactgaagattttgtcgagtcccatgtaaagaagcgagtgaagaaaggtggctcactcccttccatgacaatataaattggggcttcacgagacaatttttctagaaggaaatcaccctcaagaaatttctgtagaagagaagaagaaaggtaaatagattgcttcaaatgagacaagaaatcctaaccagttgttgattttgttaaaaataaactaggttaataagtaggttaaattgtcactaaggggcagagacatctagatgtcattaacaaaaatttaacatagtataaacttccaaaaagctactactaggccaaacacacattgatatgtttgtaactaaagcactggctggtatatttcagtttagcaaagcctaataactcatacctccccaattgtcaaagcttgcagtttattcttggaattaacctgttggccaacccaaacaaagatatcggagtgacaatccaagatgaatatgtcttcagtcattaagtcatcctgggtaaagttgtatatctctgtcacctgaaacaatgataattctttaaataaatcctttttttttctgtggataggtccactgtacttttactttaatacataatttattttgtttcgaaaaaacgttatataaattagagagaaacaaaatattgtaataaacatgaaaggaaaacattcagtagagcatctggtatactcgtaaagaaatgaataaaatataccttcaaaattcctgcaaattgcgtgcattggccggcccaaagaacgaaaagaaaagaaaagttcaagaaaattacaggtcagataaatgaaaaaaatataagttcagaaataatataactttaccatctattgacagaatcatccataccatttgaaaaattgcaagaaaaaagatgaggatcagtctcggcatcctttacaaccttttggctagaatattcagactttccgcctaacaaatcccaaaacagttctgattctgaaccttccttttgtggttttgactgaatattaggctgcaatagagcatattaacaaggagattataacataacatgaatagggactacggattttgatgaaaaacataatgcacaataaatgagagcaaccttcttgaaacaatactttttcaacataaccagatcacttgtttgactctaacataatatcaggagattcttatgacaattgaagataaaaagcggaaatggaaaacctcagctgctctgctatctcagtgtgcatatgttaaagccatgacagagcactattcagtcaaagtttttagcagaaagaaaattaggtcaaaccttaattaaatcaagttgcctttcaacaagctcatggtgatccgaggttgtcaggcttccagtccatgtaaacacagttgacccgctatgtaagatgaagcagtaagaagaattcaaagatgatgaagcctggtgaaatgacaaagaataatgaataatacttccatgcaggacacatgcaaacatttcttaaataagaataaataaattgacatactgtgtcgacttggattgcttgcatattatcaggcccagagccctgtactcgaaataatgcaacaccatcttcttcgtatgtctcatctggaacttcattctctgcaatgtacttcttatagccatcactaagaccaccctgattgaatttagaaaatcatatggtggtcaactaaaaacaactattattaattagattcatggcaaaaaacatgccaaatgtattctatatgtttgttatctcaaaatttcactaaccttataaactataatgctttggaatattaaatagaattgaattggttcatttccttcatagatgcgagcctagaaaaccaatggggaaaagaaattgttagtgtgagttgtacttgtcgacatgtacaacacaactagttgtgtcttgtaagtatatgcatacaaaagttacctgggcagccataaacttcagtgactcaaccatcttacttgctaatgaaacagctgaaactctgtcatcctgttttcaacatgaatacctgattagtgctcaagcaagctaatagttttacaatataatcagccatagacagcatagcacaaatttgtagtttatcagccatggcagagccaaaattagaaaaagctttcgtaataaaaagtttgcagaaagtacaaagaactgccttgaagaattataaggaaattctatttgcaaggcagttctttctattttcaatttgtaatctatttgctttgtatataaattaaaagtgtgctaaatattaagtaatgaatttgctttgtatataaattgtacatgaactataaggaagttttctagttttgagaaagaaaaataaatgtcttcaacatttctaaaactatcaaaaaaatgtcataaacattttaatttgagtgtagatatcacccaggaaaaacgtgatagacacttgatatggagaagagaagaatagcttgtttaaaataagttctcaagacttatttatgcatgttgtctaagaccctcccaacagataggttctttcttgggtagaattaacttctgtaattacgcaaatagattagctgaaattccttgcagaaactttatagaattgatggacaaaattacaaatcacgagctttcgagaggcttgtctctcctactccaatctgtttgagatgattggggctctccccaataagtctcaactccaatcaattttatccatgccctttctaagagatcccctcccctaatatagtgtaaggtgccctaaaataaagagagttaacaactaagcctaaagtctaacttattctggtgtggcttatcaataccacctccactaatacaccatgacttcatttaactccactatgatacctgtccgttcttgcatcaacgtcttgagcatggcctttgaagaaatgagggatctaccaagagaaggatctccatgtaaagtgacgaattggtcaactagctagaattacatgaatttagtgttccagttagtgtgtcatagccaatttagaaagtcattgaatgcccatgatcccattgtcacaccataagcctcaattttggatattggcagccctgttggaccaaagttgtagtaataaaattgtgagtagcaccaagttcaattagagttaccactagctggttgtgaatgacactctagatcttcatagtctttggagccgttagaccagccaccaaattgagggaaatttcaactgatgttttcacttccacaaaatccaaatttgtttcatgcttgtgggccaggagctaatcctcctagaaaacatcatcatcgagaagaatcaagatatttagctctttgtttttcgcaaacatgatctttgtaccccttgccatcacatttaaaacacacaaccttttcttgttttcatactccgattctatcattttcttgaatgtccccatgggtgtagcagagttagcccattgagtattgaggctaggaattttttttgtgagctgtgaaggattggataactagtattttgagctgcctctgtttttactctctgtggaaagagctaattccatgaatgtttctaaagaatgtggtcaaaacacccgcagctcatcacgtagacctttcttgatggcattagttaaggtacctagcacaattttgtttgaaatattgtccaagggtgccaacaattcaatagagcagccatagtattccttgattgtggtttcttggccaaccacaagaaattggtcaaataaaaccccatcattgtggctgcaaaatcgatgcaacaaaagcaatttcatggttcattggtcttcctttgctttccacttagaaccaagaatcacatcaccttcaaaggaaatgaccgcgacttctattttcttggcattggtaaatagctacaatgaaaagtatctttctactttcaaactctaaccatcggggttgccccttcaaaagttggcatctccaatcacatctggagtcatagaaatggttgaagtggtctactggaaacgtgccaaacgaaggtggtagcattagtataagggcaagaggtgagttcatgaaccctaaatgcggacttcgaagccgaattccatcattcttggaggttagaaaagaggacaagttcttggatcgtgttggggcaggaggtgggctcttgaaccccaaatgtggattttggagagaaattccatcattaatgaaggtcagggaaaaagaagacaagttcttagacaacatttcaaattttgcttcaagccaagcatccaagcgttcttcaaacttggacatgtgcagggaaatttttcctcaggagacaccattgtaggggtagattttattgtaccatagtttccgttgttgctgcctgcttgtcgtggtcctccatggtgttcacgtgtcatcattttcttggcactaaccatggtcttgttgaaggctctggtaccaatttgacagacacttgacatggagaagagaagaatctcttattaaatttgtaggtaggggcggacacgatccaatctaatccaattgaaccgaaccaattccatccaattacaagaaattggatatccaattataattagatttgatttgatgtttaaagttggattttaattggattggatcggttattgnatgtcaatctcaaaatccaattaaaaaccaatctaatccaattacacctaatacatagtaaaaaaattatttatatataataaaaaaaatgttattattatatttttactagcattttttttttgaatttgtaatacttggttgttttgtgtatttattttcatgatgttttttggtctattgtattagttggtagtgttgttgttttagatatttcaaacttttggttgctttaaacttgtaaggatgttatatttatgtagtattaaacttaaatgaaggtttatatagtctttaggtatttttttgcatgtttttaagttaatattaaaaattaggcatgtaattggatatccaattaaaaaaccgacccaatctaattaataattaaattggattttgaggtctaattgaattggatcgaattaggagaaaaacgttagattggattaggtgttctctattcgtagggataaaatggtgtaaaggtttcaagtacctcaaagactccaaaagagaattatctctatgcaaagcaatcacaaattattcaccccctaaaataagttctcaagacttatttatacattttgtctaagaccctcccaacaagtaggattacattaacttttgctgactcacttatatgaattaaaagactcctaattaaaagtcaacacacactaattaattcccaaattagttcttctccttctccttgaatatgcgtgtattataggtagcccaacagaatgttcaaagaggttgttaagcattagcataattgcatatattttacctcaacactttgcttgccaaaccatgttcctataagatattcctccttgtcatccccaggataagaatactgaaagatgtaacaatctccactgtaaagctttgactgattggtagtaggaagaagaatcttttcctggccattaacacgccagacctgtaaaactaccattaattagcataacaactcgatgagtctaacctcatttatatactctctaaaagccaagctgccataggaagcaaaaaataatataaggtacttccaaaaccatagaaaataaatgttaaaactatttttattttagaaaaggccaattaaggggggcttcaataattgaaagaaacaaatcacttaggtatattactatagatataggtttgtgtgcacctgtaagttccctgtgcaatcaatgtatggttggggttcttctttaacaggatctgcttttaacaagcccttcacattgacaccttgacgcttcaaaagtgctacaaaatcaatgaaaaagcatttgaattttccatgaatactgtgattataacaataaattgtaccgcaaggaatacaaatacaaaatgatttcaatagttgctgacctgctaccttgcctctaccatcctctgagacagttacctcagctgtctgaggccatgaatcaaatttagatctaaacatcactgtctcaaagccctcgatcacacggattatgtgggattttggtctattagcaccactaaccaattcctaataaatgcaatcaagaataaaataagtgtgattaagtaataataaagcagagtagctgaatacgatagagaaccggttattacctctgaggctccacttgcagcctttctttcatcaagtgatgtacttctccccatccaaacaaacacttctatcccacaatctaatagatagcatttattcgtgtcgagtaactcccttgtcaacaaatcagcttcaacaggttctgcctttcccttcacaacacttcaaaagcatgtatattttcgtcacaaccagagtataatcagatcccatagtttctataatacaaggaacttcattataactagttaagacacgccaatacacaatatttatacgacaattatctaccatttggatcgagggacacataagtgagcaatgtcgtgcaagatttttgttatagaatttgggaacagcaagacaacatttaaaacttgccaacaaggacacatgttaagtcaagccagccatttaaaaaaattggacttagcaacaatgagatgcactctggagtgatccaaagtcgaaacgataatgtggaaagtaacaaggagcaaatacagagagctataccaaagaagctttgtaggatgagaaccaatggtcttatcctcgtcactggccgctttctttggaagtggagcaaagccaccaaagaaaccccaaaattctccagcctcaggatcagccattaatttcccatcctctacatgaaagatagtaaaaacactcaaaaaagtaatataaaaatcctgaaaataagtgatataacatatcattattgaatttcttaatcaattagccactcaccaacagcagctacttcacatttcccatcatgatatgtatctttaatgtattgaacaacttccaatgcttttgctctctcttgaatagatgagttgcaaccattgaattgaaaaattttagacttcgtatcaagaataaaaatgtcatcatgattgagtgaagatcgggcgaatggaacctgcgagagacaatcactacaacttaataaagggaagagaatgatacacataaatgagaaataagcatcacatttatatcaataatgcagctgtaatcagatttgtctttcatcatctatttttaaggacttgcctctttaacatggactacgtgttttcctttgcagacatacaaccgtatattgtgttcttcagcctcagcatgtttgaacccagttgcaattccaccttgttggggtataatacacggtttaaaatatgacaagaatttttcagtttcatgaccctgtacttcacggtattgaacagcacgtcctccaagagctgcatccagttcaactgtcttgatggctgcagtaccagcttcatcctattctaacaaatctccatgtcaaatgaagcacacaagggaattcaattttggacaaattaatccatgagtgaataacttacctgagtggtatctttaccaagccaataatgtatatcatggcgcaaggctccattctttaaagctgttgtctgcacagaaatagtgacacaataaaaactgaattagtaagaaattataccaacaataatataataaataaattatcttgcttgcataaagaaaaggctatttctttgtcaaaatgtaaggttacggcaggttgttaggtaaagatgaataacagaatcaacagcgaaaacatgatggagtggtagtcttaatgtgatacttcttgtactttcctataaactattatatttatatcttttttcctttcttataactgaaaaacatttaaataaattggcacagttcagtactttcttttcaattttaattctacaggaaaagtaaatttgtttaatggcaaaactttatcggacctagaaaatattaagaattcctttaaaatgataatttgtagcttgtaccaaggatccatttgaatgaaagcagaatagaaaaacaaggctggttcaagatctcaaatagagtgttttctacaagctctagttgtgacaaattggtgtgaaagagtgggtttcctctcataggtgaagaaacaaacaaaagggacaataaaattttagtgatgaaataaaatttgtgttattttaatattctacaattggattgacaaactaataagcaaaatactaaatgagaaataggttcaataagaatcagaatatttatacaaaagctctggtagtgacaagttgcctctcgaatatgagaaacaaacaaagggagaataatgctgaattcataaaataaaattcaagttaacatgtcaaaaatctaaaattggattaacaaactaataagaaaaatacttcagagtacttactttcaagatcacatatgagtcccctgtaaaaaacttcccatgcgaagactttgggataggaacaggtcgaaagttttcaatacgccatatttcaagtccacttaattttgtcaaggaataacagcaacctttccaaggtagatatcagatcaacccagcaagaaatcttataaataataaataatagatgatgaaaaaaaaaaaaacaagagcaacaaaaacaataagattagcagagtaactgtacacagatattattattatttcattataattttaaatgtttgaattttttgtaattttggatagcagaaaatttgcatcttaaatgccgaaaacttgattacaaagaaggatacgccttttgaccagctccctggaaagctgaatctaaatctctcatggaaactgccatgtggtcgttcgtagctatctgtttaaaattttagaacttgggctcacaaaagattaccctgaaagcaataaaactgagattgacatattttgagagcatagaatcaaatagaacttatcaaatgtgattaaatatttaagggtactttgacaatcataacatatgtgacatgatgaacatcacatgataaaaattagcaggaaatgcattattataataaagacagatgcttaaaggatagaaataatgaaagatgttcatcattgataagaaaacctagcaaaacaaggtactagcattcttgagccaaaaaatttgtttactctttgagcattataagaagagattcttcccaagctaccaaatatgcttcacattaaaaattcacccacccacaaattacaggaacctctttaactatcaaaaatgtcagttttgattgcattctattctttagaagaaataaaataccttacatgattacatccaccaccactcagatgaggaggcacacaaaattagttgctatcaaaatccacaattttaataatataacaacttaatatccatgccatgttctatgtcatcttattgtttcataagcaatttgaagcattcatactctataatctccacaagatagacagtatgatcattttgttgaatcttaaaaaaaatagcacattttccttatattttatgtttgttgataattgacctagcattcattgtggacagacatttagtatcgataaacttcttgacaatgattcaaactccttgtctgtaacaaactgagaaatatcatctaaagagactcaaagcagaatccagtaatcatttttataatcatatacagatgcaaatgaaatatagccatcttaaaatcacagtcaacaacacaaaattaagaaaaaaaaaacaataaaagtaccaacatacacagtaaaacaaattttagacttgagataacaaaagagaggcaaaaggataaatgagcagtaaccaagagaaatttcgaaagaaaaaactctcaatgtaaaccaaaaaaaaaaaaatacttgtttcagtggctactgcatttaagcccgaattcgatacggaaaacccaggaagcatatgggaaaatgatgtagactgatcaaaatgaaacaggtgaaagctttgggaaagagaaagatataaatatacatatagctgatagagagacacacgtgcacgaaacaatgggcaacagtgacagaattaactaagaaaacaatcaaatagttgtactgaatacgaaacacataccatgtgttaaccaaaaactgatcttggaacacccaaaattctaatgacatcataagacctatgtactttattacaaaattcgaaatgtccaaaacccaataccactaaaattaaaatatgacaagattcaaacacataaaaagaggaggcaaaaacacattcacagctgaaactcagcaaaatatcgtcacagttggtcatggatcagtaaaaccgaattagaaccgagcaattactcaatcagatcaaacacagatattgaaaaagtaaaaacaacaaattctgaaattagctaatatccatgaaaaatcattaaaaaagctacatctcattgaattgagcaaaacaaccgttacattatcaaaatctaagtgaaaagtgaaggaatttataaagaaaagaccgtacctttagcggatgaggaagaaaaacccgattccaaatcaaaactatatcggaacccagatccaatctaatcgaaatattcaagagaaaatcaaaccaattttttttaatcgaaaaaccaagaaataaaaataaaggtgaagaaggaaaagctgaacagaaacagagtaaagtgggggctgaagaagaagaagaaagaaagggaaaatggaaactttagagagagaaagaaacaaagaaaatggtaagagagagagagagaggaaaaaaaaaagctaggagagagagaatgggttggagggaatgatgagttgccaggcgtgcttatcactaacaggcagcaaaaaagagcactccccacaacctcagatgaactgtaaatcttctctcattaattaattaatctaacaaattaattatctttttctatgacaaatataaataaaaattcaagcatttaaatatttcaaacccaacctagttctgtatttaaatatatattcttttcaattcaaaaaataaaataaaaattagtaatgtaataatttgtacaataataataataatagctaatggaaaagttaattgggttttggttggaattgaatagataatcaatcagaaacagtaaaaagctaaccgcattcaaaaataagtagcaaaaaggctaaaataataataaatttaatattcaggaaaaaaaaaattataactagaaaaggaagaaaaaaatgcaacacctttcattaacctctttccaggcataaacatcagctgtttctttatctgtaattatatatatatttttttatcttaatggatatctctttggatttttgttctgtataagtaatttaggatttctttccttcaataatgaataatttagaaggaaagaaagaaaagttcaaaagtagatggtccaagaaaaaaaagagaacttttttatttttgtattaatattgtaataataattttagaaaatggttggcaagagagagagctgacttccgctttgtgaggattagaaattggaaaattttgtgtaactgagaaacggaaaaggggaaaaggtcggccaccggccatcattcataacatgtatttttccccattttggcctaaaggcggggcttcatattctctattcgccttaacttgggtcccatttcttttttattcttactttgtttttgcatttagctcccctaatttattggtcttttgcgtaatggtcctccacgtgactactactacattgtcgaactacaactaccgtcgattctatatctacctccaagaatttttatttgcataaatatcatttagttttattttttttaacaatgcataaatattaaatttgagataatagtacatatataatgttttttcgataagataataacagtacatatttttttttttttgaaatccaacagtacatagattattaggtataaattttgcttttcttttaataaaataggggtaaaatttctagtttttttttttttttgatgaagtaaaattttatgatatttcttttctttattatcactttattaataaattgatgaagtaaaaattatagtttctcttactaaatgcaaactacgtcactagcacagactaagtgccaaggtactcatttttggaatttaatgatatctttatcatcaccgtattaataaattgactaagactgcatataaaaaccattgttgcggtaaaataatataaaagttccacatcatccatgacagaaaactgcaaaatttgcttagttggtaggtagcatttgaacgttcttttcttattttcattttttaagaaactacaaataactattaagaaaatatcaatttcttattagtctttttttaaaaaaaaaaaaaatagggaaattctacaatgcactcccttaaaatggatacattgatgcacccctatctgtttt

SEQ ID NO: 161296 - DNA, 1794 bp, Cannabis sativa
ttttttttttttttttttgctaggatgttagggataaccttctttttaatttcaaacttctctttttggctgtaaaaaaaagcttatagaatagtcttccatgtacactaaaccaatttaccctttaaatttgacaaaaatatgacattttaaatttttcatatattacaattattaatattttgtgttgcattttaaaaatttctaatgtacatataattatatactgtgttaatactcacataatttcagtacaaattaaaatagcatatttacataatttataattaaactcacacaaaattaggtttttatatttttatttattgttttacaaaatcacatgatgatagaagtgcattgttgagaagcatttaattttttggtcgtgaggagtaataatacagtaataattcatatatatggtaggtgttaacatgttgggatagtgggttactagtttagtacatatgcatgtgctgatgtgcatgtgtatgtgggaaggagggtacgagcccatgaggttgttggtcataataaagacttaatttgagtctcaacccactaacatcccccaacctctcactgtcgtctccctcccaccgacgtgggttagttcacaatatatgtttggcaatgtttccttccattttaaaatagaatagtcattccaccaaaataataaaaaggtcattccatattccaatagttttaaatgcaaccaaacaaaggaataaaatgaaaattgttttatttccattccattccattttattagctccaaccaaacaccaccttaactgcatgttcggcattataattaaaaaattgtaatttgtttctaaaaatagaaaattattttttgaaaataattaggcttgtttggctttattttttgaaaataattttcagaaaataaagttacaaagaacaagaattttaaaaaacaacaaaatgttgttttctgttttaaaaacaagtcccttttggtcaatattgtttttaaaaacactaaccaaactcgatttgtaatttgaaacttcaaaaattatttttgttctcatttctaaaacacttttttgaaaacaaaaaaacagaaaacaaaaccaaatatgctctaattgtttacacataattttattgatattactttcgagagaaaatgttgccttattgatcaatgaattaaaaaaaatataaataaacaaacgctactacaaaaaggggtatttttatcgattttctagtaatgaattataaagattttccgttggacgcaaatagtaatttatttgcattggctataaaataacgcaaaaataattattttcgtcattttataaccgactcaataaacaaacttttcctttaaattttttgtatcagttttgaagtgacgcgagaagctatgtgttaatcttcaaccgacgcaacatgtactttttgcgtcaattataaaataacatataagtgaacacaaatacattttttttactgtttgcgtcggttataaaacgacacataagtgtaggtaagggaaaactacagatttctctggaattttctccagttgcatttttcaaattttagaatcattttgtatgtagtaaattatttgaccgataacgataaaactaactgtaactaattatgtaatgaccgcattagtaatttagattagtaaaggcaattagcaataatttctgatatatttataattatttataaatttaattatttgtgggctccattactagaaatgggcattagagttataatttctcaattctggag

SEQ ID NO: 161297 - DNA, 4885 bp, Cannabis sativa
agagagagagagagaggaagttgtagagttggtggtagagagaaagtagtatttggtggttgggtttggataagatacatgtcttagatgtgaagatataccatattatacattgtttacttgtagaattgatacttaataaagtagttgagtcaaattagaagtgggtatcttctattaatcttctttctgactagtagtgacaataatataatacataaatgctgctggttgtttcattcctggacaaacaaggcttaatttagtatggagaattttaatttttctttaatacagaagagtgtgtttgacaaaatagacatttttgttttgttttaatatattattttgcaaaatgactttgccagacctatgaaatacatatacgagagtattatgtacctactttttgcaaaaatatcatttagaaacggaggctcaacaaaaggataaaatttcttacacaaagtaacattcttaacatactcaacacttgtcggaagatatcatatatatatataatcagtggggatgtactgaatcatggtgtgaaaagctactttgtatataatagaatgtaattttaaaaagaaaatgtaaaaaggttaattttcataaattattcgtgtaacagcaacaaaagtggtgacaaagacgaaaagaaaaagaagcaagtgtatccttttgggggagggaaaaaaggcaatgcaattgtggagtgaatcgaatctaataacacaataagatatttaatattaaatggatctcatctcattctctattctcaattctcatcctcccaactccccaagtcctatctatcctatgttatttcattatttgtaactaaactacgaacaagtagcagagaggggcttgtctcatatctgtcacttttcagagtaatatttttttggggccaaaaatctggcttcggtgccgcgtgcagcatctagtaacacgtggcgagtgatgattggccgtagatccgagtccgacaaacctctttttgtcattgctttacttttctgcctttctctacttttctgtaataaaccttggataagaaacaaatatcattataaataaaataaaaaggatattattgtttattagtattaataataatgccaaatacttaaataaataagataaatttgattacaaaataaaaaaatagaataggaatggaaatggtaatatgaataggaatagaatttctattcttttatttggtaaagaagatgaaaatagataagtatttacatcagagaattatatgtgactatttatataaaattttatattttattttattttatttgtaagggaaatttcattttttattaaatatttataatgtattatttttttttctttattttgcaggtgttctattaatggatcgaaagtgacaactctcagttttgaagttttcttttctgatattatggttttattgtctagttctcctggggtatctctgcatgcttttaggatagacaatgaactgttatatatggaagaaaattctcctctaattgtgtaactttgtttgttacctttgttattttaacctgtatcggtttcccttcaaaaaaaaaataactgaataagaattctgatgtttgatataatatagaatgaaatgaaatttttattattttgaccaaaatatcctttacacttttaaaataatttttgttttataaaattatggtacaaataaaaataatatatatttatgtataactctcaaattgtatttttaagatttaattattaaataataaaaaatatataaatatttaatttaatagtctattttatattaaatatttaagtattaacataaatgttattcatataatttaatcatcacacatcgtctatctatataattataataataatattgctttttctataattctgtacaaaaaagatatagtagcatattattgtaatattaaatgttgtagatatatgttttaaaataaaaaaaatgttatccatacaattatatctttaattatttatttatgagaagggtagataaggaaaaataatttttggttggtatggaatgactttttaagttattttatttcgaaaaaagtatatttattattttttttttgagaataaacgtctattaataataaaagaaactagacctcgtggtcattacacaatatgtcttttggaatttgagaaatagttaagcaaccaaaccgattgtgggtgaagacccacttagccacattattggcaacaaaattacaagttttaggaatacaagttctagtaatttcttagtttacatgaattacaatttctattggaatgagtttttcaatgacaataaacaaaccaaacatttgaatgatcattctttaggaatagtaattctatttttacactcattcatgtaaaccaaatactaccagaaagagaaagggagtgaaagaaatcctagtactatgagcatctccaatggaggttgcccattgaagtggtaatgtggttcaatttttaagactaattctatacgaagtgttgctcaatatagacaataattataaaatattatttttattagaataaaattatttgtttacctaaaaaactattaattcaatatgatgtggttaataagagtttaatttaaaaaaaaaaaaaaatgatgtggaaccatcatgagcaacttttaaaattatcaactattaaaaataaaaatatatatatattttaagataatatatgtattttaataactttaaatattgctcattagagatgctcttagagtaataattccccacggccttgacctttgcctcagtcatgacaatagtatgggtcactcacactttctatgctctcaacaactcaaactaatatattattctatatttttaatgttttacaatttatttatgcaaacaaaacttattattatggataattttttaaaatactcttcttttatattttatttataattttatggcctaaaaattttaattataaaaatatatttgtaaagtttaaaattacaataatatacttgctcagaaaaagtaaaaatacaattaaaaaacaacaataaattaatctcacgacaactataaataaactataaaaaaaaaacaaaaaataatctgaaaaaaatctcgtgataactataatacaactataaataaattataaaaattaaaaaatagttttattaattttactaaagatgtatttttgtaaataaaaaaattcaaagagtaaaaataaaatttttcttgtattgatatattttttatatatattttttaatttattgtttattatgtaaaattttctattattattattatatgatagaacaactgttccattttgtttgtttctaatttctaaataaaatatcaaacatcattttattgaagatatgtaatacatgaaaatgaaaggaatattttctatttaagccaaaggagttccttgtcaagttttacacaataattttattatcaattatatgaattagggatattcttataaattgacatctatatttataaaaaaatttataatgtatttttgaaaggggtacactggtacatttttatctatttcgttaactagaaaaaaaaaattagtttgaatttttttatgattgtatatgttgtagttatttaagacattatacaaaattttaaaaaatttaatacgccaaaaatatgattcaaaaaaatttattacatgcctgattttttttattttatacgtgtatgaaataaatattttgaacattaaattctatattataaattattctaaattctttaaaaattttacaaaatatcttaaataagttataaaaaaaataaactaaaaattcatcaataccgatatatatatctatttatatatatatcaacaaatttgtattaaaaagtagataatttgtccaagttattaattattagtcccttatttttaggcatgtaaacacggtgggggcgagaacaagaatgctgcgccaagggacatgaaattttcatgagttgttgagatcaggtgctttaaccaatacgtatttttcttaaaaaaaaaaaataaaaaaaaaaaattatttaatatgacataataaaataataaaaataatatacattttaaacaaaattataatactaagtttaaaaataaagtaaaatataaataaagggatggtcttatccttatgctccagttttcatgccctaaattaaaaaagagaaaattatagtgtatatttattttatttattttaatttttgtttttatttttatatttttaagatatattcacatttatattatattctagacttagacttaagtagatggtgaggatatattagacaactcacccacaaaagtgatatattttaataaaatataatttaatagatataaaaaaaaaaagatatttctcactttatctcaaattaaaaagacaatcctacttattttgtttgaagaacgttgtaaattaatttatacataaataaactaaactaaattacacctaaacaatattattattattattattttgagagaacaatattattatctttccgaacaaaaaatatattttgtagaattctttactaagatattacatttgcttttactagtaggaatgtctctgttgttagcatatatgatgaaattatattgcaaattaagttatttaaataatgatctatatactgtagttatatatttttgttaataatatattttaaaggttaaatactattttagatcctgtattttacaaaagttactaattggaccctctattttgttaaatgataaatagaccttgtattttctaaaa

SEQ ID NO: 161298 - DNA, 3153 bp, Cannabis sativa
  modified_base (3090)..(3094): a, c, t, g, unknown or other
agttagcccccaaactaaatacgttttagttagttggttcctaaatttttatttttttagcaacattaagtctccactcttacatttttattcatttttatttattttacatactttaatttattttttgtgttaaattcaaataattttatttttatttttaagtattcatataatagatatattattataatatttattttttttaagaaaatatataaaatatagtttattcatatgtattattaataagaaaataaagagtataaatactagcgaattcatataatcgttagagagaattttagtccccttatatttttatatttttagtatttatagtatattttattattaatttttgaatatgtagtattaaaattttaataattttttaattgtatacatttattgattacttaaattttgattcaatactggtaaaattttataattttatgaatttgccacgaaacataagtgaaaaataaattttaaaattttatttactttgaccgtttataaaaaaaaataatagttttattatttaagctttttttcaattgttattttttttggcatatttaaaaaatatataaataaaaaaatatatttatttaatttgataatatattaatataaaaatatttaaaattaatacaaaaataaaaaaataaataaaaatatcatcatttaagagtgaagactttatgtttttaagaaaataaaaatttgggaactactttgccaacaaataaaatttgaagattaacttgtcaaaacttatatagtttagagatcaatttaccgaaatataaagtttagaaaccaacttgcgaataatataagggtacaaataaaattattattatttattttttaaaaaaaagcccctttgtcttattcacatagagagtcttctatggtatgagtgggcactggtcaaaagcaaatagaagcattgattttttttttttttaaagaaaagaagaattgatttgatgtgaatttggaacactttatatttgtagtggagaaacgtttgtctagtagcacactttctggatatgatcaagctagcagattcattattcaacataattagagatttaatcctttggcataatgacctttcttttaaggtgatttcgcactttaacttataataatcttatacaaaatgacatcgaacaccccaagacatatatggtccaacaattatgataggtggtcaaattattagacagaagctatttgcaaaaaattatcaaaactaagtgaaagtgtaaaatgattataaaattgatgccattttatcaattgtttcatgttacaaaatattagcaagtatgctcacgacattgaaaagtgaagacttgtatacaattttttcagtaacaaagcatgatagtatgtatagtatgagagctctcattatatacaaaggaataaaattgtgccactagtatagattctatggaacaattatgcttatatttaataaacctatattcttttggttgatttttaaaaagaacattatatttgcatcccaaaaagttatataagctcccaatattttatttatttatttatatttttataaataatttatattttttccatttttattatagtaataaaatatcgtatgtgtttttatataatttttctattgtaatatcgaaaatgtatttttttttattaatactgttgtacttaaaagtttttgcataatacaatttctttttacaaaattacggttatcaatcaaagggtatctgagagaaaaaagaagaaaaattacgatttgagttgtaacgaggtcatagttaagattgtgatataatttgatggtgattcagagttgcgatttaagttgcaatttaggttacgactttgcatgaccaagattgcgatatggtttaatggtgatttagagttgcgatttgggttacaatatatcagttgcgactatttagttttgtttaggaaatcaatggatgcttctcgtggtagttttgtgtttgggttgcgatattgattgcaacttcagtttcgttttgaaaatcaatggaagcttcatgtgatggtctcaaagaacagagaatagagaataactctgaggaggaagaagaaaggggctagattgcaatgtatggtttgatcatgatttaggattgtaatatgtactgcgagttcaattttaatttaagcttcatttcccatggtagggagcgtctgaggaagaaaaaataacaacataagatgtgaagaaagagattaccgtaaaaatgaattataaaaatataaatttagtgtaaaactataaaagataaaatataaagaaaaataagttgtaaaggtgattttttttttaaaaataaaaaaaattatataaacagtgtaatgctctcgcttcgagcctttatttggcatcatctcaaatactaataatgactcttatacaagggtacgtccctttggctgctatttggaatgacgactaaccttgcaaaccaacatgaatatttttagcgtgctttgtcctcacttgcatgcaacttgaaaaaagttctcatgagctcaccatcccaatattactctaggtcaagcacacttaactttggagttctcaagtgatggtccaccaaaaataagatgcaccttgatgatataggtagtactaatcatttcatttaaaccctcttcaattgtgcagtcgcatacctacacagtctcagaatcatcatacttgaccttctttaggcgatgtgagattgcacagttctcagcctatcctcttgcgtatcacgagactctgacattcacatataatgattttctttttatatttaaaataaaaagaaaatctaagaaaaagtgagtataaattttaaaatatatttaatatgaaatgaaaataataaaatgggttgtgtttataaaattttgggatgtaaataatttttttttttttcaaaacataaaatcaataaatttattagaatttatttttaattttctcttatattattttaagggaaaaaaacaggaatattctaaaaagggaaaaatattacaacaatnnnnngggccggcccaatgaacatttgtacagcccaaaaggaaaatattacaaaaataccactt

SEQ ID NO: 161299 - DNA, 4746 bp, Cannabis sativa
cctttgtttttgtattttattacagggggtaatagccaagtgatggtcttgaggccatggctcatcataagatgaatcagctgaagaagcaaattctggcagagaggcttgttgaaataagagtgtgtatacataattattccttttttttttattctttttttgtggtgttttgattgaaaatcactcacttttgatgagttttttttatcaggaaaaggttgaaaataatgggaggagtctagaaactaatttattggagacattgtcattagcaaaaactaccaaaggtaattcaaatttagaggaggggaatggaggtgggaaaacgctttgttggagaatagagaatcctctttgcaagttcagtggatgtgctcaaggttttggtgataaagatcatgttagctatcatgattttgtaccccaatcgagtattaagcttccttatgttgagaggctaccaccttataccacttggatattcttgcaaaagtatgagcacatttcgtttttctatattcattaatatttttattatagattttgtattgttatctgagatgtgccatacacagtacagaaatcagagaatggctgatgatcaatcagtgcttggaaggaggagaatttactatgatgaagaacatgggagtgaggctttgatatgcagtgatagcgaggaagaaattctagaacccgaggaagctaaacgagaattttctaaaggagaagaccgaattctgtggtaagtttaacaggatatgttagacaataatgtacagttttgggcttaaattatactgagctacagtcttgaagtcatgtcttgaaagcaggagactgttgtatgtaattggatcatgatatataagaaaatatccgaatgagagttgatcatatctgcctatgagaaaatagttttttttttttttttttttttccttacatgaagataggaaattggagaggataaaattatcttaagcttttcatgagataaagttatttaattctaggtggaatagttagtgtgttggattaattttcaatttttcttcattccccctaactttgttgaaaaaaaataatccaatcttacttttcaaatataaaagtgttcctaaaagtgttgcggattgccatacccaactaagaggtttgtacaagtagtgtgatgtcatcgtatttcatctttatgaaatgatcttaccaaaacagaaaaactctacttatactttgttttttacttttgaatcgacagcacaatctttggcgagcatgggctaggtgaggaagtggtgaaaactgtgagcaattttattggagtcagtactctggaagctcaggtagtctggtttaatttatttatgacttaatgtcttttggaggaaacttgagttctgcacattatatgtgtattaattctcagaccaaacaacaaaactaaatgtagttagcattgctgttttctgatctggtcatggatgtattcgaattttatatgtgaaggaaagatataacacaatcataggaaagaacgaagaactcgaccctaataatggcaaggtatttgaacctggaaagggcatgttgctgaacaagagtcttacagatgctttagattcttttgataaccttttctgtcggcgttgcatggtatttgactgccgtcttcatggctgttcccacacagttgttttacctgtaagatttgtttttggtgtgtaggttacctatagtttctcatttgttgttatatttgattcagagtttgctttgacagaatgaaaagcagatgtattggtctgaacatgaagatgataggaagccttgcagtgatcagtgttatcttaaggtgagacttctttcttttaacgcttggtcttttcaatatcttaatgtgagaattgtatctattggatttgtattatgcaatatatgttcaaattcttcttgtgtcatattcccatagaatttaaactctaattatgtcaatattttttgcagttaaatattgttaaaagcttgccagggggtccaaagtctaataatgtcatattaccgtcttctatctctgaagaacccattactactgccaacattattacaaacattacaagtgatgatatatccgtttctcaagaaattgtccctgctaattcaaatgctatttgcatttcagaagctgctgaagctccaaatgtggatataactacgacgatggcaatatgctacgagagcacggggaagcgcaaggtcataaagcaaatagacacaggactagaacaagccagggtttctgatgatctcgacgcatcaaataaaaaacagaaaagactaaatgttttcaatgtcaaaagtggaactacagaagatattccagttcagggttccgagcttagcaccaaaagtagacatcttgatgttgttttacataccaaaagtgaacatcagatgattgacaagaattctggaaatttttccattgatgaatcagaagctgtagagaaatcactgaagttgaaaccattttcctccaaagaaggaaaagtgttagaaatatctagtagcactgagtggaaacaaatggagaaagatctatatatgaaaggattggagatatttggaagaaataggtctgtgtttaggttctatacattctgcatgacaattttactatttacgccatcattagaacctgaaatctgctaaataattcttatttggaccccacataatttatatgtcatgtttttcagttgcctcatagccaggaacttactttctggcttcaagacctgcttagaggtctctagttacatgcgcgagggtggagtatcaatgccgcgcagatcttttgctggaccaagtttatttatggatgaaaatgggaacactgagacagattatacagttagtatcattatttttttaatctattattattttttgcttgcttcatgcttaatttttaggataaaagataagtgacatgttttcttcctttttcctgactgacaaaaagatagtaagtgttctgagtatatttctttgatgatggagagggtaagatataatcaagatgatactatagatttcattcacttttttgagttcttcatgtataatggtttgttaatttactctctcttactcaatatgcctagtagattgccgattggctctgcaaacccgagaatagaaatttattattatcattatttttccttttccttttctaaggaccaagagatgccagcgaagtctcgcttgatccgtagaaggggcaaagcccgaaagcttaaatactctatgaagtctcctggtcacccatcaatttggaaaagaattgccgatggaaagaaccagtccagtaagcaatatacaccatgtgattgcgaatctatgtgtgggaagcagtgcccctgcctagtaaatggaacttgctgtgaaaaatactgtgggtatgttaaattatcttgaatgtaggtagcttagaattaaaaggggagtttagaatttaggtgctatcttggatatttcatgtttgtcaagatcaaaggaaaatccatttattgttcaatgagtggtacataagcctacgagctatgttcccttagggtccatactgggtatcttcatttgattcccgcttatctcaagttgagagaaagccctcaatgtaaaactatgaaggtcatttacactgtggcttagcacttcagttagagtgatgccttgacatagtaagcaaaaacaataaaattagacttccaaggctgagctattatacttgatatttaaatatataactaaccaatttgcaagatctgcttttttgagtttagatgaatgagatataatttcaattaatatagttaggttgtatatctcaggtgctcaaagagctgcaaaaatcggtttagaggatgccattgtgcaaagagtcaatgcagaagtcgccaatgcccgtgctttgctgctggacgtgaatgtgatccagatgtttgtcgaaattgttgggtcaggtaaatgaagtgcatctttgcaaatgtgtttactttgcttctcctgggtacttcctgtctttttaaatagtgctcaattatgttttcaatacaattcaaccttagagttgcacgacatctcctttattgtttctcatttcgcctcctattttggaaattgattctcttttagtggtggcctataagtatctctttctgattgcagttgtggagatggtacactagaggagccacccagacaaggagatggccaatgcggaaacatgaggcttcttctgaggcaacaacaaagggtgggaatataagccttaatttagtaaaattgtctcttaaatattagaaaaatactataaagaatggttttccctcttttctttcagattcttcttgcaaagtctgatgttgctggatggggggcctttataaaggttaggggatgtatgtaaaatctgttgcatagtaactcataaagaattgttctaacaaaattacaacataatttcagaactctgtcaacaaaaatgactaccttggagaatataccggtgaacttatttcccatcgagaagctgataagcgtgggaagatatatgatcgtgcaaactcatcttttctttttgacctaaatgaccaggcaagtattctctggtgttctcggcaccttgtttggagcttaaatctttaatcttgaaaaaaaaaaacttggtgggggggg

SEQ ID NO: 161300 - DNA, 1403 bp, Cannabis sativa
tttttttttttaaaaaaaaggaaggaacttaggatagactgaagagcataaaatagcatatttatccatctgtaaatgttatctctgtttgagttttgggctgagctgggccagccagtggcctccctccagcccttgctttagtttactattattgaaaataaagcttagctagctaaacacttgtgacttggtccatctatctctctttctctctaaaatattaataattttgtagggtcaatcctcttcttaataatcactcttcccctcgtggcattgattttcattctcatttccaatttgtactttgcatttcatacaaagaaagaccaaagagaaagtgagacccacaaaccacacacacacacacacacaatttcttttcattttatttctctctctaaccaaacacaacaactcacaaccttttaatcatttaaacttaattagtactcacttaattaaaactcctttgaattatgatctaatgattctttttattttattttattattttttcttatcctattcaagttcaatccccccaaacttcaaggtccaatctttgcatttattattgtaagaaataaacttttattttaaggaaaaataataagcatagtgggccctacttacttcaaaattattgcttctttcttagtttgtgcacgtgtggtgttttttttttcttcctcttctctctcctttatgtttttcattttcaactctttttctgtttcaaaatagtatttttccaatgaaaacgttccttccacaaaccaaaaagaagaagatgagattgttaggctaaggcttttataaacagtgaaaattaggttgagaaaacagtaagcaacctgccttaattcaaagtaaagggttaagctagagtaaccgtgacagaccagacaagctgtcggtgaccgagcagtcaaaaccccgttgttcaacaaccaaaccgtgtgtgattgggccacgtcattaatctgaacaccaccacgtgttgatagcagcttgtgggtcccaccaccccaaatggccaattcaacatcaatagcattagtcttttattctaaaaataacccatctctcagtttttcagtgccaattttcattcaaatgggtatgagagaaagaaacgaagcgttcttattagaagaggagcttatagaaagagacagagagaaagaggagatcatcaacttatatgggtcccacttaactctcccccattttgagaaaacgacaaaaagtgggtccatgatggctgactcatactcacagtcacagtcgcagtcatatcatatagctagctaactaataaaaggaacaattcttccttatataggccagagcctgagtttatcatatttgttggggtttccggttaaacgacacgt

SEQ ID NO: 161301 - DNA, 9124 bp, Cannabis sativa
  modified_base (3470)..(3470): a, c, t, g, unknown or other
  modified_base (5616)..(5621): a, c, t, g, unknown or other
atatatatatatattatttgtatcatttgaatcacttgccttgtttatttttccaagaaacaatccatatttataattaatatattatatctttgaaagacttattttatagtttgattgatattggagtggattaaatatagccagaactaaattcatgtgcagaacaatcaattggtcaaaatgtttatactgtcgtaacaaaatatagatattagtttctgaacaattaagaccaaattcacaatgaaaatataatctgaaggctttcgaattttggataaatatgaaggaaagtgttttttttttttaacatacttgaatcagagattcataattcttcaatttcatttacgtacatacatacatgactttccttttcccataatgacattaaaaaaaaaagaaaaaaaaagaactactgacagcagctataacatcaccaattcaggtttgttatatgaacatgagctagaattgaaacccttggagaccaattctttgattgttttcttttttggatttgaaattcttaagtaattaactttggaaaagttaaactttcttccaaaatgatcagtagctggtgctaaagggcttataggatttgagatcaagagccacaccagctatggagccagcagcagcagctacggttatgataagacaagccacacttaaggtttggaggcaaagccatctggtgctccactttggtatcttcttttgaactatgtacatctccacagggtagtaaactgtcaaaggccagaatcccagagccccaagaagcccaactatgtcgttaaagaagggtaaaagcatggagatgacagttgttatgatcacaaaaatagtcctccaaactactctaaagaaattcagcctataaggactgcaaccaggaatggggattatgatttctttggtgatgaatttgctgtcagggtacatttctacagccttcttttcaacaaaggcgaaaaggggttggcagtagacttggtatgcgccaacaaggtggattacaatggctgcattagctatgtcaaggagccagtaagggttgtagaacccaaaaccagtgagaaggttcccaggggacatgtcgccgaaagcagcatagcccatacaaccacagagcatgtagaaaagagtagtcactgttacactaaccaaactagctttcttcattgtcttggcttctgctggtggggatcttactgtgtcctgtttaagcacacaaagtcatagggggggtacttagtttgacttgttaagacaaataaaacagtgaagttttgcttatttgacttaaaggattaaatgaagatgtgttatgttatatatacctgaatttcaatgaggatgattgagtaagagtaggcaaaagcaatgtcaccaagtgcttggaagctcctccaaattttctgagtttgagtcacagttccaatgcttattcctgtcatagttccactcatttttccattttctggtgtttaacatcaacccaatagagtcagttaacgaaatactaaaagtccactaaaccaagccaagacataaaacacacaaagaaataaagacctgcaactttagctatcccaaggcctagaccaatcgtcgaataggtgaaggacataaccgcagcaacaatagatagccaccaaagctgatcaaagtctgggatttgggaaaagatgatttgggttatcccaaaagcgatcatgtaaggattactgttcattttacaaggatctttcccatcactctcgtggaagcaattagacctttttattgccctgtttaaacaacaattaagccaaaaaaccaatcagtcaagataaaaatttacaaaaccatttataaaaaatcctcaaccaaatcatacttgttactcacatcatgcttatagatgaggctatagtatagccaatggctactccaaaaagattcaagtactgaattatcccacaaaacttgacctgaactccacctgaggaaaattcaaatccaataccaaatcactatatgagaatagagttttagtactttttgaaagacacccacatcataatctcagccaaaaatacaatataaagccaaatgcttttcttttctttttaccaagatttgatcgaactgcatccatgtaagtgtagtttctcttgccagtaacagtgtcaccggaacgatagcaatcagagagaagggttgaagtgtagtaagttacaaaggagaacaagaacataacagtaggaccagcaacccatccgagctgagcagtggcccaagctaaggatagaaccccagacccaatcacagctgttattatgtgagcacttgcagtccaaacagttcctggttgattaatatatacaaaaaagaatgagtacccagatcaagaaatggttcaaataatcaaccatctaagttttttaaatggaaaaaaaaaaaatgcatacctgttctcttgagacgcccatcatcgtcaaaacatttggagccaccttgtgggggaacatcgagtgaaacatcaaacacttggcgatgttgaagctggttctttccagtaccaacgttttcacccatctttttgttaagaaataaacacaaaagatgttatcaaactaacaacactaatgtctctctctgtctttgaaaaatctcaaattttgtgcactttttacatgcaaagaaaacagaggaagaagaaaagggagtgggtgtttaatggagtcaagattagttttttcaccgagtattaaactctcaactgtattaacgtagactctacagaaaattattgacacacaaatcgagactcacccccaaaacaaaaagacaataaaaatcccaaattgatgatgatgatgatatgggctatatttatagatatcaaagagatttattagaaagagaaagaaggatcaaacactagaagttggaaactgtgttctccttcctttcagtgagaaaatggaattgggtttgagtttgagatgtatgtaggaggaaaggactgggttatatatatagagaagggtacttagaagagtttgaaaatggagtttgacactcccacgtgttattaaagtgtcatatattttaatgtaatatcaagcataaagcttggtgatacgcgtcaacgacaaacacaccttttcttttcgttttccgtgtatccaaacacaaaggtttgactcatcattttttgaatttcatatttcatatattattttaaaaacattgctattattactgcagtggcgagccgagccaaatatgtgaatataaatatgaaaactgtaaatctagaagggataaaaataaaaataaaaataaaaattttatgggaggaaaataaatatatgtaggggtataattaaaaaattattaattttataagggcaaaattattaatcctaacactatattgtgggtgattaataattttttatattatttantaaattaaaatatataagattaataatagtttactatcttctgtaaaatttagtaattggcatcttagtagtaaagtatttaaaattactttaaataatgttatattgttattggtattaacttatcgtctaatataatttaatttaataattattataaaatatcattaactaaggtatcacatactaattaccactattatattatcttataggaatgttttaaggtgcaccttcgcattttttttaacggtccccactctcaccactaagttctcatttttcaagtttcaattcaacactctccttagtccttgcctaaaagacgcccctttctattcatttttttagtctgtcaatacatattactttggggtaagatttaggataagatttttcttttcatatagaataataaaaataattatattatcaaaattttatcatgtgtgaaactcacttaatgcaatttcacaaaaataagagacaaatgataaaaaaaacttgagaacttaattgtgcatgtatccaattatgtaacacattagattaataatttatgaaaaagattaatattgtaataattattactaaacacgtattttaatataactgattatcccatttcgaatatatatacatatataaatatagggtatatttatacataactgattagacacgaagacccttattttggacaattaaatgtgaatcctttgtacaactatacagcttttggacttttagttagcaagtttttgtttcatatagataatttaataattctattttggttaattggacacgtagagaagttagtcaatgctcaagctaagtaaatcatcattttctttaattaagtctatgattttgaaatcaagtagatatctatgattcaaaatataaacttatgttagttttatatatttatataatatataaaagctattgctttgtaatttcaaaaaggagggaaggttgtaaaatttggtgtgctaatttcttttttttatcttcgaaaaaaatctcaaacttgatttatttttgttttcctccaaaaaaaaaaagaaccaaatttaataaaaggtggaacgattttattggatatatacgattaaaataataagatttctcaatataaattattctaattattaattctcttgattaggtgcacatgtacctttgactacatttacgtatgcttatttatttattctcatgaaggttgaaggagtgttcttaataatcttccttatttaaaaattaattaatggtactctatctacgatgattgattaacatgtacacatgataatagaagtaaatatcgtattaatatactaattaatcaatatgtaataccgtaatacgtatacatacataaatatatatatattggtaggtaattaaaactttacttatttaagacataattaccttgaaatgtcttcttgctctctctccttggctatttatttaattttttttctttctctatatgatcaatatagaagatgggtatttttgttaatattattctgtgatgataactgggtgcctctcttcatcaatgaccttagtttatatatagaaatttcaaaacaacagcaaaattaataaactaatcaacggctaccttagaaagattcccacgtgtgtggcttctcgaccatccttactgatcaagagaatatggttctcctctcattattattattattattattatttcaatacaatacaaataatttatttatttatttattttttaaaaaaagttcgtgtctataagccattcatcataacatggacagcatattatcaaagtattatattcatcaaaatttatatgttttatttgttattatgcgatagtgaaattaaaatatataatctaagaaagagatggagctgccccccttcttcttcttcttcaattttttttgagccctataaaataataataataataaaatcattcccatttggtaggtggacaaagcagtatcttattcttatcttttgttctctctatgactggaaaaaagatattattattacaccaaagcatggaagaggttatctccaatttttcaaatgcaactataaagttagggacaatttatatatatatatatannnnnntatatatatataaatttataggttacatatgattatatattttttataatctattataataggttatatatcaaaaaatattgttaagcatatagggaaaaaaattattattaaaaaaaaaattatttttagaattgacttaattataattaagcatatactataaaaattaatttttaagtataatattgaacacaaaccaattagctagcaattattaattaaatttaactttagttaatattttataagaaaataaaatatattaataaatgaagtaaaatcatattattagtctcatgttatggtaatttattaattattttagttaattttgaattaattacaaccataactaaaagtaatgtaaccataatagttgtatatttgacgtaaccaattgaaaatcttatgcgctatttttttattattattattttcatatgatggctttgcaccatctactatacattctttgtgagcatttattcatgaagttcattttttagccaacataaagatcatgaaccttgatattgtaattgattagcaagacatttattttaaaacattaattagcaagacatttttttataacattaattagcaagacattagagatctaggaaaacaaaataacgggtgattgattgtcaacctaaaaatattttttcattaaaaataagaaacatttttttttgatggaacatatgtttaaaataagaaactaattagtacataaagttggtgacaacttatatatagtgatgatattttcgtcgttataacctctatagatacaaaatgaagggtttttgtcgtcgctagagctataattttaagattggtgtataaaatatatctcaacacttgaggatgccattgtaagaaaaatagtgctaaggatgacaaaattcgtccctgaaaggtatcaaaatcgtcccaagtgcacattagagatgacatgtcatttctaatatacttcatccgtaaaagtgattattagggacgtcaattaattaatgtggttccttgataagtaacatcgatctgagacaacaaaatagttgtccctaataagtaaatatcatccctaataatcttgccttttgactaaatgtgaccaagttattaaggacgacaaaagttgttcataatctattattttatataaaatttatatattatttgaatttaatattaaaaaacttaaacatcaattttttcatattaaacaaattcatgaaaacgtttcatattaaatattgaaagagttaatactaaatgtcataagaacacatttcatataagagttgatactagaaaaatgagttctaagaaaataataacactaataactaaaataaatgtgagagttcatagctagtaagaaataataaaactaatatctaaaatgtgtgaacgcatcatcatcatcaccatcatctccaaccctagcctcgagtccgctgctgagtaacatttggcatctacgagtagtacgacaacaattgcaccctcgtaaacatctaagatgtctattgtatatgtagcgttagtataatctacaatgcctgctatatctgtgaaatctgccgtgtcagcatcatttgtagcatctgcaatgtctgaggcttctatggcatatgtggcatctacgaggtctgaggtatctgcgacatcatctatgcactctggagcaagtatgacatcatctacatgaacatttgtaacatttgaaaatgctacatatgtgacatcgatgctaattaaattaaatatccatttactatttatttattaattttctaaaactaacattcaattgaacaaagttttcaattaaactattttaaaatttattatttgattacttacattagttttttaattaatgtgaactagggacgacaattgtcgtctttgatgtacaagagggaaaaatcttgctttttctaaatattcattttgaaattaaaaaaaaaaaatattagcgacaacatagtgtacattatcatcttgttaaaaagaaaattatgagggacaatttattattatcgtccctatccctgatttatatagttatcaaagatgacttaaattaagtcgttcctaatgccgttacccccttatgataatttttttttttttgtagggataagatcatgcttaaaactaactaaactatactaattaataaccctataatatataatattcattatgcttaaataacatttattaagtaattatcgtatataatgagaggtttagacttatatcccaatttaggaggttcaggtaatttgagattattttatcaactccatacatgtttcttcatcattaactaacccactaagtctttcctagtgggagagaccaaattgttgcttaaatttgcagatatatttaatataaatctataaatatttgaaaaagttgtaatgcgttgtaattgatgaaattttatattttgttgcgtgtgattttttttatacgcgtagtatataattatttgaattttatttttagcactataaattatttaaaataatattaaataactacaattaaaacaaaaattaaactaaaaaactttcttctacccaaacacttcttaatttgtaatacacatttttcttgtaatatatacgtgtatatatataatgtattggttcaaataggatccctagaagacgttctatagggtaagaaattgattgaaagtacttggtctagagaggttctagctttgactaatccacccaaacttagtgggattcactaaaaaaggtgatattataattatggaatgaaaatatgtacaagtatgtgtatatatatattgtatcgttatcaaaaatgtttatatacaatatagatatgtacaagaagatagccgaacttaagacggcgattctcttttttatatacaatatagatatatatatatgtataccattgattttgagaatatagtatgctcttaccacgtgcatgacggtcgaccaaaattactttattgattatgatatatataagattgttattggacacacaagtactacttaatatttttataggtgatttctacgattggtttgtaatattttttaaaattatatgacatctgatacttaattattataatagtataataccgagaaatgtactcgacagtagacaccaataatattttttttaacaattctcatatataaacctaagttagcctaattaacattatcatcacacaaacctatagcctaaagactaaatatagctaattttgtccttttttgttgttttggagagaagaacattaaaatttttatttaagaatacactctaaaccaatcaaattatatattaattaagagattataattaaatagaagtgcactaaaaaaaatcaaaacataaaaaaatattaaatataacaacaataacaatactatattataataaaattattattaagtaaatataatatttatata

SEQ ID NO: 161302 - DNA, 1390 bp, Cannabis sativa
agatgtacgacgagataggaatgtgtttaaagaagatgaaactcaatgattgtccacccgatcacattacttataatttgcttatgaaagagttctcacgagccgggttgctcaagaaaatggagagtgtgtatcacactatggtttcgaagaaaatgtatttgcagccttcaactttgatcaaaatgctagaggcttatgcgaaattcgggatcttggacaagatggataagttctacacaagagtgttgatattgaaaatccctttaggggaagatttgatcaggaaactagctgagatttatattaacaattacatgttttctaaattagagaccttagggattgatctctcttcaacatttggtgaaactgaacttctttggtgtcttcgtcttctttcttacgcttgtttgttaagtcgaaagggtatggattcggttattcaggagatgtcagatgcaaagttcccatggaatgtaactactgtgaacatcatcatgttaactcagttgaagatgaaggatttcacacacttgagaatttcactttctcagttaacttatacagtgaagccagatattattagcattggcattctttatgatgcaattagtatgggttttgatggaactcgagttttcgagacatggagaacgatgggatttctttctggagccgtcgaaatgaatactgatccagttgttcttactgcatttggaaaagggcattttcttaaaagctgtgaaactgtctacgcttctcttgaacccgaatttagagaagaaaagacatggacataccataatctcatcgatttggtgtccaaatcacaaaggaaggtaaccagttagctgcttcttttctcatgggcaataacaggtgcgcggttgatgaatggttaatcgaattttgagcacatttcggtgttgtgctttaagattcactcgtgctgccatgacatgtaagaggaaagtgaattcgattgggcgaaatactgttagcaaaaacatgtttttatttgttttttcaggaacaaaatgcagttgttgttgattagcttggggaggaaaatagagaagaaaaagaagctagtcatcactgaatctgtaagataaagctcttataaaaagaatatatacatatatatatagtactatcaaattgtatgtaagagaaatcacttgacaatcacttacttcaatatgttaaattagatttgtatgaggtctgaattagattttactaatcacagattaatgtatcatagtgttgagatgacatagactttaacaccatctaagcttgtatgtctaaactaaaataacaccaaatagagactccaaccgaacaacgaaaagaactttttttattttttatccgaacactc

SEQ ID NO: 161303 - DNA, 3048 bp, Cannabis sativa
aagatcccatcaaaacctttcaattttcttgtataaaatagcctaaggtttcccgaaacgaacaaaagtgtacataaaatatcaatttaatataaaattgggaagtgtgtgagaattgtagagcaggaccaggttgtagtcgggcgggtcactagaatcttctattcttgcccgattcaccgactaataatgcgggtttcaagaatagctagctacgggttctggtctcctaccttagctccgaagtaagttatacaaatttccaaatatgccattcataactgacgcgccaaatccaattgacgcgtgcgctcatttctttatttggtttcttctctctttttctttcctataaatacccagaccccttatgaccaaaatttcatccaactttctttcgcaccaaacaaaacctaaaccaaaaccaagaattcaagaatttcttttgtgatatggctcaacaagactctggtttgcaacaacagttgttggtatgttttttttttttttcttttcaactcaattttttattttaggatgcgctcgaattgggtaaaagaagacttttcaaatgattttcgattctctgtattttttttttttttaataatttgtatctgatggttttgttattttgatttcgattttgaaaggagaaggatgaggaaaataggctcaagtaccttgagtttgtccaaatagcgaccattcacgcagtggtttgcttctcaaacctttacggctatgctaaggacaagtctggccctttgaagcctggggttgagaccgtcgagggaactgtcaagaacgttgttgctcctgtttataataaattccatgacgtccctattggcctgctcaaattcgttgatcgcaaggttggttaatcatttgtattattgttttttttttcttctttaataatgggttttcgaaatagcaatagaaatgattgaatacttagttttctaatagagccagttctgatacttgcttagtttttttgtctcaatttgttaaacgcttcaaaagtcaaaatgttcacccatcgtgttttacgtaaaaatgttactggaaacattattcattgaaacaccgtgaagcgtttgttagtcttgtttttgggcctgcagaaaaattgccaatacaaaattcttatctcaattgggttgaattgccagcaatacatattgtttatattatttgatatctattatagttttaatcaatattttgggtcatttttgcttagttgtgtcaattgtggtcattacgttcttgctcacttggtgcttaaaattttgcataaacaaatgcaggttgatgaatctgtgactgaactggatcgccgtgtaccaccaacaatcaagcaagtctcttcccaagccgtgtctgcggctcagaaggccccagtgatggccagagccgttgccactgaggttcaacgggctggagttgtggacactgcgtcaggagttgctaaatcagtgtatgctaagtgtgaaccaagggctaaggagttctacgccaaatacgagcccaaggctgagcagtgtgccgtctctgcttggcgcaagctcaaccaacttcctctgttccctaaaatggctcatgttatggtccccactgcagcttactgctctgagaagtacaaccaaaccgtgctttccactgcagataaagggtacaaggtttcctcctacttgcctttggtaccagttgagaggattgctaaggtttttggggagcagggttctgaatcattgttttccagccatggtgaaattgacgttgctaactgatatggtcttcattttctgattggcacatctttctgattttgcattgtttacatgggttttttttttcttgttcatggaagaatcaaacataatgtgccaattttgttttagataaattgttatattttgttttcctatattagagactcgggccagtgcaccacaccctggattgcatgtggcaccgagtactcgctgtgtaattatacatttttctcttctctacgagtctgtttctgtagttgactatactcatgtgaaaagaggtcgtttgggtttaattatcatgtatctattttttttgttttttcctttttttaaaaaagagttgagagagagtaaatctgaaaatgatttttcgttactgaattttctgaatgaatcaactttacaattgaagccactatacatagtagcagctaagaacagagaataaatgagccaaaacagaaaataacaacttgcataactaagacttaaaaaaaaactaccactaactacctaatttttattattccacagtatattcaaaatcccccctcaagctgaagggaggaacctccgaagaaagcttgtgacaaaaaaaaagttgaatttgggtaaagttagtgtttttgtaagtaagtttgtaggttgttcttcagttgagatgtaagaaatggccaatgtgtttgtagtaattagttctcgaacatagtgaacatcgacctcaatgtgttttgttctcaactgaaatataagattggcagccatttgttgagcttcacattatcacgcgatataataggtgtgaggaatggaaatgccaagttccttgagaacaaatgtattcagacaacttttgtggcagttgttgaaagagacctatactcggattcagtactggaacaagctacagcagtttgtttcctcgatgcccgagtgaccaaatttcctctaagcatgacacaaaagcctatggttgattttctatcatcaagattgcatgcccaatccgcatcagaataggcttcaagtgtgagtgtatctgctggtttgaagactaagcaatctgacaaacacagatgatgttgtgttaactagattggaaaagctttaaaatgcccaagacggtatgatgcaactgtagagctcacttctgccacaggcacaccaagaagcatctgttgacagaagcggtttacctgaagagcgtgtgatgaatgaatctcaaataaggcaagtacatactattgaacaaagaact

SEQ ID NO: 161304 - DNA, 8709 bp, Cannabis sativa
ccaatactcgatccaacagccaaccaagcgccgtagagacaggccaccacgtattatgcgcattgcgcaccgctgcttacgttaactgaacacgcactaatcttagatgaacaaattctcttacattaattaataattacacctttatttttcggaggaatctaaccttagtttgtccaagttatttatacacattccctttcacctgtaaacgatcatagttgttctccatggatttttcatcgttttgaaacttacattaaaacccaagaagcttctcaggacaaaacataaacaggtataatctttcattttctttttcctccattacccaataagatttaggcctaaaactaccgtggtttttagtctgttttccaatgttttgttggtttgttgtcgtatgttgtaaaatgcttaaatgggtattcaagatttgtaaattggttttatggatatgttttcaactgggtgatcgataaattagcctttttatattgggatgggacataatacgggctaatgactgtttctagtatgtctttgttctccaatggtgtaatataggttgatatacatacatcactattggatcagcatggtgggggcctgtgcttgatcccttgtgaagaaataatgtttttattttttatgttatatgttatattgttttttttatatatatgtttatatgtatattatgggagtgaagtcttaaacatgaaaatcagtaattctatagttttgccatttgtgtttgcggttgttatctaaaatggaattggattgattctgttttgttttttgtttttttgtttttgaattccaggttggacaataactgagcatttgagatggattctaatgatatttatgtacctagtgtttctgctgatcatggctatactgttgacctagaagcagagatgggtaaagttgactttgctgatagaattttagtgaatggggagttaggaaatgctggggagtttctaacacagctggaacttgatctagcatgcacttgtgagaagatagccaacacaactgttcttatgatgcatgtgtcaactagggaaaatgactttgaagctttggcttcggagaaagatcatttatcagatgattctttagagaaagctttggagtttgatttcttatctggagttttggaatcagaggtgagagaattggatggattcatggctgtacttcaatcgggagttgttaatgctcgagagttactatcatcatgttcgtatgtgggagaaacttctagaggattggaagaaaaattacatgattgtgaacaatcttttaaacagtcattagaccagttttctcaacttcagacacactcgaagtacttgcagagggctttatcatgtttcgatcgacaagagaatggtgagcaacttattacttatcaaataatttgattttgtagttattatggttgaaatataatcgtcactgttacttccttaatatgatggttgtgtaagatcattagctgagctagttgtgtttgacctaagacaaaattgtggtaattaaaacgaagttgatttctgtttgggctatcttgaatttatcaagttcacagccacagaccagtcatagatatcttttccccaggatttcaagatggggaccttcagttcctatcttagctcggatatgtaccttttggatgagcctttgttcaattagtttgagctattgtttgatatactggtttaggtccatacaatttaattcctcaacaatttgatagaagtaatgaaaagcatctggctctatcccattctcctgtttttaattttcatttagaaatgaattctctcttttgatggagacttaatgttgtgtgcttataaacaagtagaactattaattatcctaggttctcactgtcgaatgcacacgttgacagggactggccataaaatgttagaggaggatcagttctttaatgcaaatgcagaaataaaaatgcaaactgctgaacaacaaagacatattttgaggatgctggagaaatctctggcaagagaaatggatcttgaaaagaaaatgacagagttaagacaagttgaagaagagctaaatcagagactggtctcctcagaacgagaagtatactgcatgggagatgaaacagaagatgtttgggaaagattgtttgaggcagataacacggctgtggtttcaatgggaatttcgaaagagctgttgggtcgattgcagatactccagcttagtttgaacagttcatctcaacaagagactcagctaagatcaaagcttgaaggttccaaggaagagctgaaggctaaagaaaattctttgagcaagctagaaagcagcaacgcaaaatttaatgacttgcttgttgcacagacaaaagaattaaaaaccaacttgagagtagctgaagataagttaattcttgccaattcagaagccttcactttgggtgaaaaggtcagttcgcttgaaaacgagctgaaagaatctaagtttctgctgctgaatgcaaaatcttctgcagatggtactcaggaagagctcaatgctctatgttccagaatcaatgaaatggaaaatgttgttgcagattctgaagagagaatatctaaagctgaaagtcgggctgaaaatgctgaaaccaagtgtaaattattaacagagaccaatatggaacttaatgaagagctgggccttcttaagagtggtgctggcgcttctgacagggttgattcccttgagaggcagttaagagagtctgatatccagctacaatgtgcaatcgcatctgccgaagccagtcaagagaagcaaagcctactgtattctacaatatctgatatggagaatttgattgaggatcttaagctgaaggttttgaaatctgagaatcgggctgatagtgcagaggataagtgcatcatattatctgaatctcatgcagagctaaatgaggaattgaacttcttaaggggacgattggaaagcttggaagcggttttacaacagactgatgaaacaaagatgactgctgcagagggcatcagtttccagaccaaagtcattacaaatttggtgatgcaactagcttttgaacgagaatgccttcataagcaggtattcaccgaacacatatctggttttattaaaatgcctttttattctgatagtcttactcccaccctggcaaaaagtaaattaagaaagtagcaataaattatagttcaataggaggaagatattctaacctatatgtggtgtgaagttggggtttgtagggttggatttactttacatattaccgtccgagccaaaataaggcaagtaaaaaacacatatgatgaattttcttcacttttggataaaagaaaattttcaatgtagaacaactgaccaaacacaaaatttcatcttttaatttaatttcatatttttttgttgatggtctcatcatgaactttcttttctttatgactcgttgaacttcttaacattttagatactttgttgcatattgcattctgttctccagtttgaattattaacaggagtaatcaatttaataaactatgtattacagttatcaatcatggatgtttccacagcttaacattcttccacagttgtgctagtttttttttttctttctttctatattcttgagatgggaatggatatacctggttgttgtacatcaatagtctgtacttggtcgtgtaagccttgtttggatcatggattttaccatggaaaatttttgtgagaaaaaaagagtaaggaaaaataatgatgaatatatttttctttattttgtgacctttgttaatatatttatttataattgctctaaattttgtaaattataacatatttatgatttattattgatctcaatattttctttgaatccaaacaagagcaatgaaattcttaaaaaaatccaagatctaaactaaacagaggggtgatgtgaaatttccttcatggcactaaaagtttcatggtgggttgtttattgtgttacatgcagatttcttcattggcaactgaaaataagattttggggatgaagttacaagaaagcaacaagcacgcagttatcaggcacgataaagaatttatgcagccaaaggataatttgagtactgctacttgctcagaagttaagaaagaagatactgtggtgtctactatcagttctaaggtaggtgattaatgcttcattgttttgtttgataaaagtctgatggtgcttagacataataatctattcttagtgtttaattttcacaggaatatttcatttgtgaaatttaagtttattttagtgtatcatatttatttgcatagttgtaggcaggcttgtggatgtttaagtcttattttttaggatggacaatcttttgcatgctaccttcagtactttttcatagttttttcccaaagaaaacctctattggtagtacaagaaattcattgttgtgttgtgtaaatttttttcaatgcattcttgttgtataatttatgctaaatattagtttttgttacctaatttggatttaagcaagtactttttgaaaaaaatatgctaggttgttgttattgagaaaggcttttcagtcactgaaaacttgttttgacatttgcttctttatattcattttatcagatggagaaaactcccgaaggtgtctcttccggtaagatattagtcggaagtgtgccgggaccagagacggtgaggagaatagatgcaggaatattaaattataagcaagttttcttggcagtgcttgttctgctgatatcggcggctgttttttatagtttccaactacaaaattgcccgttctgatggcgctgccaaagttttgaagttagctagttattgtgtggtagttaggtatgattcatgacaaggaacagttaactgagctaatagtcctaatcctgaaggtaggcaggtctttttgctttagtaaagaagattgttttagccaataatttgttgtggaattgctcacttttaactaagtggtacattttacagcaaaaagaaaaagaaaaaaaaactaagcggtacattttatgttcatgattttattcactaaataatgtatacttagccatgttttttgaaatgcaatgcatattattctttcactttttcacaagttattttttgatatcaaactatatcaatatgatgcatgtaaacaaaaatgagctatgcttatttctaaatgttaataaaataaggtaattgaatttgatactaatttcacatctggacataaaataccacaatatttatacttaaaatatatctattaatatattaatatattttggtgagaagttaggattaatatgttttgaggcatattttaaggatgattttaaaaataattatagtaaataaaatatgtgggacttcggaagtgatcgaacagtaaaataaaaaaaaaactctaactaaattgttgtacggtataattaagttttgaataatcgagcatacaagctcaccagatttctgatttaaaaacaaaaaaacaaaaaaaacatcatatgttcaaaatcacaaaaaatattctgatactaaatttggatcatttagtatattttctctagttataagatgatgtatcttttcattgtgagtagataatagatataatttaaatccttccgtgattagttggacaaaaggttcaattttgtttactcaaaaatctcaatgtttcagagaaacttaacatatctttaaaaatagttgcaaaactaagcattgtacatgaaatttccaagctcatcttgttcatgtatttcttcttcagctacctcctcatcgaaatgaataaatggcatataaccagccaccttcatttcactaactagcaaatgaagcttctcatagatctcattgcatcttggatgggccatgtccccaacaaaaaaggcatttacctcatctttgacctcaatccagctacaaccaggctccttcttcactctgtgagacctcatagctcttctcatctttgacatctcttcccacatcccagaatcagcataaatatttgataacaaaacataagcagcagagtcttgagaatccaattgtaataaagaggtagctgccttttcagctacttctatgtctccatgaagcttacaaatactaagcaaagttctccatataatagcatcagcttcaaaaggcatctcctcaataagcctcaacgcttctctaagttgacctgatctgcctattatgtccaccatgcacgagtaatgctccaactgaggagccaagttatagtcggtttgcattgaatggaaataatgtagccctttttcgacgtttccaatatgtgcacaagcgcgaagaacagaaacaaaagttgaacggtttgggttcacattctcaagttgcatatcctcaaaaactttaagggcttcttctcctagaccatggtgggcgtagccacatatcattgcattccatgtcacaggatctcgctttcgtgctttctcaaacatcagccgagaatcttgcatgtttccacattttgagtacatatcaacaagtgtgctggatatatatgaatctgagtgcaattcttgcttgataatttgagcatgtaattgcatccctagtccaacagtagccaaattagcacaagcatctagaatcgttgcaaaggtgaaattatcaggcttgatgcctgtctccagcatcagaacaaaaaatctttgagcatcttcattttgattttgctgagagaatccagaaagaattgcgttccacgaaaccatagtttgttcatcagttctatgatgtagcttttctgcttcttctattgttccacacttacagtacatatcaacaagggcacctcctacaaatgagtcccatcccaatccagatttgataattcttccatggatctctgtcccatgatttaaaacttgttgagctgcacaagctttgagaacactaccatatgtaaactgatcaggttccattctcgaacggagcatgcaaacaaaaatttgaagggtttcatctctgttatcattctgttcatgagccgaaattattgcattccaggagacagcatctcttataaccatctcagaaaacatgcaagaagcatcaatcagatatccacattttccatacatgtctaaaatggcatttgaaacacatatattggaccttaaacgactcttaactgccaacccatgtagttgaagtccttctacatgccctttcatcaccgcacaagcaccaagtgcaccggataaagatatttcatcatatccaagaccagacttcaacaacagcaagaataagtacaaagcctcattgccttgcccacttcgagcatatcctataataatggcattataagattgcaaattatggttcggcattgagttaaacagtttcctagcatcagacatactgccacattttgcatacatgtccaaagtggcagttcctactatcacatcagaactaaaacgtgcctttattacatgtccatgcaactgactcccaaaaccgtaggcagacaatccagcacaggacctgaaaacactagcataggtagattggctaactccaattccagcaatctgcatcttcttgaacatttctaaggccttgagtaaatgattattttgaacacaaccagcaataacagcactccacgaaacccagtttttttcaggtaattcatgaaaaacctgaagagaaaactttagtttgttacacttagcatacatatctaacaaagagcttcctgtcacaacatcaacatcaaaacccatcttcactgcaacacaatgaatctgaattcccaaatcataatcttctattgcagagcaagcttttgaaaagacagctaatgaagtagggtcaaaagccatgccggaactcctcatttgcacacaaacaccaatagacttcatatagttgccattctgcaagtaccctgaaaccaaagaattccaagagaccacatcccttgtcggcataacatcaaaaaatttctgcgcaaactccatcttgccacaccaagcatacgcaaaaatcatggtgttccaagacactgtgtctttgtcagttagtccatcaaacaccttggtagcataatccaaattgcaacacttgacatacatctgaatcaaacagttcactacaaagaccgtgggcttgaacccagatacgatcatctgagagtgggcttgtttgccctgattcaaggctcttccaatggagcattgttggtaaatgcgggaaaaggttttgaaagtcttggcaggtataggctggtctggtgtcaaagttgagaaaagtttggatgagaaagacaacactaatggttttgctaaatggtgaggagttaagtgaagatgacccatcaactttcatacttattggttggcgggctttttgaccgttgcaacagaatttcaaataaatggaaagaattctctgagcttctcctctgtcgtatatgcaaactctcttttccggtattgatttagttcttcctaggtcgtttcaccttaataacatgtcgttttcaatcttcagtgatgcagtaataataaaattgaacgacaaaaaaaaaaaaaaaaaagaaaaaaaagaaaaaaaagaaa

SEQ ID NO: 161305 - DNA, 1519 bp, Cannabis sativa
gaaaattcggtttgtatttttgtttatatagtcctatacaaaagatactaatttagaccattggataattttatccagtccttcaaccatgaaataaaatgccaaacatgggttactattcaatagtccaatcctaaggcatagtccaatgctccaaacatgaccttaatcttaaatttattaatggttactttgatacttatggcactatatctgtgtaatattgcagttaaagaacttctggtgctgctgggccttgattcaacaccactcttggaaaagtgttcgggcttcttttttgcagggtgtgttcttgtgatgattgtctgggggaatcagtgtagtaaatccgaacttgaaatgcgaacttggcacaaatgttcaactgtttttgttcctaaaatgctcaaatttgctgttttcgtcctatgcaatcttatgcttgcttgatacgtgatatgtgttccaatctggtctcttatactctgaattgggctactgctctgctagattctcttgcgttcgtgaattgttgagtacaaatggcatgattgcttccgtgttccgttcctattcaccgttccgttctctataggcaattgcaatctgtattggatgggtcggtttgttttagtttgttccaaagatatcgatggtgagggatttgtttggagtctgcttctttttcactttggaagaagtcgtcttagttctaatatgcccacttgagctctgttttcggtatcttactaataaacaggagtcaagcgggtaaaatcttctttttcatgcctctcttatgcatatcatgcttttctctcatttctatttatcctcctatattaattttcttaaccttttggcaggactcatggctctagttatggtctttttggatacatgattgggttttcttgatactaattgggcatgcatggttttaaacttaaaatttgtgaaagttttttcggctgcaaccagttcctctggacataaaacccactcatcatcttcttcattgtgcactggtgaaaagtatcccattccattttattatgggtaaccatgtggaagcttgtttgggatctcatagttatttatttatttatttatacattcattcattatttttttttatgagtctccgctgtcatgactttttctttttggagtggggattggggctcgatgagaaggttcgttataggttttttttgccgattttgatcaaacgaaacacctcagtttggaaattgtttcatttgtccaaacgtattgattggttaaacttgactgaagcaagtttgcgcacgacatggttgcagttttgctatcaaaattgtcgaacctataattgcctagctgattcaaatgtcaaaatatttgttgatttcttatatgttgtagtttattctttccttaatttttgtggtctttctagacatttaatttttattttggtaggactagaaatttaattattacagtggatatctaagtgtatccaaattatagtgta

SEQ ID NO: 161306 - DNA, 5649 bp, Cannabis sativa
gaaaaataggagttcacccaaagcgagagtaaaaaaatttccgtgttgacatatttttgtaattttttttttcaaatttttactcaggtaaaattttctaaaaactttttcctcttctttccttaattattttcatataaaaataattattgaaaaatataaaaataattagctatggctaccttttccttgctcattccttaactacttacaaagacaaagaatgtaacttcttcgaacaacaacaattatcaaagctttcgactttgagctcttcgtttctggtaaaagtttcaaactttctcttctcaatttggggatttcttgtttgctttactttaattgttactgtgtttcaagggaagttggaatggtttagtttactacttaaaaagaagacatttttgataattttgaataggaaatcaatgactttgagtgttgaaagaatgagttgagtttatttgagaaaatgggttgtttttaatgggaattggtctctggttagtgtttgtttgtctttttgaaaaatttaaactcaattccttttgtgtaatgtgtaattgtcttcttgttataacagatttgtactatttgtggtttgttgagctctgctatgaacatggaagctttcagatcccaaaaaggtccaacttatctcataaaaccatctttacataactttgctaatctttagagatgttgctgagatttcctgcccattttcaatttatgggaatctcacatttctcagtcttgatctccaaaccttgttttaaatgcttaggagggtttatgggtttgatgagttatgctacattgaatgatcccaattacaagatgttgttttctgattatcttaggaataaaagagtagatgaagctagggaggtttttgatcgaattccttatccgaatgtgtatttgtattcgatgatgatatcgggttatgctagaaattgtcggttgggtgatgcgttgaaactgttcgatgaaatggctgttagagatgtagtttcttggaattcaatgattaaagggtgtttggattgtggggacttatctaaggctttagagatttttgataacatgcctggaaagaatgttgtttcttggactacaatgattcatgggttgatgctgtttggggaagttgagatggctgagatcttgtttcggaagatgcccacgagggatgtggctgcttggaattcgatgattcatggttattttagtaatggtagagtggaagatgctgttagcttgtttgaggtaatgccttgttgtaatgtaatttcgtggacttcaatgatcggcgggcttgatcagaacgggaagagtaacgaagctttggctctattcgaaaagatgatgtgttctggtttcaaaccaacttcaaccacattggtatgtgctttgactgcctcagccaaagtactggctttaaattcgggtgttaaaattcatggccaaattgttaagttaggctacagctttgacgagtttttatccgcttctctaataaccttttatgcaaattgtaagcaagtagagagtgcttgcaaggttttcaaggagaaactgcacaaaaatgtggcagtttggacagcccttgtaactggatttaccttgaatggaaaacctgaaaatgctttagaggtttttcgagatatgatgaaattgggtgtccttccaaatcagtcttctttcaccagtgctttgaatgcatcttgtggattggagtctcctgataaaggcaaggaaatccattcaacagcagtaaaactaggtttcgaaactgatgtgtttgtgggtaattctcttattgtcttatatagtaaatgtggtaatataagtgatgggatatctgtgtttatgaggattggtgagaagaacattgtctcgtggaattcagttatcatgggatgcgcacaacatggttgcgggatattggccttgactctgttcagccgaatgatgcgtgtcggggttgagccagacgaaatcacattcactggcttgctttctgtgtgtagccattgcgggatgttacagaaaggaaaaggcttttttaaattttttagtgaagcgaaagcttttgaggtgaaacgcgaacactatgcttgtatggttgatgtcttagggcgatgcgggaagttggaagaagcagaagagttagtaagaaacatgccttttgaagcaaattcgactgtatggctagctttacttggcgcttgtaggaaccattctaatttggatgtggctgaaagagctgctcggaacatttttgagctggaaccacattgtagtgctgcttatgtactgttgtcaaatatctatgcttctgcaaatagatggagcgatgtctcgagagttcgaatgatgatgaaatacaatggcgttgtaaaacaaccgggctctagttgggtcactctaaagggattcagacatgaatttctttctggagataaatcccactatctcaccgaaaaaatatataaaaaactagattggttgggaattaaattgaaggaatgtggttatgttcctgatcagaagtttgctctacatgatgtggaggctgaacaaaaagaagagatgttgtcttaccatagtgagaggcttgctattgcattttgcttggttagtacccccgagggagacacaataaccgtgatgaagaaccttcgtgtatgcggggattgtcactctgccatcaagcttatagcaaagattgttgggcgcaaaatcgttttaagagattcaagccgatttcatcactttagcaatggtatctgttcttgtggcgattactggtaagtaaggtatgtagtaagagaaatatttgaaagacatatttttaatagtcatgattgagaagaactttattatcaaaacttgattattataccaagagtgaagggatgtgatgatgatgattaagtagtgcagaacaatggtggtttttgactgaggataggatactcatacaatgaagatttatgtgctcaaactaacttgaaggaagttttgatttgatttgtgttgtacctaattaggtgatgtggggcaattaacttggtgtaatcaagtggtaatagctgctgagttcttagcaggaaaggaaggctttggtttgattgtggtgattatggaaattacatcgacacccgagaaggctaaggctaggtgagtaagatttgtaaacagaattgatttcttatgtgcagcttaggagtatcaattggtacttttcttctcattgatttgtcatggcagaaactgatttcctcgcggtgttgaagaccttgcacgctcaatctgaggagcaaacaatgccaattcatcagaacttgcaacaatataagaacttgcaagcaatcaaggtaatctaatcttcaaaattgattcaaacctctcttaatgattagattattcatttctggtttaaatattcataatacgattcactttcaagatgtgaaattgtatacaagcgaaactcaaaatccgtgctaaagagtgtggaggttcgagtcatcttcaaggcataatattgaatattgaaaatgctaaaaaacgtggaggtttgagtcctttgttgtcccagaaaattaagagacttttcgaaagaaatctaaaagatgattgaatcattagtctttgttattttaaggaatcaacatcaatattttctgtgctattttgaatcattgcagagtgtgaaataagaaaataaaacattcattcttattcctctgttttggcatttacataatattattgtttatctgtttttcagtttaattaatatgtctatttattaccaagaaataaagcataaaatgataaataaataagtatatgagcaaaaatgcccccctaaattaatatttttcatttatattcttatatatatatttttactttgtctcaataaattttacatattttttattattagtctacataattttatttttatcccctataaaatttatattttttgttgttgttatcctttcatatttttttattttatcccattaatactatttaattaattttttttgctcttgttaatagctggttataataacagtaatccagatatttttttttaaaaaaatatagtaattttgctaaaaaaaataaaacttttaatacaaaactaaatgtatataaatatacatgtgattttgccattttattcaaaatctctctctctctctctctctctctcattcatccatggctaaaatagatagaaatctcagttcttatcttgattttgtatgcatggtttctaatttcttacatggtgtgaaaatggccgataagaagatagaaaaattgaagcttaagatgatcacaaatcaaaagaagaataagcaaagaaaagatgatcataatgatcttattaattataaaaagtcttataagaagactaagattagaaatcaagaattctataatctcaattacaaccattcattactcaagagaggtttcattaggactataatgatcttctctaggttacttgatccacaagattctcatgaagattattactacacaaactcgcaaatattcctacaccaacttcacaatctcctccctctaaggaaggcgaaaaccaatgatgagttcttacttgtgatgcaagaaatcaggagttcttggattaaaaatgccaaaattcgtgataggaagataaagaaattggcaagggctttgaaagtcggtattaatagttatgatgatgatcatgaaggagttgaaaagaacaagtggactatgattgatgttatgaagaagatgtatggatttgcaaaccgtgaaaaggcgaaaaatgaagagaatatcataaggaagttgaaggaggtagaattaagtactctgtgtttgtcaacttattgcgagttattatcacctgagattgatgaaattctgaggagaaagaagagtaatcttggcgagttcttgaagctggtgaatgggatcaaaaactcgagtgagctcgatgtggagatagaggaagctaatcacgagttattgtggtggttgtactatgttgagagagagatctttcttcttgttaatgatttgacttttgttaacaataagtgcccattaattggtttaattagaaagcttaaagagcttaaacaacaagaacaagggaaggtggctttagtggtgtataggatactatttttactagaagaaaaaatgaaagttgatcataaaggcttatacatggatgaagttgaatttggatatttagtgcttcagctatacaagatgattttgttgtgcacacatgttttgaataacatctccaatttaaattcaaataatagtaatttattagtattagaaaatgtttgtaattattctaagaaagaagtgtttattgagtcttttgaacttgttagaaaatgtgatgagaaaataagtgctatgagaagagaggttgatgagttcattagaagttaaaacattttttttttattcataatgtaaatgataacaatggttgaccataatgatacaagttgaatataattacttttaaaaatgtggtattttttttttttttatcgagaataataatctttctataatcaaacaagccatttacaa

SEQ ID NO: 161307 - DNA, 3374 bp, Cannabis sativa
cacattctctacactgaatgcccctattcttattgtcaatgggttgctgaccatgcttgaagtttcgagtaggatttattttgggaaaattttctttaaccctagaaaaaaatttcttgttccaagaattttacatagttcctggttagcagatctatagtttcatccttctagtgttctttgtcaatgaacgcaagactgttgttccctttttctttgtccatatccttctggttttttctttcttccaccttgttaaggacataagatccaatcatttcatcaagatctagttctccacgtttctcatttcttcaatggatgttaatttaggcataaatcttctaggcagaactttatgaacgagctttacatttgaataattcttttccaaagtataagactcatttgataggtcacacaattttgcatggatctcagccaccgtttcttcttcctccattgatacattcttaaactcttttgccaaagcccaaatacgggatttctttactgcattggttaatcattattgattcaaaaaatttcatgattgatattgtctcataattgatattgcatgtaactgttgatctcttattccctttatgtaatatcaattatgagacaatttttcatattccctttatgtaatatcaattatgagacaatttttcatgtgcttcttgggtgtcgttttgcctaatcttgctggttttttttttttgttgttgcaattatactggtgtggacaatttcagcagcaggttttttatgcttttggatggtaatcatggtgaggtggctgtcaatcctgcaatgatttcgtggagcatttggaagacccgcaatgaggttttctggcagaagaaaaccagccctactttgagtgtagttccgtcggcaaggaaggcccttgatcaatggagagttgcaaaaaataacaccgcaggaacgtttgctactcgtttgtattctaaaagcaacatttggagtaaacctatgggtaataagatcaaggtaaatgttgacggtgctatttttgaagctcagcaaaggtttggttttggttgtgtggcccgtgatcactttggtcatcttacggaagcaatttctgattctagagttggtgtggtgttgcctgaaattgctgaagtaattggcatgaaggaagccttgagttggataaaaaagaaaggctgggaggatatgatcattgagacagattcgttgattgttgttcaagcactcaatagctctgtccacatgacgtctcattttggtttgttggtggaggattgtcgtctgattttatctactttaaagaatattttgatttcttttgtttatcgatatgctaacagggctgcccataattgtcttgctcggggatcctgttatttgtcaggttgtttgtttaatgagttgaaggctcctgttgttttgaagaatattgtaatggctgaggctgtttcttaataaatttcttttcaaaaaaaaaggatgattgcttctagtacatttctttcgtgtatgaaaaggccattaatgttttattgtaaagatgagttgtgaatattaaatacagtcaatatacagagtatattcaatattattttcctctattttagcttggtattagagttagaaatccatgagccctccatatatggaaaatcccacccaagccgaaatttcctctacatcaaaccctgtagatgtgcctccttttactgataaagtcaatgctccagctccaccagtccaaccattcccatttcaaagcctagcgcctctcactataaaacttgacagagtcaactacacattggagatcccaggctctcccaacacttcgggcacatgaacttgaaggctacgttttagggactaaaacttttcctcctcagtttgttgacaacatagtcggaggctctattcctggtgaacctcgacaactgagtctcggctatgccatgtggagacgcacagattagtccaaacttagttggcttctcaactccatttcagaatccatgcttggacatgtgataagttgcctcacatcctttgatctttggatcactcttgaacgtctatacagaacaagttcgaaggccagaatcttgcaactgcatcttcaactgcagtccctaaagaaagggagtctctctatacatgactacatcttgaaaatgaaaaatattacttatggtttatttgcggctggtcaactcctttccgatgatgatttgatcctatacatactgggaggtcttgatcatgaatatgaggctatggttttcaacctgacctctaaacatgatcaatttactctgcaagaagttcaatatatgatgcatagtcaagagattcgaatggaacaactccactcaatctccaatgactattctatccctgctactcatcttgccactaagaaccacatatctctcaccattggcaaacacacaacccaaaccagccatctggtagccactcctacaaccctcgtggccatggtcgaggcagaggatgtacaaacaataacagacttgtctggcaactctgcaatagaccaggtcatataagctccaaatgttatcatcagtttgatttctccttccaaactccaggatctggtcagccacaatcctctcaaaacaccaatatcaattatccaacaaatgaccaacaagcctacttcaccaccattgatgctcacactgacaacacttggtacattgacagtggaaccacaaatcacaatatctctgaagcctccaacatacaatacaaaacaaatctaaaaggtataactcatttacttgttagtaatggttttcattgtctataacaaaatctggttccagcaaaattcacaatacatttggctatttaatgctcaatggtatattttatgttcctaaaatatccaaaatcttctgtccatatcacaactaattaaccaaagataacaaagtatatgttgaattttatgttgacttttgtgttgtgaaggaactaatacgaaggaggaatttcttttgggagtgcttaagaatgggctatatcaattgtaacttcctacatcatcatcatcaatccaactgtccatcagtagcttaagtttctttgtttcctccaagagctgaaaacctgccaaacatccacagtccttagtcaaatcgagtcatttaacaccattaagtagttgtcaatctttgtttgctgaattaaattttaattccaatgtggcacatgcgtcttattgctattgatgtagaaattattatcatctattttgtgaataaaaaatattttaaattcttttataatttggtagtgaacatctcactttatgagataataaa

SEQ ID NO: 161308 - DNA, 3736 bp, Cannabis sativa
ggtagacatagctattggattagtcgagttgattcaacaattctaacatagcacgttatacttgacttcctagatctgtcatgtgctgaccagtctcttgtctcttggttcacccgtctaatctataggattgttgtatgctgacccatcgtccattttttgtcatatgtcactccaattaatactacgtcacttaggtgatttttggaataacattttaagagtgtaattagaattcctcaattaccactaaatatattgtagtttctcaaacgtgataaattgtataattacccttagttacacccaaattctattcctccttgactttcttgtaagcctagtattgactatgattgcaaaatgatatcaattaacggccaagatgtaaacttaaagtcaacataagccacgtgattatgattaatcctgggtcctcaaataagcgaaggattatgtaactcattatacatgatttcatcacaaccggttgttgcatcatctatgatcctcaccgtcaataatatcaatccaattaaccaacggttgagatcatcactctctttcttcctttttctctatccttctggttctcagattttccttagcaatatttcttttctcataatgggtgtctggtctaaaccctctccttcaccttacgtaaatcgctaatcggataccttgagatttcttctatgtctaatctgagtcgggcctgactcagctatggagagggttgccaactcatgttaaagtcagcctttaccttctcgttttgaagacccatcatcacactttttgacccaggttttggtttatttcattcaagaattcatttcctaataattttttccaagctgctataatatcctagattcttaagctgggatttatcgattattaccgggaaatatattcttgagtgactgtaattgagtattgaaacctagcttgactttttttttttttttttaatttctgcattctggctagggtttcgattgggttctgctgaatttgtgtccatgtaagggttttcgaatctgggattcctcaattttgtgactgttgcattagttgtgttacgattcgttctttctttgggatattaaaagtagggttttttgatttgggattattcaaatttagatcgttttagatgtttcgagattgtcatattacaccattttggaagaataaggtgttttaggatgtgggtctcttcaatttatcggtgaagcgcttcttttcttgttcaatttttcttttttcttttgttttccttttatacttagttatttgagctgctgataccgtaaggttttctttttaacacctgggctttgccatattgtgatgggtgaagagacttctgatgcgatgaaccttgacttgaaccttagtcctggtcccgagcccactttaggctcagtgtcaaatgttcccatgactttagatgagaggattgataatcctcttcatagatttagggaagcggtaaggattggggccagacagcggtccagatggcgacgacttcaaataccaccggaggcccataacctttcaatggagttgaaccacctaatggttaattctagtaatgcaactacattgcaggcaggtgaaggtagtgttgatgcagttgaaagaacaaatcacatgcccaaaacatgtgaaattaacaatgggattttggaagaagatgcatcagagaataagaatgatattgaaaagggtaatgcaagtgatgggagcttttttgattgtaacatctgtttggacttgtctaggaaccctgttgttacatgttgcggtcatttgttttgttggtcatgcctttatcgatggttacatttacattctgaagcaaaggaatgcccagtttgcaagggggaagtaacactgaagaatgtgaccccaatttatggccgtgggaaccataagctcgagccagaagaggactctagtcttaagattcctgctagaccccatgcacggcgggttgagagcttgagacaaaccattcagaggagtgctttaagttttccagtggaagagatgattcgacgccttgggagtagatttgatttgactagggattttagtcagcctcacgagcctgagagtgttcgggaaactgcggaaagagcaagcttgctaaataggtttctgacaacccgagggttacgcagggagcaaaatccagtggaaccaactgaggaggttgttatggacttgaaccaatcaaacatggttggtcctgaggtggtagagaatcgccgtcttcagtcccttttccttcgaagaacacaatcacaaagggcagcattttcctctctttcatctgcattgttctttgaggcctttaggaaccaccctaccagtaggaaccaggagcagcagcctcctgcagttgatgatagagattctttctctagcattgctgctggaataaattcagagtcccaaatcgatactgctgcagaaattgaatcagcagtatctctttcaacgtcatcttctagaagaagaaatgaggcttcaagggtttcagatttggataccggagattcaagggcacctcgaaggagacggctgaactaaaagcctgtgtctgatcctttagtgtaaccggagaaggtttatgtattaaatctggaagctttatcattacccacttaattacataactattgtctcagccatagttatggagctctttctactttatgcttccagtatttggttcaaattagctagtcctgttctaaggactatatgctttcaatttgtaagaatcaagtttgtgtacaacacatgggctggttcatcgttttcagtgtacataatctcatgaactaaacatgtatgaacttgttatattttctgaaatttcttaataatctcaatttagtaaatgcttcatgccccttgtgaagtaaatgcagcagtctatcagtgtcggatgatcattcgctattgatggataaactgcaggcgatttgattatgtgctttaaattattattgttcatggataattatgatctgggattgattgtgaaatcaaaaatatccaaaggagaattgggtatgtgattgtaatccattgtcttatttgatgaattttatatatggaggattatgttaataaatgtagtcattattatgctccactttcatggtggtatcataaaacaagctatgtctacttgatctgttctgtttttttttttttttttgaacaagatcattgttctactttcgcatgaagtcgtggattgtgaaaaatacattgtagttgtagttcaaatacttatgaaaattgtaaataacttaattgtgcacttctaaaaaattcaagtaacaattgcttcaaaattcaaattttgtttttaataccataaaatcatgtttttaacataatgatttatttgtaatttttttaataaagcgtgatttctgatctaactacaatatgttgaacacatttttgagtgattagtgcttagggctagtttagtatagttgtgttgtggaagaaaaaagaaaactttggaaaaaagttgagataagtgtttggtaaatataaattttaaattgttgagttattaagaacattataacaataataatgttataatctagttgattataatcacaaatgtataaaaaaattaggttaattaggattttttcctctgaattttgacatgtaccaaatcatgacc

SEQ ID NO: 161309 - DNA, 9328 bp, Cannabis sativa
  modified_base (9288)..(9302): a, c, t, g, unknown or other
cattagatgggctccccttgtgtgccacgggtgggcctgaggaaatgttgaaggatggagcttcttctattgggccgaggaggagtaatgttgctgggccatcacggggtgagtctcgtggtgttcccccttgtgggccggtgtgtaatgttgatttaaatgagaagatgcttactggggacccgtgcctctctgttgtggggcaggaccgatcggataatcttgatgaaagaagatctctttccaaattctttcatgcccaagagtgttatcttccggagctggcagcatttgatactcagggtcaaaataagagaaaagcttgctttattgatataggaggacaacccacttctgaaaccaatgtgagaactacccttgttgaaaagagaaaagtggatgttgactcgcactcgttgggtatcttgcctaattttgctttgagaagggtgaaaagggttgtctgtgacttccctcgcggtgttggcccgtgttgagtgatcgaggaagctagtagggagttaggggtttcttgtgattcggagtagcctctaacttgtgatgatagtaatgctaagtcgaatagcaaagccttggctagttatcactgcaagttgacaaaccgatcttggctggccaatcacgtggaaggccaaggctcgattgttggatattgagatcccgagaattgaagatgtgggatctactgtgggcactcagtttggtaatgtagaaccctcctccacacgagacatgagaggcgtcgcttggaactgtagagggttggggcaaacctctacagttctgaaactcaaagccaatagttcagacatgctaacctgacttcatcttcatcttcgaactgaaagtggatgcttctagtgcggtacgttcccttaaaaatttacacttttatattaacattgttgttcctgtgtctgggtgtgcgggaggtcttatcctggcttggaagaacgatttcacttttgagcatgtgagtatgtctaagaattatatttctggtattgtgtactcggattctgagcgccacccctagttgttgtcttgcgtgtctggctccccttattataatgaaaagaaatatttctggtcaatttgatgaatttaggtcaaagatttggcaggccttggttaatcttgggggacgtgaattttgtgttaaaggattctaagaaggttttctcgcgaggaaaggatcaattcatgcctttcatttccgacttaatcaatagattcgagcttattgacttgccagtgaagggtgaccacctcacttgggataaccacaaagatggcgcgaaccacattaaatcggccctggataaagctctagcgaatgaagagtggcttagactcttcttgagggtggcggttaattcccttcatacctgtaattcggaccatcgtcctctatgcctcagtactttgaacctggattccagactgtataggtcttttcgttttgaggcttggtgaactagagaccctcaaagtttgctaattatggaggatgcctggggctttgtgtctcatttgtgggccccggccagaatcttcaagaaagtgggggccaccagactcgcccttagtaaatggcaaagggtccaattcagtaaagtggatacttgtattgctaatttggaattccatctgaaggatatccaaaagttacctacgggttcaagggtctgggccgaggaagttgagactacgaagactcttaatgagccccttaggcagagagccctctactggcagcagagatctcgtatatcttggaataaagagggggataaatgctcaaaatttttcttcaccactgccaccatcaggaatagacgaaatgtagtggagaatatcttgaacaaagatggggtgtggattagtaatagaagagacattagaaaggaattctccaatttcttgggggtattttcaccagcactgttaagggcccgttagagcggctggacgacctgattgttaagtgagcaaagcaacctattgttaatccctgaccatgaggaggttcggtgaacgctcttctccatggggagcttgaaggcccaagggcccgatggcatgtctgctcttttctataagcactattggagctcggtgggggaggatttcagtgatgtagtgcacgatttttttctctctactactatgcataagggcattaatgcgactaatataattctcattcctaaggtggctaatccgaagaaagtaactcagttcaagccaatttctctttgtattgtgatttacaaggtattctctaagattattgtgaacatgattagaccaattctccctagactaatctgccctacccaggcgacttttgttccggtgaggagtatcaatgataataatgtgttggtccaggaaatcattcactcatttaagcttaaaaaaggaaaagagggcttgtttgcaattaaaattgacctggtgaaagcctatgataagctcagctgggctttcattgatcatgttgtaagtagctttaaagtgccaaacaagttctgcaactgggtgcatcagtgcattttgactacgacctttaacattcatctgaatggggggaaagtgtgtagttttgcccctgaatgtgggttaagacaaggggatcccctatctccgtatctgtttatctgggctgctgatattctatcctgtattctagagagagcaattgaatcagaggccataagggggataaagttgagtagaaatggtccgcgactttcccatctcttctttgctaatgatcttattcttgtgggtagggcaaccatcaatgaggccaagggttacttgcagtgcctagagaagttctgtgagtggtccggacaacgtgttaataagcttaagacctccattttctttagtaagaagactagtgagggtatgagaagagggatcatgcaggagcttggtctcaatatggttgcaaccaacatcaattacctgggccttatgttgtttagatccaagcaaaaaaatgctgacttcaattttattattgagaaccttgcctcgaagcttcatgggtggaagttgaaaacccagtctaaggccgaacgtgctactttaatcaaggcagttggactggctttggctctttacacgatgcaaaccaccatgctatccaaaaagctggcctcaagaattgatggtatgattagggatttttggtggggctgtgaacagggtaatcgtggtatgtgtttgaaggcttgggactggttatgtcatctaaagttgatgggggcctcaggtttcgtaagactctagagatgaaccaggcgttgttaacaaagtggggttgggctctacttaatgatgagcaatctctgtgttgtagagtgttgaaagccaaatatctaaaagagaagcctttcttggagggctcttataagggttctgattcttggttttggaagaacgtggtgaaatccaaaggcatcttgttgaaaggtgcatgcaaatttatcgcgaatggaaaggatacaaatgtctggacggagccttgggtgctataaaacaaggatttccttgcgaaacccattacttcgacacctatgaatgtaattaaggttgccgatctgcttaaggatgatggggattgggatattcccaagctccagactctttttgactcgaaaactgttcgtaacatcattaaaggaggtaaacctagtggggtgggaggtgacaggtgggtttggaaaaagggtcagaatggtcgactctctactaagtctgcttaccttgtccaagccttggaaacggctcctgactacgtggttgcgccaagtctgtgaaataaactctggaactcgaaaattatggaacgacataaggttctctggtgaagcatcttatctgacgccctgcccattcggggcctcctggcaaaaaaaattacgattgacgaggttacttgctccttaagtggggagtatgaagaatctatggagcacatgttcctctattgtaattttgtgtaccatctatggaagcatctccgtggggaatcttttcggctcctggtctgggggcagtgtttgggattgggtaactttatgtggaacttgaggaacataggggtaaatacggacaagctgttcctttatgcctcgatcgttgtggataccatctggagaactcaaaatgataaagtgcacaattactctccgagtaacattaaaattgtcattgactctatctctaattgttttatagattatgctgcttgcttgcttatcccggcggtggatacggtgtctcctgcgtggtctccccattcagaagattggatcaaaatcaactgtgatgttagggttggttgtgagtccatgtgcatagcagccttggctagagatcactcagggacagttctgtggggtgttgccaacatactcaatttcacaaatcctctgattggcgaggcggcgacgtcgtgtcaacttgctttagaaactgctgcttcatggaagcatgattttatcttagtggagagtgattttgaaaggattattaaagcgcttaaaggagtccagaccatctagaactttgataattatatttctacttgtaatcaactctctaagaattttttatcttgtaattttttgtttatccccagatgttgtaactttgcatcacacaacgttgctagatgggcttttgctcagaatattaagggtatagtggatcccgcctctatacctaatactatcctttgtaatgaccgtaaagtctaattttttgttatcaatgaacgttttatttttcaaaaaaaaaaaaaaaaaatagtccagttgcctgtgtccaaattagtttgttagcttttcggttagtgagttaattatttgttgtaactatctcagttgccttagtgtattatcttaattctgtatataaaccattgtagtgttattcttccgaattaatgagaaaatgcacaattgattctttctttctcaattgtcaaatcttacaagaatatatgactttctcactctgtctcaaattggtgtctctcattgtttaaaaagaattaataacacaaaaagaaaagtaaccaatcattagttatttttttaattataaagtgtacgtactatgttattccaatcccttgaattgagaaaaataagcaataccataattcgttaagtaaggtatcataactcattttagtatagatgagttaaggaagagtttgatgattgagaacatgtgtacataactccatttatttatttatttgggaacttgagatgacttacaaagtgttatctctatgtgttgcttcctgagtaggtttgggcttttcttctcggtccaatggtgcattgggtgttaatttcattccatagttgaagactttgaagttcatatacatgacaagattaagcaaatgctaatggaaaaacaggaaataatattaacaacaataatagtaaatagtaataacgaggacttatttgagataatatttgtttcaagcatgccgtggctggttggcattgccttttggtgattcaattcaaccataagaatcctcgtaaaaccgttaccaatataacggcaggaatctgattaacttgaaaaacaaatgggagaagaagccatgaattaaactttccctgatcgtggtgtactgttccggtcaacgccgcgagctcaatgcgatgagcaagattcagcttgggtttacctttgtttggagattgtggttatctggttctgttaatctagtttaataaatttactataattattattggattactgtatattgaactatatattttgcatacagttttattattattattattttggtaaatgtagagggaacagtcaaaagaaagggaaattaaaattaattagctattccttccagttctaatcttaatgtgctctgcaaaattgcaaatgcaactaaacctttttactattctggctgtctatatgttatggttgggttttaagttatttagaataagtttcactcccagacaaggtccgacgtaaccacttgtacactactacaaaattgacttttagcgttaaataataaaatatacgcgtgtcaattagtcattgatgttatctatcaacgatactattttaagcattggcgtcattgacttctcatattatatcatcagttagcaatagaaactatttttagcgtcttgttctttttatcaaacatgttgacgcgatttttcgtcaactaatctaagaagattataaaaaataagaggactacgtcaattcgatattggcaaaataaaactataaaacgtaaaaagggacactaggatttatagtagttcaccccatatagtcaggaccggccttaggctaaggcggactaggcccgcgcctaaggcccactcctatcaggggctcaaatgaaaaaaaaaaaacttttaataaatatacaaatatttttaataattttttaaaatatcatttatttttataaaaagggccctaaaatattgtttttcctaaggcctaaattaactcaaggtcggccctgcatataacgatagtaatgaggctacgtactttgtattttattaattggttttaagacactattatgttcttaagattgtgtatgacaatattacaaaaagaatttatgggtgaaatttatgtccaaatctatgaacgatggctgatgggagacaaacaattcataaatctagtaaaagtaatggtgagaccaatttttcttggaaacaatagcagggaagaagccaaaaagagataatggtctcttatcctcggtgaaatcgtgtttcagaatgatgaaggagatttgttttaagagtgtcaatggtgacttgaaggtgagacttggtgcatcaagaaagtatgtgaaagaaagatcagaaagcggtcccctttttctaattttatcactatgtatatataggcctagagttgggttgtgagctcccacaatccaaggaactacattacaattaataagaaacaaatacaaaatagcataaatatattgagaagatcccacaagtataaaaactatgttgtgattaggtagttactctttttcttttaagttgcttatgtgccaaaatggcttcttccttgaagaatagtgaaagtggagagaatggtcacatcttggtttgagggagagcactaacacaatgaaggtggcacaactctcacaatagcctccttgtggtccccacttagtgaaaccaataaatttacgagtaaagtctatcagcctgtcttgtgactaaaatttaagccccaaaaatattagaattgtgctatgacaatgagataagcttagattcatatcaaaaagagatttaaaacgtaagttgaaccaaattatttggataataattaagatttattatataatatgagttaaccagatagtaatgagtaggattatgatcctactaatttaatatagtgtgagttataaaagtttgtcataagttgataaataaacgtaatttattaattactgagattttataagaatacgtggggtattatgtgagttatttgtgaaataaaaatattttcaagtttaacgaccttatttagtaattttaataggactattgaggtaaattaattttaaaattatcggggtacttcaggatactcagggttgactaaatacgctaaggttagtcttttcttaatggccaagaaaagagataaaataatttttactattaaattaaattaaattaattatattaaggtgaagtatatatataaatattacataaaaagtaaaaaaaaaggtcaaaaccctcatcttgcttcttatccttcttctctcgagcaaactaaaaaccaagcaaaagggtccaaatttgttgagttctctctgtccaaaaccagctcttctgtatgttaatagcgtctagaagtgaagcaacttataatgggaagctaaggtaaggattaattcatttcttctttggaaatcttaagtttaaaagtttgattatgtgctttctggctattgtggagtttgtaagttttgggttttatttctagagtgttttcagactggttttgatgctcatttaataggtttgcagttgtggtgaggtgagagtcaagttagagtttttcaactcaaagcttgagctctctggtaactttagtttaaaggcacggttttgatttctggcatatagagattgttataatgatgttgtatgattattttatgaagtttggaattaattggtgggtttctcgtttcctgtagaaaatggcagactgtttttggaaaaacaatctaccatttttcctactaggaaactctgaaaataggttaccatttttggtgatgttgagaaccctcattttctatattttcccgatattcagggtattggtactatagtgacctataaggagacttacgctgatgaattaaggacctaaacggattaggtcaagtgattttaatcttttatttttcgttgttatgacacagggctcgagatcgttgatttttctctatttaggtcgaccgacacacttgaatcgaaactcgaggtaaaaaaagtacatccgtaccacatagcatgttaagatgcgattattattgttatgggtcgattatgatctcatcaaggaaacagtgattaccattaagcagattaaagttatgacataaatcgaaacaattgtcaggtttcttacttgttgattgtcttattagataaagacagagatatatggatgccgagttagggcatcagtgttgccttattaggcaataagatatatggatgttaggttaggacatcggcgttgccttattaggcaatgagatatgtggatgctgggttagggtatcatggttgtcttattaggcaacaacagaaatagttactttatgaagtaacatatatggcttgtcttattatacatgtacttgagtattactgtttaatcatgctattaatctaatgtagttatctatttgttatacaattttatcgtttacttttcttgttgagtctttatgactcacgagtgctttatggtgcatgtaagggcaaaggaaaattaggctagccatgagattacagtattccccggtaaatttacatatcaacttatctgacttgtgtggtcgagttgttaagaattgttttgggttgcacctgatgtgtatttggatgtactcttgtgttggaaatattttaccannnnnnnnnnnnnnnaccaagtatgtttgattaacatccta

SEQ ID NO: 161310 - DNA, 4012 bp, Cannabis sativa
ctctctctctctctctcttcttaacatcacacctgttcataatttttgtttgcactctatacaggttttggatgaggcagtagttaggcattctataaatgttgattttagagagagagagactatggtctgccattaacgtcagaggaaagacaaaagagagaaagagtgaatgaagtttgatcatattttgttttttttctcttaaatttattttactcaaatctatgtttttaaaataaattttatttttttatttattgaaataatattaatttgaggtggcctaataatatattaacatgtgtcagtactaataagtccaatcaacgcttaacaagctagtagtaacggaaatataacttaaggtatttaatttgtcggaaaaaaagatggggtatataaatgtatgaaatcgaaaacataaagtatttatgttgcaaataattctttttaatatgtcttatttttagccaagtctatatatcacgtattcgggcttctcatgtcgtattctgctgaattttatattttttgtgccatgtcatactaacttccaatataatgctatgatgtgcctaaatctatatttttttttttgtcgagtcatgctcatgcctctcagacttcatgcctctcagacttgtttcgatcttgtattgtattaaaaagctcgacccatgtttataagactacatagcactgtcttttaaaatattggatcccaatttaaattaatataattaatttagaaaccaatttgtggtgcatatattaatttaagtggaggtttcatcactctttacataatgtaatgatcaattgacttgttgcttgtggggttatcttttgaccttcggtgagattgagccgagtgttcataacaaaatcagccaattttacaagcttcattcaaactgatattgccaagcataaattattatcaaatgaaagaatataaaaacatgtcaaagcaaaataattttaaatacaaaaaataaaccccatttaaaaatacgtactttctatatactacgagtgcgaatatttcatcattagattgattcaaaattgtgtatattttaagtcttaagataaattaagcaacaaccaacccaacttagcaaactcagccttgaagttagtccaacaaaaacactatcaattttactatccaaattaagagacttcaattacttttttttttcaaataaaggactagtgaagaaaaataaaaagaaagaagagagaggaaaacttggcaaaagaaaaacttcctttttttttattccacatgataaagacaatgaaagcacaaatagaaaaagtttgaacatgtcatctctctctcttatctttcccaaaggccttttagatatcatttgaggtttgagatatatctacatagtaataattttgtactcacaaattacacccacacattatatacatcatacaatattttaaattgagacccacaaggccttttagataccattatttgatgtttgatatatatctacgtagtaataattttcgcactaagaaattacattcacacacttgttcccatccccgttaaggattttaatccacatcctcgtttattcttcatcagggatggggcgggaaatcccctaatgggggcagagacagagcagggaattccctaatagaaaaataaaatttataatatacaaaaatattaaaataaataaaaattaaaatattacacattaattattattcaataaactaattattatccaaaacacaacttaaaattataaatatactaatatactaataaattataaacatacatgttaaaaaaaaatacaaacataaattataaattataaaatattactaaatatataagataaaatactaaatgggtctccatttagacgggaaatccccacccccattaggggcgggtccctgcgggcccatccccgtgggagaaatgtgcatccctacacacactacacacaataacttgatgggtttttttttttgaactaatcataattatttaaattgggattcactatttttttttaaaaaaaaagtaacacactgaatgtaatatatagatatacatatcatttgtcacctctccattttagtgttagtgattcgataagctttctataattcttgtgtttttttttttggtcttatgttgatgaagtgagagagttcaagtcattttctaatcctgttgagagtggtgagactgagatgtttaaattagggttggtaatataggtcatcatttgactcaaataccatacgaaataaataggtttcggcaacacgtttgatgatcatgttatattcgtttatcttatttgtatagtgtcataattgtgtcaacataaaaatattgcgagtattaaacatataaaagaaaagcatgcaaaactaacgaatacttactcagaataacacatactcgaagaaataagtaaaaataacaaaaaagtaagcaatgacacatagaagtatagtggttcaacaaagtttaattcacttagtccaatattgttcagaaagtattacaataaatgaaataaatatattgattataaataaatcatgaaccaattttggttgtttacattaattgatggaacgcctgcgattacactacactgatcacatatcaagcgttctatattgattaatctcaaacacacgggtttgaattgtttattgcatatttaaatttgagtcatacgaatacaaagatatggtctttgtgtaagttgcaggtgagaaaacactttgtcctcgcatatctttagatatgttgcgactctcaatttcccgtgtttgactacatctttgtaatatgtctattctaatattgcgacaaacattttattagttttggttgcttatcttctcacaaattatgcgaggtgtgggaactgttccttaaacacgtcatccttactcttgtgaatattggtccatgcgtgtttttattctcgagattgtactcgttttatagatgaaaaaaatcatctaataacaaacacatttcataatagtttcatctcataagagtgtcgacaacaacatgaattaattactgttgattcatatatttttttttaaaataattcatgtttgtttcgataatcgtgttattgcgttcatgtggcctattaattaatcgttcgtattttaattagagtttgagttttagacacatttaataaatttttcatgtttatatttaccttaattttgtgttggtgtcaacacaagcacaatataatgaggaagtgccaattttagtttaaataagagtcaataatttaaataagattttaaaggtggattaagttcacaatattaaataataattttttaggaatttcactgaatatttgatttattttgtttgaaaatacaaattttagtgcattaaaaaaatttaattaagtgttttattgaatatactaagggagccacttatgatgataaggggcttccagcccttccaaaagaatatatatatatatatatatataattatatatgtaaaaatatatgagaaatttgatcaaccatgcttaaatgtattacatggtttattaatataccactttatcaaacatcaaacaaaatgtgctactcttctttttagtactaattatacccctcaaataattatatatagttatggtatggttgccagaaacgactcaggttttgtcattgatgctaaatctcattgctttaatggtgtcttcacaccggaggttgttgagattatgggtatcaaagaggctctaagttggatcaaacgacaaggttggcaacatgttgttctgaaatctggcagtttagtctctatccaagctattcgtagtcgctcgcctctttgttccatttttaggaatctagctcaagactgtcattctcttatgctttctatgcctttaataaaagtccgttttgttaaacgatcagcaaaccgtctagcacatgttgt

SEQ ID NO: 161311 - DNA, 6426 bp, Cannabis sativa
ctctctctctctctctcttgtggtttttcgtctatttgtaatgagggagtatgggcttttgggtcatgtctcaacctcttttaatttattgatatgtttttttgtgctcacttttgattattttcaaagaagcgtccttctcttttgatggtaccatcttttttcttgagtgtctttcaagaccctcttccatctcttcttaagtgtctatttttttagggtaaagggttgctcgaggcatgtttcttctttttatagcgactaagggtagctaatgcttgtgcgtataagaagttctctttatcccttcttgcccctagtgtgtagcaacatttatagtgctcgacacttaaggtttttttttttttttgcaaagacccttctatacagggattagaggtcatcgaggtaacctctttcttgcttaccattggaatggtaaatttacttgggcgcttggcattctgagttctaagtattgaagtaatataatgtgtgtgagctagcaatggtcgaggcatatggcttgaggaattacttgtagggaattttcatcaagtataacactattctattcttgtatgggtgtcttccttgattatagcaatgatgtactggtgtctaaccttacttgtggtcctttacacttagcacctccaccagtgtttggggtctgtctctacatcgttaggtctcttggagccatggaggagggatatagatgatggttcaaaacaacttagcttcttgcccctagtgtacaatatatagtcgcctctaaatttctttaaatgtttcatcctcttggaggaagttttttgcgacgcaaaggcgaaaggggcgaggtggtgtaggtataccttattggtgataactatgatcaatgtggatcaatggttaggctctttcaacttttctcatgtaagaggttcttgaggaatttgttcaatgaaagcctctatagtgccatgtgctccatgtggatgtcatagatgaacagtccatgaaggctcggggatgaagtatgtagacacgctcccaagtaaaggaaagtgttggtttacaagtggatgtccttctttgtttatttccctagtagcgtagaagagtgacttggtcctatgggacttcagctccttgtcttgtggctatggaggcttgtccctagttccaagcattgagagttttgtcacgtgatatcccttggggttttgcactctcatactggattttcctatagattcgtgcatgaggcatgtttcatgaccaagtttgtcacatgttgctcaattactttgcaagcatttgagaacatcagtgttgcctccgttttactcccagatggtgcaaacaacaatatgtcttttgaaaagcgccccttttttttatcttctcatctctgtagaaaatcttgaggttagatatataagatgaacaaattctcttacttgttctttgctcaggctatcaactataacaatctagcctccgcttagagcgggttgatctttattagtaagaaatctcgtacagcttgtcagagctctgggaccgttagcaattgggatatcgttcatgacttcctcttccatcaatttccacactcgactcttagaggtgggtgtttcttatatgctaattatagggtatcactagcagaacataaaggtatctttccatcacttgggttgtcgtcttcttttgtcttcctaccattggttgttatgcttatcataacatcatctttattccactatattcgacttaatatctgtcatatgcttgtcatcatcacttttggcctcctacttctcgatcgaggtttaatcattttctcacaacgatatatattgtggtttgttcattttctggtcttagaattcatacggtcctgagtttaacctttttaaatcaagcaaaacgaacactgtatgagggctcacggggtccctatgtttccttttggcgagagataaatgagattcttgtctccttcctctcgtgcactgtaccgtaataaagaggagtgaggccccttgtcttacaaaggggcaagagcagagtggtgatagagttgcaggcaagaggtatggacgtacggaggtgggcacggtgctggcagcacggggaggcatgaggtgagtagaaggggtatttatagttgggttatgttggccttgtttacaaaatgagctttaggtggtcgctatggggaccatgtactactctgatggcaggtggtagtgggctggagacattcttggttgggcgtcaagtggtactgagtgttcatccaatccaatccgcactattttgctcatagtgtatccgatccacactaagtgcggattttattttttggatccaatccaatctgcacaatagttaaaatccaatccaatccaatttgcaaaagtgcggattggatcggttattttagattggttactttttaatattaaataatttaatatttatgaaaaaaaaatgttttttttcacataactagcaacaaaataaaataaattataattattttatgtctccaacaacacattaaaataaataaaataacaaattcataggaagaaaaaaagaagtatgtataaagaaatgtactacttttattttaaattgtatttagaaaaaaaaattatatataagaatagaatatacatttgatcaattaagttttgaaatataattctactatatgcattagacttttaaattactattttctttacattaaaatattatttatatataatttttttttttaatttttttatgaaaatgtgtggattggattggatcgattacttttacatgtccatcaacatctaatccgcacaagtgcagattttgaattttccaatcgcacaaggatcgtgcggattggattggatcgactattttatgaacacccctaggtactgacaccagcacgcctccactacttgtaccaaatacatgcccatgtacgtccactactttgtcttagcttttgcagctatcgtagttgtgctttctaacccatcctttcttaagcgtgcctttaattctctttagaatctctcatcgtatctcaaggtgcttgcttcctccctttaatcccatctctaatggcttctcttccaacgcttataagaagatgcctttttggtggcgatgaccttttggtggtgacacccttttggcttttggaagagatccctctgttcaaagttgtttactttggtagcacgttgttatgatgtgataatgagtgaaacctcctctcgctgaagagggcagcgtggagagattctctctctgatgggggcagtgcaacacaaatgatggtgagagattctctcgctgatgggggcgaggcgacacgaagacagtgaaaaatctctcgctgaaggggacggcacgacactaatgattagcgagagattctctcgttgttgggggtgtcgcggcatggagctccagtaagctccttggtttcatgcctcttcctttctttcttttctccaatattgatgtgatccctatacttcttcttaataaattttcggggttaaaaagtatgctcttcattttctcatattattttctcacattttctctctctcctccttctctttcatcactttctcacttatcattttctcacattattttctctttcctccttcactttcattgctttctcactcatcattttctcatattattttctctctcataattttcacacattattttctttcacactttctctctcatcactttctcacattattttctctctcctcattttctctctcatcattttccatgttatttctctttcattattttctcttcactctctctttctctctctcattattttctcacattattttatctctcatcattttctcatattattttatctctcatcattttttcacattattttctctctcatcactttctctctcatcattttctcactattttctctctattcaacgtctgggtctggggttcgtgtccggatctggggccggggccaattccaggtccaagtccgagtcgaggatcggggtccaggttcgtgttcgggtctgggtctgggttcgggtcgagggttgggtctaagtccgaggtccgtgtttggggctgatcgagtctaggtcaagagtttgtatttgagtctgggttcggtttcgagtttgggtttgggtcgaggtttggggtccagggccagggtcgggtctgggtccgtgttcgtgtctgggtctgagtctgaattgggatacaagtccagggtcggggccggagtttgggtctcgggccaggtctggggtccagggtttgtgtccgagtcgaggtctggggccgggtcaggtccaggtccgaggtccggatctgggttcgggtccgactccgagtcgaggttcagggttcgaggtccgggatcggggtccagggtcgggttggggttcaggtctgggtcctggtgtggtcttattcatgttagggtcttaaagtattgaagcatttttcaaaaattaaaaaaaataaaaataaaaataattttttttagaaaatattaaccaaacgcaagtcaacttgtgtttaaaaacttcaaaaggtgtttttcatttttatttctaaaaatacttttgtaaaaataaaaaacaaaaaaaaaatattaaatatgctctaaatttttaatgttcaaaatgatactatttaagagtagttggttttgcgcaaaaagagaatgcataaaaaaaaaatagtagcatatgtcattgtagacatataatgtttgaatacattatatcatgaatatataccaacaaataaaaatacatatcctatgatactccaaattgtattattttttaattattatatattttgcaattaaaatttgagactgagattttgtcaatcaaacctaactaattccattacatataaaaaactacagtagtcaaaatttataatgaccgaactcatggtcagtaaaatgaagaaaataaataaaaagttggggttcatatgtgatttgctttattaatttatgtctactaataaaattttaacattatcaattaaaaaaacatagtaataagaaaggagaattagggtgcaaggcatatataatacctcatttgctaccatttcaagtaatgtgaatgaagactgttctacaatacatccaaatcatataatgatgataagaaaccaattattacatgtagcttgtcacaaccagtactagtgtaacttaattggccaccaaatgcctatattaataattgctaattctattatttgtgtacgtggattaattaattatttcttgaagtgacaaaataaatataatagaaaaatttacattgcacagtcctgaaaaaaaaggttgttttttagtttgttttaataatttttcagtaaatttcaaatagattatagttccgaaaataaaatttaaataattatttagcatgtatataaaaataaattaatcacaagtgcaacaaaatgtatttaaatctactaactattcaatttttttgaaaaaaaattataaataatcttaaatagttatcatatttaattatataaatatatatataaattagagtaaaaaatatctcaaggttaaatgaatgacaactgaattaacatgactatatattaattaaggataaatattattttgaattttgtgttttgtaaacgttatcaattaaatctttagttttattaaatgttaaaatagaccatatattttttaaaatagtaaaaattagatactaaattgattttttgttaaaataactctttataataatccgatctagagatgttatgacaaattgattatatttttttccatatgttcatgctaggaattatcttcatgttggttatattaagaaaaaaaaattgtaaaatatttagcttagggttctatttttatcattttcgaaaatataaaatttattttataatttaacaaaatagaggatccgattaataatttttataaatttcagaattggctggcagggagtttgtaattaattgtagttacgtacataaacaactatttgtgatgtgagtaaaacgtagcatttgtgatgatagaatatataacgtagtgtgaggtgaggcagaccgaatttgattttctagaaaactttggggaaactaaaggagacttcatcataatccttaagaataatgcataactacttaagtttaattcttaattctaaatagatatttaagtttaattttttgcggtaataatacctattataattctaaaacttttgtaagtatctagctattaagtatcacctaaattattatgtggtcaatttttgattggttcaggtcattaaatttttattttatttaaaaatt

SEQ ID NO: 161312 - DNA, 4213 bp, Cannabis sativa
  modified_base (641)..(645): a, c, t, g, unknown or other
  modified_base (900)..(900): a, c, t, g, unknown or other
ctctctctctctctctcaaactagaaggatccaaccccaagctttcaatttttttggaattttagcaagatttcaaggtgtatcaagtggagggcatccatctagcgcgtggttttttgtttaggtcacttgaatttggaaacgaggtaagactagcatagaacgtatttagatatgaatatgtgtatgcatgatatatgcatgctatttatgattcggatactaccaacactcgtacagtagcggtactgagtgcattggtataatgtatgatgttcaacgagtacaatacggtattaccaacactagtacgattgagtacgaagtgtatgtggtataacacttagtggtatcgaggtacggtgcaaaccctgccaaaactcatacagtagcagtacgtggtgcatgtggtacagtggtcgtaccttagtaaagaatgttcttacttatttgataagccttgtggataggtatataggcgcctaaatataagtcggtaatatattatatgctatatgatttacatggttctgattcacatgatttatttcatgattatacctaatgtataaattctattaagtccaaaacatatatatatattcatgattatagtatcgtcagcacagtggaatataatnnnnnttatatgttcaaaagtttaagtcccataatttgtcagtacactagatttagaccgacatgataatcgacgataaggtatacttatactttagataagtgttatgtcatttccagagcattggtaaagtttactagtattggatatatggagtatacattggattagaccgatatagaccttgaataagatatcataaacttatcgttatatctttttaagtcaatattactggttgatcttaggtctatagatcntaatcctgatatggttaggttcatctcaaatatattatttatgttcttcaatttattcgttaaagtggaccaattggatcttctcgtgacttataaattaaggacatggtaattcaattgagtgggagcgctaatcatagatgaactaccattttacacaagggtcagtaactatggctgagattcttcatcaaaatgtaagttaatatataatatttctattttatgaagtttactttaattgcaatttcctaacaacttatatttatcagtaaggaaagagttacattgagactttgaaagtttgtcatacaaagaaaggcatatacacctttgtcaatgaggttgccaaaaatacatatgtaagactttataaattatttttcaaatatattcaaataattacaagtttggttagcttctaacgtattcttattatagaaagagatggtgacaaactgaaatagtgctcctgaatctacacaagtttctgagcttcagatacttcggtagactcttggagagaggtgtggccatcagcaaggagtgggtcaaaaattgaaagggcaattatcaagacgacagttacaaactacaactactggtcaacctgacttacaaaacggttattgagatgtagagacaaatacaaatattaactcaataattgtcacgtgaaggttgatcaaaatggatgttgagatgaatgatgcagctctaacttaaccaatgtgtcaacaaccgtctcactctcacatgcatggagatgaatctggtccatctttttagccaatgggttttcagcattagcagccgtaatagactcctatttcgttttagcaatacatcagcctcctgttccttcgtctgcaccattaacccctgaacagtttcacagtcagatgtacgagtcattcttgtagtttttggcacaatcgctaaacaattcgtaagtaatgatgaatatgatgacacagtcgtcttagacatctcaggtgtcacagtcacggatgccacaaatgatgccgacacaacaaatatcacagattccgtaaattttttagatgatgtcgacaccacaagggcagcaatatcagtagacattgcagatgatactaacacaacaagtgaagcagacatctcagatgatgctaacaccacatgggcagaaggcatctcaaatgatgacgagtttgcagatgccgccatactacccacaaatgtcgaatgttcctagagatgcttgtgatgatgacgacgctactacaaatttcttttagaatctatttttaagtttaatgaactatcaattttatgtttattgatattttatgaacacccactttatgcttttagtaagcagtatttaatgataatgtaatgtttgtaactctaaatatttactacaaaaaaatatttacttttttacttttaattaaataatttaatacattaattaattaaaaaaatatttaatgtaatttaattttaaaaaaaccataacagatttatttatttgaaaaaaaaataagcctaacagtgacgacaatgtcgtcattgataatacaatcgatgacattatcgtcattaatttcccaaaatagtaaaaaaaaaaattatttattatcaatgagaacattatcgtcattgataattggtttcgctaacgactttaaatgtcgttattgataataccttttaccgacaaactattccaacgatttgtcaccaacgatatgtcgctattgataggcattactgacgaaaaaacccacttcactgataaaattcatcctcattgatggctataattcttgtagtgtaaataatgtatttaaaataaaaagataatattatataaaagattataactaatttttgttaattagttatatatatatatgatatttatatttgaatttaaattttgaatttgaattaaaaataaatattatcttttattttataggattaaataaatgagtttatttataactttttatatatgatatataatgaaaataagcatgatttgagagagagattagtttttttgttgaaaattaacgattgaattttttaaccctctctctagctcacacctatctttctctttctaccttgctcaagcatcactctctcttgagggtgattgtttgtttttcaaatctcaatcacagtgtctcatgaattgagtacacactgtgatcagaaaattatattcatccaattaaatttaatagcccactctattcttggagtgttgaggctaacttagaagaccttggtgtgaactcttcaacaagtcttactggattggatgattgtttcataaatacgaaaaagatagtgaggaaactctgataggcaacaagaggtgaaaatctctaaactaatagttagatttatgttatgtataaatgtgttgagatccacggtttatggttcatattgtattcaacattttttttattaaagtctattgtattctctttcgcagcgactttgatatgaactctaaagcccaacaagtacgtggtcctttattttaggggtggattgttggggtaatcaacccaagtcccacactagaagaataaacaagagttgccttaaatatatgtgttccacctactccattagtatgaggtctttttgaaaggtgtccaaaaataaaacagtaatagcttatgcccaaaacagacaatatcatattaacatgggagttaaagtgaagtggtggtctaacaaggtgaaagagcgaggtcaaacaacctacaatttaaaaaatcaatattctcattctcttaatgtatgtatttctttgatttaggatatcttggttaattaagtaactctcaaagattagtcttcattaattacagtacattaacctttaagtatttaaccaattctaacatatgcaattcatcaaatggtggtagtcattatctgtatagctaatgtgtacttcctcaacaaaaatcaagtcttttacaagcagactaagcacataaatgtgagataccactttattcgtgacataattggataagaaaaagtcaagcttaagaaagtttcaaaaatacaatccttcaaatatgctaactaaagctctttctggggcaaaatatagacatttgttattcttaggtacattggacgcctaggtggagaattgtagtattagtagttagtctatctgaaaaatcgtgtttttgcaaatgtcaattatatataagaaaatataaacattatgcgtctgcagaagcaaaaagtaattctgctataacaaaacagaacaggcagaata

SEQ ID NO: 161313 - DNA, 6550 bp, Cannabis sativa
cattttccctaatcttgaaactgttgacatgttatgtaggagtttggccagagtcaaagagctttagtgataagggattaggccctgtcccgaaaagattcaagggagaatgtgttaccggcgagaattttacactagccgactgcaacaggtattaaaccttttcctatgatgaacaattaggctatgtttggaagttgggattttggcgagtgaaagaaaaaaataatcaatatttcatgtttgatatgaaagattttgttgagtcaactttttttcccataccaaacatgaaaaatagctctttctttccgaacaaaaatccaacatccaaacatagccttagtgaataattcattggaataagaaagttaataaaagtgatctatacatacctgtaggaaaattataggagctagattctattacaagggattcgaagcagaattcggtgctcttgaatcctttggcaagcccttctttcgatcagctcgggacagtgatggtcatggatcacacacagcctcaacaataggaggatcagtggttgacaatgtcagctatttcggaatagcaaaaggcacagcaagaggtggtgctccaagtgccaggcttgctatctacaaggcttgttggtttgatttatgtagcgatgcagatattctcgctgctctagatgatgtaattcatgatggagttgatgtagtctccctttcgctcggtcctgatcctcctcagccaatttattttgaagattccatctctgttggaactttccatgcattccagaaagggattttcgtttctgcttctgctggaaattccggtcttcctagcactgctagcaatgttgctccttggatcttcactgttgctgcaagcactgtcgatagagagttccctactaatgtctatctaggaaattcaagagttctaaaggtaaatttagcattctcaaaagtcgaaacagagctgttgaactaagtaacatgttgttaaccgaaaaaactgaatgttgtggtttcagggttcatctataaatccactgaagatggacggctttttcagcttgatcgatgggagtgctgcagctgccaaaggtatcccaagtgagaacgccaggtattttttcgtctccaaagctcccttaatagtttcagtggctcgaaaagctcccttcttctctaagctcgatttgttttgctttgtctttcagcttttgcaataacaatactctagatagcaacttaattaaggggaaaattgtggtgtgcactctcgaggctgtcacggatagcagaagagaaaagggcttgtttgtacaacaaggcggtggagttggaatgatccttatagatcctgtgctcaaagatgtcggttttcagtttgtcatccccgctactctgattggtcaagaagcagcaatagagcttcaagattacattaagacatcaaagtgagttttcaatcttaacatactatactagatgatgattctaagatgacgacaacgacgatgatgttatttctactccacaggaatccaacagctaaaatcggtagaaccaaaacaattctacacactaaaccagcacccgaagtggcagccttctcttctgcaggaccaaatattataagtccagacattatcaaagtaagtcatataagttagaaataaatttcattttagttttaagcaattcaacatgatgtactcaactatatgtattcctctttagcccgatattacaggaccaggagtgaacattttagcagcatggtctcccgttgcagttgaatcaactggtggaaggtctgttgatttcaacataatctccgggacatccatgtcttgcccacatgcatctgcaattgcagccattataaaatcctaccgaccttcatggagtcctgcagccataaaatctgcaataatgacaacaggttaaagcagtgattataaagatagcaactttatcatttttgtgattgaatgagctataaatttgtgttctttttctgttgttgttgcagcaactgtcctcgataacactaaacgcctcattggaagagatccaaatggcatacaagccacacctttcgatcatggatcaggacacataaacccagttgcagctatagatcctggacttatatacgattttaattctcgtgacattatagattttctatgtagcaccggtgcaagcccttcacagctgaagaacctcacgggacatataatctattgccagaatcctccaataccttcctacaactttaactatccttcaatcggtgtgtccagtctcaatggaagtttatctctttacaggactgtaacttatcatggaaatggctcaactgtctatgttccatgtgtggattccccgacaggtgttaatgtggcagtttacccaactaaactgaagtttacaaatgccggggaaaagaagacctttaaagtcaaactcacccccatggcaagcagcaatggaagctttgtgtttggagctttgacatggagtaatggtatccataatgttaggagtccaatcgccctcaacgtagtttaatcatgagaacaagtggttcatagcgatttcggttattaatttatagaacatgagctagaaaatttggttttgtaattggtcagagattaaaacaattacaaatatctatctatctatctatttaaatcattatgcaactgtcctgaaatttaattgcagttaaatactttgcaagttttcatatctgaattcatagtacaaatacttcataacatccaaatgcaattgacaataaatccattaagatacttaaaatcatatattcatgaatttatggcaatttgactcgttcgatgagaatgataagaaccgaaaactccaaactcaagcacacaataaaacagtagcaaaataataggaataatatatcgaatgtatgagaaatccaattacaaggagctcttaggcccttctgatgcaaataaagattcacttaatacattgcgtaccttatatattcactaactcacctatatatactattctacataccactcaattctcctcaatgcacttagccacatctcttttatttgctatactcaacctcaccatactaatactggggtctatcagagaaaaacaaaagaataaaggcgaaaacattttcaagtgcaaagtttcgttaccccttaatattagtctcattagtataacccggaataaaagaattctattagactttcccgagccaaaatttgaaatgtaaagttatggtcttaagttttttctcttttttaagatacatggatccttcctttcttcaaacggaataaacagagatagaatcagactgattccctaaatgccttagtattccttaagctaatcattaagcatgaaacacattcaaactagtcatagaggaattgttatactaaccttccatcctacttaccatccttctaaaagaacatggtgtaagattggagcatcaccaatagtccccgcaagagcaaacaccgttcttaaagtggtgaaagcggtttgaatcccttacaacaatatatctctcttcaatcaaagatattaacttcataacattgtgacaatctccacatactctaaggtttttaacaatttggatgggagttcccggaggtgtagcaattaagccaaaagcgatcgctagcctttcactgtgttgagaaagaatggctgctttgtgttcctcttcaacatcatgaagtacataattcgtgtcaggctggtaacccatatcctttaaccgaatacttagttcttcaagctttgaatagatttgctctgccacaggatgtgagagatcaccagccacgaacgagtaggttttgtttctcacttcaatccaactagacccggcttctttctttacttttctttcatccatcaatttccttactacagctctctcttgccagtttcctgatgctgcataaatgttggacatcagtacataagcagctgagtcttcaggttgaagcgaaatgagcttttctgcagcaatttttcctagctctaaattgcgtcgaacatggcaagcagacaagagcgttcgccacacagttgcacctgcagggaaaggcatttcgtttatgatatccatcgccttttcaagcattcctgctcggctgtatagatcaaccatacaagaaaagtgctccattgttggattaatgtgatgatctctaatcatcatgtcaaagtatctttgaccttcatccactaagcctgcatgagtacaagccgatatcacgccaatgaatgttataccatccatttcgagtttctgttttcgcatatcctcgaatatctgaagagctttcttcccttgaccatgttgtgcaaatccagatatcatcgagttccaagaaatcaagtctctatcacgttgccttgtgaaaacttcattagcgctctcgatatttcctctctttgcatacatggtaacgagagcactacttacacataaagcattattcaatcttgatttgattgtcaatccatgaaattgtttaccttgttctacagatgctaaagttccggcacaagcatgaatcacactagaaaaagtgaactcgttcggtctaatcccttccttcaccaactgaagaaaaatttgtacagctccatccatttcacccatttgagcatacccagctagcattgctgaccatgtcacaatgtccttttcatcaattagctcaaaaactttggcagcttctttaacattccccattttaacataagcatctaacaaagaagttccaacagttgatgatatctcatagtttgttttcacaacttgtccatgaacttgtagtataaacatcggataatgagccataaggattgtagaataagtgaaatggttcggcctcacaccgtccctactcattcgacaaaataaatccactgctcgctctgttacaccgttctgcaagtaaccacttatcaaagcagtccaagttaccacattctgaacacctttcatcgtcgagaaaatcttaaaggcatcatccatttcactgcatttactataagccaccataagggctgttttaatattatgatcaaatcccaatccacttttcgaaacccaacaatgaagttgcttagcaaaacccaattccttaagtttagcacaagacttaattacagaagcaaatgccggttgtgtgaacttctcacctacaacactcatccaatgaaacattttaaaagcttcaagatcaagcccatttgtaacataccctgcaatcatactattccaagtaaccgcctccttattctccacactatcgaaaacaactctagcatcatttatcaaacccgatttcgaatacatattaatcaaagagttacatacaaatgtacttgactcatagccattctttactaccaatgtatgaaattgacttccctcctcaaccaaacctcgattcgccacagccccaataacagtagctaatgtcaaaggattaggctttaccccactagcaaacatttgacaaaacgaatcaggtataagatcattcaatccatttttgacataaccagtgaacaaagcaatccaagactcaaaatttctaaaccccatttcatcaaaaactctccttccatcaccaacacactcagttttcatatacatatcaataagtgaattcccaacacttaaatttgcctcaaaaccagattttatagactcacaatgaacctgtttaccaccaacttgatcaaacaagcaatgacaaacttttaatacacaagaaagagtggactcatctattggaaaatcacaactatgaagaccaacaaagagattaagtgcttccttgttccgattaccgcgggaataatcgaaaagcaagtgattgtaatctgaaaggtctgttcttggacttttatcaaacaggtggtggacactttgagaatggtggcaaatttctttaatagaagagaaatgtctgatatttaaggattgggaatgagaacccaataaggacttatggagcagagtttggtttaacagaattgttcgagagaaattcatggtgtttttggtatcttcttctccaactcaaggcctttggaccaagtgtcatatatgatatttatatcaatgaattggtgggaaaatatgtatttatttttttttaaaaaataaataattagtttatattttgattgaacaaataattagtttattaaatgatagttataatattatatataatataatttaaatggatattatatattttattaatttcttttggacaaaatatattatcaattttagtattttacatttaataaaattaaagataattgttcaaagtttttatttagagaattaatatgttagggttcgttttacatgatgttgtattttatagtattatattaaattatattttatgtaatatttttacataaaattatgtgtagtattaatttttataggtacctaaatatataatattttagtataa

SEQ ID NO: 161314 - DNA, 7519 bp, Cannabis sativa
tcaacataagtaacaccagttaagcaatgtaaactagtgtatacaattcaaattcgtaatccaattttatattaggaggccaaacaattcttcatgaaatcagtttcctgtgccctgcaaattgcaaaattttaacacacgattattgtttaccaccccttaaaaccgttgtgtaatgaagataaatgagataaaaaaaaatgcagtaaattatgttaccttctaatacttaattttccagattaaagaggaatgagaaggatcaactgcgtaactaagacatggggagaaattatttgataatttatgcattaacaacttagatgtcagtaaagacagcagttccttttgcttgggctttttcctcttcagaacttggacataagcattcagtccaagccactcaacttcacagtttttcagatgtagaaccgggcggaggttagagccaaggcgcccacccctggaatgcatccttctctttatcagagaactcgtatacctatagaataaacaacatagttgctcaacaatagcacaagaacaaaacaagaaaagttattatacttttcacttcaaattttaaggaattgatatgcctaataagaaatccagccaatgtgtatataattagtccagacttcgtttaaacctcatgaagaaagataataaaattgtcagaggtgagggtggtggtataataaggtgagatgcatacctgaatgatttcttaataattttccaatagaaggcagtgcgaaatctacagatgtatgataagtcacagaagtagcagtgaaacttcattgcacagaccaaaaatgcttgaaatatatttaatctgacaacacccgcagagttgattttggaatcatagaataatggatgacatttcggcctcatatagctgcacaacttcgattctaaacgtgaaccaggtttgtcatgccaagagacagtcaggcttgaactcaaatggtttttcaaatgcctgaaagttttgatgaaatgagttactccagtcgcaaacttgtgacgcagaaaacacagggaattatcataagaaatctttcttccctaagaaaagtaagatgagtgtgccttaagtacaatgacaatgttttctttgcaagcaacacagtaataaatttcttacctaaaataaccatatttaataagtattatgcttactattcttctttaaattgaggttgcagtagaagtcttaactaaactcaaagatcaatgagtaatcaagtaataattgtggtagcacaagctctccttgtcacatgataaattaggattattattatggtaaaccatgacttaagggaaaaaagtatatagctgtatacagaaatttagtaacctggtgtagtctgcttggacttctaatgtgcaacaattgataagcaagccactccaacgtatgaatgagacaccatcttcaccaatacacagcctgtttgatggaagcttggatatgtggccaacatcaaaattaacagaaaatttatccgcattcatgtagcagttataatcctgaaatcctcttgataaccttgagaagaagccttcagcctgctgttttgaggtcgatacgaaaaggaagtcatcaatgaatctaagtagcatataacttgtgtttgatgtgtggatctgagcaccagaagcataagaaaagttatattgttctgatccatcttgaatagcagtttgacttatcctttcaagaaatggaaagatgaccttcctgtccatgtctccatagtataatgagcaaagtaaagtagataggacacttccttgagaaatacctacacgttgcaaataaaactttttatccaactgcagcacattgcgctttatatgctcatttaaatcaaataagagctcattcttcgtcacagtcttgctgcactcctgtgagaagaaataaaaaatcaaataaaatgagctttccaggactagaaaataacttccaaactacagagtttgaatatcaaaaaacaaggaatgagaacttcaagtaagtttacagcaatacaaataaatttatgaagcatccatagaattctctccactttatttcaagatccaagcagaaccttgcaagagtgtattcacttttgataccctcaatgagatatcaaactgtgtggatgagaagttaggaataatgcaaaggattgtattattgaaacatagaaataagaaacatttatttcattctctccaagggcaaagctcaaaacagaacaaattcctacataaccccctgacagcgtaacctaaaggaataataagacctggactttttccttaatacacgtctagaaatatttgagattggtaaaatctgatgtatatttccttgagtgaaatgatacattatatagcctttgcaagaagatctaactaaatacaaagatatacagatttaattcaattcctaaataagagtgtaaatactaaatatcaaggacagctatgaccaattcaggtaagctgtgatttcctttctatcaataacaaaataaattaaaattacctgattaacaagaacgctattagttgcttggaatgggataagagatgttgcacttgatttgatattttgatccagtaatatataatggtcttgaacccacaaggaactctttgtacagcgaacttcacaagactgtttaactgtatatttctcatccctgatgacatcttttattacagaaagcagcatcttctgttcgacagaatcaaaggcttttgctacatctgaaacaataatatagacgccaggaatgtttgatgatccatttttcagctgaatcagaaacggacataaccttctatagacatcattgtaatcaaacacagatgatcctaacctctcaggctctttcaactggatacctttcagaacagaatgtgtatcgcgaagaatagaattaacagacttgaaattgtgaaaactaattgtcttttgaaccaactgctttttaccaattctggaagatttatttttccaataagactcttgcagtggcattcttgacggtgcttttagatttgcaagcaaccttattctattttctttgggaagaaatctaagctttgagaaaccaaatcttctacactttacaatttctctagttgttgcattatccaagccaacatagctctgatctttcaaacagttagtggccatctttttcaccttctcccaaactgacttcttgtagtaaaacacatcatgtttcccacattcactttcagtgacatagaaattagcttgcaacaacggcacaactacatatgaaaagaaccaataaatccaattttctagaagtctttttctaatcctgtaagtagcttcattcaattcaccggatctactagtctttaaaatttggccctcttcatgttgtagcacctgattactcaaaaggcataaagaatgatcactgaaaaaataaggaaaagctgacgttttcagtttatgcatacattgtttaagagaaaatctttcaaatttccgaagctgaataaacttcgatatgtttctccttaatattctccaattagttggagttcctagcaattcaggaggtatgatactcctacaagcagcccatacaaatgaaaccacctgacttttcaggcaataagatttaattgcattggaatcattggcttgcagagaatttttgctctgatcatgagatttcttcagtatcttgttcttatactcactctcctgaaacaaaaagtcataattacgtttttttcccctcttggggcagagcagtggcaattaaataataagaactaaatcaagagtaaaatattttccacgtgatgagattcttgccatctgcaaggatacacctttttttttttcctttttctataacactaaatttaacactttaatctaatcaaaagaataaaaagtggtaatggaagaaaatagttatcaggtcccttgtatcttgtatcagtaatggaagaaaatagttatcagggcctctaacaaaatcatgtgcctctaaccttaaatgagacttcagaactctctatctcattttgatcatatgctgaatcaacacaatgcttattcaataaattcaagtgctggcaattctgagctctgcgaatgagaatcttgagcaacttcattagtgagtgatacctggaaattagagacgaaaaaaatgagaactataacagcggggagaaaaaactcatccttttatgatccaaagaaaataaaaagggacaagagccagaatcaaaatatacagatcctgataacatcctgtcgagcagcaagcctcaattaccccataatagaaatcaagaagaatgcttatgattagtgaacagaacaaaaaaaagcaactaagtagcagatatctttaataaccagccaaaaggtagaatatgctacaataaaatcattacaggtaaaatgcatgattaagttgagatccaaagtattctatgcttacaggcatacagaagcagcatctgagggagaagaaccaatattttgatagcagggttctctgttagagtcagccattataccagataagccaaagatactctcaagaaggaggactgaatcagaagtgttaggtttcaaagaatttagcacatctgataacattaaggcaacacaagcttaaaaacccatgaaaagaagaagaaccgtcttcaatattgtaaaactctataagccccaagtagtcgttaggaaagacaaatatggacgagtatacaactgcctgatctttaaagactcgccatcaacaagttcataaaaaccaaaaaatattaaagactatattggtgcagataaaacagtcgaaatacatatgggaaatgagcatacatgctgtatttacatgagcacaaaaggatacgtttccttgggaaaacagatgaggaggtttccgaattatagaataggagctttctgtctatttgagtctctttggtggttttctttggaacttctctcaccatataacagcatttccacaaattctgccagagaataatgtgaggcagaaaaatgatcctaagaaacatgatgcaatataatggaaccctttttttgttagaatgttttactgacaatcttaaataatatgatcagggaatccagttactaactttggaatgaaactttgacaactacggaacactccaatgattttcaaaaaaatagtagcaatgtttgacaatacaagcaagtattaaatgatgcaaacataaaacatgtttagatgattatctgggagagtgtaattaaagaaggaaaccaaaagaaaaaaaaaaaagcaagtaaaaccctgaagtagcaatacgcttttatgaattggcaaactccaacacaagaattggcattcggaactaattagagtaaactgtcaatcaaacaaaatataatagaccataaaaattaacagttaacaaatctgtagatcgtcaagaagttaaaaatgaacacagatagatagaaatgtctgcactccatcaaatgaaacaccttttcatggtaggagcaagcactgtagtctgagtcacatttttcaggaagcctatgtttatgctccataacttctgtacaaggaactatagctgttccttgaaattgtttgcgttttctactacgctgccaacgaaatggtcttgaacgctttcctaatagttctagactctgatttgagtattgttggacagactggctggaattatctccaccatttaccattgaatctaatttcatttccatagccgcttcagatgaactcatttggctatgtttttccgcatcattacttctctttttatagaaacaaacacaagtataagagcttaaaagtccatcactacttgacgtagtaaattgtccctgattctttgacaatggaatgacatcatcttctccttttatcttctttttggggcctgagatattatttgttgcgttattataatttacaagcaataacagaccatacaaatgtagacagaaatcttaggtatttgagccaatcatagtaaaacaacaaacattgcaatttccaaacatagaatcatattatcaataacagtaacagtaatcacaataataatgaagaataaaccaaccccacattcaaacgaacctcaatatatttatttgttatttatttatttattttttttgaaaattaacaaacctcaatattaatttgaagcataataatagagtttaacgactctgacaaaatcgaaatggacaaagttcaaagttgttaccgctttgagattctaacttgtgcttcttcattgaaaagaatagtttactgataggagaaccagctacctgatggtatctattgtaaactagtggcaaaaatatcgatgcatttttcagtaagtaaaccatgatttcctccccaacctgtcatattggaagatttacatttacacttattttgttgttattattattattattcctttttgtgtgggcgtgttggatatatagacaatgacataccctctgtagcaaaagacaccaagccggagtagttagaagctccaccaatggacttgactgagtatactgtcaaatgtatacgctcaaattcatacgtactacgtatatatataattgttacaaatacacacataaacaggaacaaaatgtgaaaaaaaggaagaacagttgagagtaccttatcgtaaccgctgcaaattacgtttgaagtcacagaatggccaaagatgatcatttcaatggttcttgcaacaatctgatgctggggccagtgcgacacaggggagaaacgagagattgtaatcttaggcgtattctccgaaatgaccacgaagcatcggtctagcagctttcgataatcggaggaatctcccggtcgaaggaggaacgacatgtcgtcggagagcgtgggagtagatgcaggaagtaaggaaacgatggtattggaaagcgtgcgcgcgcggctcccgaacaatctccatataacatccggaaccctagtacgtttcttgggcattttctcgggaaagttacgtgggaaatggaaatggaaatggaagtggagatgtttgcagggaattttgagggactcctcctgacttccccagcacgcagtcagcagtgaagtgacctggaaagtcaacattttaaactctctctctctccctaatactactctcccgcgcaaaacaatatgttttcttttagaaaatcattccaaatttatttatttatttttattttcaaggggaaaatagtacatatgtaaaaaaaatatatatatatgtggcattttatataaattttattttatttttactcatttataagatttctcattttgaaagaaagatttgataatacacttttgttttaaaaataatctcacattgttgaagaatgtgtgttacactagagagtaatttgcggcataacctgcttaagtggtcaggtgtttac

SEQ ID NO: 161315 - DNA, 1866 bp, Cannabis sativa
agagagagagagagagagatcagcgactagaagatggtcttagtttgtgattgcattggcggaggctaggcttttttgggcctgatgaagatgataaggtttgaagaacaagcagagagagaaagagagataattaattttaggggttattaagaacaaggaaaaaaatatattgtcaaataggatatatctttcgattaaggattaaaaataattagaataagactaacagtttggcaagagggtttttaggagggagggagagcaatggagggagagtggagaggagggattatatttctatgtgtttggcagtataaataaatggatggagaggagtgttggagggattaaaattcagttaggtcccaccattttgcagtcgccctttgttggacggattgtagaagagagggttaagaaaaaagggggaaaattgacaatttaccctccaaaataccattttgtttctctctctcataaatacttattatatatttattaacaaaatagtaattttattaacaaatcactctccatcctttcaattctccttctaataccaaacaaaaggattgaaaattatatctctccttcctaccttaccaaacaatacaaaggattagtccactcctctattctctccctccttaaattctccatccttttacttctccattcttcctaccaaacataccctaaatgtaatgaaaagtaagatggatttctagtgtatactgacatgtaggactaattttgacatgtaatgatacacatcaatattttttaataaaaatattaaaattttcaataaaattagaaggagaaatgagcacctaaagctaattttttttccctcctatatatgtgtatgtaaaattatttacgtacttatttttaatggtaacaaatcaaacttatgcaatattgtaacattatcaaaatttacctaccaataattggtacaaataagtattgataggcaaagatatctctacttaccaataaatatcggtaggtaaattattggtacgtaaaggtcagatttcttgtagtgagtacctttggcaactctagaggttccagctcgagaccttctcagtttgcaaatcgtagaaactttaatggttgaggttttactccacattctcacttgatttctcaagtgtgtcttaagatgggtcacacagcggtagtgtgtcactatctttttgatgaaaattagattactccaaaatctacaccaaacactcttagagctttcctcactgaactagaatctggccaagaaaattaatatttttcttctcacgtgttacctaattttggtgatgacttaagatggtttgtagatataggagcaacaacccatgctaccaactcagttgacaacctttattctgttatggtctacaatggtattaagacattatccattggatattgtaagaaacttctagtctctcgtgttggttcaacttgtttaccttcatctatttctactcacttatgtgcccaagtcttctattccatagggttgccttagaatcttcaagggtttctgttgttgtgttgtgacaatttgaaattggttctttctttaggtagatagacccctttccttgtagcatttcattatggtcatagaacctttgctaagttttatggtacatatttcaatcttactcataacaccaaggtcatctagcatacttatagaagttaaatttcttgctatgttaggcacaaatctttcccctgtaagagttcttacaataccatcatatatacatcttaaaactcacattacctgagccttcaatgtggcatgtttagttgttacctaagatgaccttccctcctttg

SEQ ID NO: 161316 - DNA, 754 bp, Cannabis sativa
ctccgatctcagtcgacacagcacgaaggatccaagagatgatcaagctgttacatcaggttgtggcaacctaccatccacaaacttgactttatttctcgcaactagcgcaaccaacattgatctcttccacgagctattattcttagatccagtcagtatttttgcaacgagcataacacttggatgatctccatgtgaaagatagtacgggcttctcggatcgtcaaatcttggattcgagtctgtagcaaaggatcgattgacattctcagagttgtcttcaacgttgttattgctttgagtttgagctgctcatctcttcgccatggcaggaagcagaaaaagaacaaagaaagagaagaaggagctcaagatcttcttggctctgataccaatttacaaaagagaaaacagagaaatcaagtaaagagaatgaaagaaagagattgaatattattgattgaaaagcaagaagtacaaagtgtttctatacacatgagcaacacaattctgttgcagaaagaatcagttagaaatagcaacaaactaactaacttttgacaactcactaactaccataatagaatcaaagctagccagtcttgataaaagctacaataaaaacgtaacatacaatatttaatccttcaagaaaaaaaataacatatagtagttaatttgtcgaaaaaaacatgtggtacatataagtgtatgaaattgaaaagataagatatttatgtcgcaaatattc

SEQ ID NO: 161317 - DNA, 3114 bp, Cannabis sativa
  modified_base (3069)..(3088): a, c, t, g, unknown or other
tgtgtgggggggggggggtaaggaagttctcttgaagcggttgtgcaatcaatccccacttatgccatgagttaatttcatcttcctggcttcctgccaagttttgcaacagtttggaaagtctaatggtgagattttggtggggcttcatattaaatgatcattctatacattggaaaagatggaatgctctttgctacagtaagcaagttgggggtcttggattcacatcttttattgattttaatcaagccttacttgctaaacaagcgtggcgtctgatggaaaatactaattcacttcttttttgtgttcttcatcaccaatattttcagcacaattgtttctttaaagctcgattgggtaacaatccctcttacacttggtggagtataatttggggctgagagttgcttactaaaggcttgatcttgataattggttaaggtacttcagtatcatatattaatgacccttggcttccaggcagcaccaattttgagcctatctgaaccttatctgctggttaagaccttagagtttctaatttaattatacctaatcgaacttgggacatgattgatttgcaacgaaactttactaactttgatattgatcaaatcttgcaactaccgttgagccttttccctttggaggatcattatttggtatttctctcccacgggagcttattcggtcaagacgtgataccacttggctaccaatttattggatctccacactccctcatcttcacaagatagttctcattggtagaaccgtttttggcatatgaacctccattgtaaaatcaaactttttgactggaaagttatccacaatgccctgccgcttgcagccaatcttcataagaaacatatcatacctgattcatcttgttctcacagcaacaacactagtgaagacctgaatcatgctttcttcaatagtaaaaaggccaagcaacgtttggtgattgctacatttctaggtagatcttgataaagcttcagcaactactagcagatacttcattcattctctttgtggattgtttgatgataagcaaatggagacaattttatgtgttatgtggtacatattgtatgacaggaagaacaattaccatggctccaaaactatgtcagctgatattattcttgagaaggctatttcttatccccatgaatatcacgaggcaaacaactcatctatgagtaccatttactgtctttctcaagatgcaccacagtgacaacccccctttacaacaccgttaaacttaatgttgatgcctccatcatttcggaagggaaggttatgggaattggcggtattattcgtgattcacagggactcatggttgctaccatcttgaaacctctacaagggctctcgagtgtcaaagaaattgaagccaaagctatatcctcttgccttcaattggtgcatgatctcagtgttcctattctttttattgaaactgactctctaattgttgcaaacaatgtgaacactttccatgatcaacccaacaggtttaatgatttgatttaggatattatatatcaattgtccttttttcctagtgcatctttaagtcatgttcctcggcgtgttaatactacagctcacgaccttgctagatttgctctacaggtggatactgattaagtttggagggccattattcttagtcctatacatgctattgttgtaaatgaacttattcattaatatacaatagctgttttctctgaaaaaatactttaatttgatgatcacatataattccttaaatttgatgatcacatgaatatgtaactcacatttctttttcacctttaaattagtaaaagatgttattaattatttataaatatgaatggatgatagctattgaaaatataaatgttagagacttgatttgttcatttataagttgtataaatggttcaaaattaagtgagagtggtttggagcactttggagaagaatcgaccaaagctgaaaaaaaaaagtaactagtaaccagttattgtttattgttttttcagcatatcagttttatatgtttttaaaacattaaaagcttctctaacagctcaaaacacatccaaatcatccagttaataccataaactttcatttgatgattggttacaactaagggctttatagtggtcattcatgttcatatgagagtgaaaactttataaatagtgaccatttattcacttggaaacatatagttgaaaccactagttgtgtgaacatattaggcttgaaaatctttataagtattttttgagtttctttaagtgtccatgtgagggaagaaattacatttaggactaagttccgtaaattttggtcaagcctatcgtatgttcttgagtgtttttttttccatgtaatcttgatgaagtactttatttgtattttatgtatttgattgtaatagtccatttttcctcttgtaatgagaaaatctccaacaatttcatcttaaatttagtcaaagtttaatacgagggaccaatgatctaacccaaatcatttctaataaaaatttcaatgtaaatatttaagtcctacaaattcaacccatatattaccccctataagaggtacttattgaatgcatttctactctttgtcttttagtgaagtgattaagttcctcatttaaatatttatgcacacacatgggaggattagagaattggtggtaaattaattgttggtagtttggtagaaagaaaccaaaccaaaggttggatggggtccttgtggatttggattattaaaatttaagtttgaaatttgaaaaaaaaaggacaaaagaggtgtgaaacattggagggccatgggttgtgggtgtgtcatatatataggcagagattgtggggtctttctaaggcagcagtacgtgagtgttgtcttgcgagagatttgccattataccaatctactactacttcaaacccaatcaccatacatttttagccgttacaaggacccattttccatgatttcctttgtttaaaaataaattattattattannnnnnnnnnnnnnnnnnnnattattattattagggtaaatactat

SEQ ID NO: 161318 - DNA, 4397 bp, Cannabis sativa
  modified_base (4365)..(4370): a, c, t, g, unknown or other
atcaaaataaaggaacaatccaacttgagcacatatacatttactttctttttctcttttaaataataataataataactcgagtcctttacagctttatgtgtagagcaatttccaacaatctcgccgaaactttatttatatgatgagccaaattaatatgaatcattgtcattgagcccttgaaattaattgttactaacgacttagattatgttttattacacctaactcatgctttccttttgactttggtagacatgaaacttccattttctcattaattgattccccaaaatctaaaaaaaaaaaatgaaagaagaggtgaggtgagatgtaaacaaagaataattcatgtacttcatgcttgttttgtgattagcttctattctagctataacaacagcaacaacaatccattgggaatttcctcgtgacacctttgtctgcatttattttataaaatcacttaattaaaatatactttgcattgggaatgaagcttatgctaatctctccaagtagtccattactactctctaacaaaaaattgtgatgttagtcattattgttcgagtcaaatgtgaatatagaggaaacagattagaaaggatggaaatgaagagacctctttttttagtcgttttctgttttcttattcaaacgacaaacaatactgcacatggtggtaggcccaagctaataagttttactattttctgtttcttttttctttcagattttttattggaaaatatcgtaacgaaatatcttccagcttttcaagaaaaataaagcatgaaattaatatgatatcttctcttttattttgttgtgatgggaagaaaattggttactcaaaattaagattattatgaagctaaacataaatactcacaaagttaatctcttcaaagaaggaaatgaaagagtcagtcagctgaagaaaagaaatggcagtaataattttcatctcatttgaagatcatgtaccactaggactattactcttttctgacactattgggtgagttgggtagcacattaatttgagtgggggaaaaatatgaaagcaccatactctaaacccataacaatgttttttcctcttctagaattggaactaccagactactagtgactgtgtgagtgagaagtaggtgtagttaagggccactttgcattaatatctacattttacagacacaggctatatcgagaggttgttgaggttagtcacaatgaatataagtcgtattatagcttttccaataaattaaaatgtaagagaaaatacttaaaagagaattagcaaaagctcataggcagacctatatttttgaaccaatatatagtattttgaaaaaataaaaataatgcacgccatatatgggacacctgacatgtgcactaaaaaagcatcttcataaaataaaaagtgcaaagcaaaaaagaggagaatcactcatttgaaaataacaaaaagctgtttagtgtgaactcaacaaaagccattgaaaattctcatatcatttactacgagttaaaattgttgttgttgttgttgttttggtgtgaacgagttaaaattgttgttgttgttgttgttgttgttgtagttgtttttggtgtaaacgagttaaaattgttaaaaggcttcaaaaatatcttttgtcacattagccattcaaggaccaagtttagtctttaattataaacggccagattttaagagagattagtagagaatagtgacattttcacatttttcttgaactatatgacagtttgtctttccttttttttttccaattcatgtttgaacttaccatgcagacataacagctgggaggaactttattgttacaagttattaaaaaattaatttttttgaattactattagatattagtagttagcactacttaaaggtgacactttacgattagttagcaaaattcgagaaaaattattacattaaattatatgagaatcgatacttaattaaaccaataacgatattacaccttgaatgaatgagtactagacaccacaaatgttttttccggatttataataaggcagcttttccgggtttgtaggagacttacaaagtctgagattacattatttcaataaaagttaacaagttatacttcattttttgtattaaaaaagaaaagaaataaaaaacagcaacaagtctcctacttggttcaacttcaaacataatatgtgaaagctgagtataagtaattaagtatttcactttcaatttattgacgatcaataaacaataattactgaaaaacaaagactagtttgaaaatgaaaagagccattttggaatgcttaacatacatatcctcttccctaagctctactaaattactactattgtctagaccaatccccgctcttcccaccagttttgctctctagacgtatatcagtaatcacgatatcctttgaagcagccttgcacatatcgtaaactgttagcccagcaacactcacagctgtcattgcttccatttcgacaccagttttaccagttgatgtagcttccccttcaacgctaacactccaatcctcgggattcagtgttagatcaacacgaacatgattcaaggttatgttgtggcaaagtggaatgagactacttgtgtgctttgctccagtaatgcctgcaatttttgccacactaaggacatctccctttgctatctggttagctaacaccaaatcatacaccttctttcctaggattaccttgcaactagcgatggcagttctcttagtacttcctttcaaagaaacatctaccatttgggcttcccctgtatttccaacatgagttagaccaattaaactctctctttcttttcgggatgcagcctggggctcctgagctactacatgttcatcagttacagagctggcaagataacttgaaggaggttcaccaaatactgattccatttcctaaagccaggatttcaataagccaagcagtgtagtactagtagctagtgtgtacgtgtgacaacatagtaaagttttcaagtactaattgaatttaccggctttagagtgcaattaccttattgagctccattatagtacttgagacatcatgtctgctgttactgctactgctaagaagccttcttgaatgaggaaatgaacccgcaactcgtcgaagaaacatgacaagcatacaaaaccaagcttaaccttcaactgcagaaagaaccgaaatttatacattatcagtttcagaggctaaaatgttaaggagacacgctaagacactagtgggcttaattgatttctttgtatgatcacatttttttaagtgcatgacagtttagttagttatgttggcctaaataacatattacttaaaacatttctagagtttcgttttctggtttggtgaatgaaaatagactagataaatccaacacttaagagcagttcatattagaaccgtaagttgatacgcggtaaaacccagccttattcaggcattttgacaaacaggtgaaggtcataaaactaaaccataaaaaaaaaaagaagagtttttgcgaggaagagaaaggagaagatgggttttagtaatttcaaattttgatggttctatagcttcgtaaaaggttaaatgtaaaggcgcaccttgggtttgcggagatggagaaatttggttaccttgccagtgtgccaaatgcaagactcatcaacgtaggctgtatagacaaaagcttacccaataacttttaaaacaaggccaaatgacataattaatcaaagtataatcattaacaaggaaaaagaagggtaggaaagattaaggaagagagagatgaaaacgatcatacctaagctcaatttcttacagattttttattaggtgcgttaaaccttaatttttttttcttatataatttcatttttttatatatgataatgatggattatatttaagttatttaaaatatggaaaattttaataatttttcataaaaaaataaaatttaaataatttctgtctataatataaaatacaattgtttaaacttatttttgacaatttagattattttaatttttttaaaagtttaccaatgtctaaaaaaaataagatatgcattatcgtataaataaattaagattaaaactcgaaaaatacaagataatatatatagaaaaaaaaaaaaaagttgagttttattctttagtattactatcatctttatattttttcaaaagaaaaaacaaaaatgtgactctaaatctaatatacaatttttccatattaataataaaatagttactcttttcaaaataataataataatnnnnnnaataataataataataaagatcggaag

SEQ ID NO: 161319 - DNA, 4587 bp, Cannabis sativa
cattgtcctcctgacaccctagcgaggcggtagccatgccggtacggaatcccggcgtgaatgcgaaccgggcataaagtgtagcaaacgatccgaacaagaccaagcaaccgatgaagaagataaatcccgatgaggagaacagccaccatctctgctgctgttcccatctccatctacaccagcacttaaggctcatatggcagcaactcccaccgcttgaaccattactcccaccccctccgccgcctccgccgccacctccgctcccacccacacccacaccgttaccagcacagccgcctccgcaaccgcccggcccacccacaattgggctcgagcccatctcaccaatcaatctaaatcaaatcgaaccaatcacaaaagacccgttacaacacacccttttcgaaccccccctcccctctcctcctctctagtctctctctccccccaacgaactaaaacctctgcctcaggtacacgtggcgttctgggtcaccgccaccatttttcactctttattgttttatttataataattattattaatttaatttaattcttttcaaattttatctcatatggaatgggattccaactctactcactgtctctgaattgaaacaatggctatgccttcttcttcctctccttaatctctatatctatacgtatctgtaaatacaaatataaatatatatatatatatgtgtttctctctctagagttgacggagtagggagtaagagagagagcgaggttaacaaagaacgttacccccaaagtgtgctatgtatgtatatatatataaatatgtaacatgagaaagcataaaccatagtaatatttatattaacattaacaaaatatatggcaccatgtgatctcgactaccatctcactcgccttgtgactgcgttgattctctactcgcgctcttgaccgttcgattcgacgcgtaggactgccgtttacgcgtggacttttctgttttgttctttgatgaattttcttcagtttcgtctcaaagtttttcttggcacattgtggattcaaattttccctttttaaaatattattttaaaatttctgttaagtggaattaagtttttttaacattaattaaaacaaaaattgaaatctgaatcaggaattggggtgcgtgtagctggaaaggttttggattgggcccactataattaaaaataaataaataatgggttcttttatttttaataaaatacagagaagaaactgattccatttccaactctataatgatctatatcttaatattaataaaattttgtcaattataatgaataacttattactagagaacttagatgtgtgaccactttatataatgaataacttattttaagattagctatattttcctttagtaataatggttgtaattattcttttagggtctatgggtaaattaatttggccttcatgataggacactacttcaatttctttggatgatgtttaagaagaaaaaaaatagaaaactaattaaactcacatcttaatgctaaaatttacaaattcaacatacttatcatgaacaatcatgtatatcagaatttaaaatatatatcaatcttaatttgtgatcgaaatcaattaaaattattattatatataaaacatatttaatttaagtgcatcgtaattactctttctataattgtttgtgatcatagttattatttttttttcttctagagacacaattatagtttagtaatgttataattttcctcacaaaaaaatattctaagttggaaattgaaatccttctaccttaatctcataaggaaaacaaaatattccaagacttatacaaagaaaaaggaaagaaatcattccatttaaggaatgttctctttttctttctttttaccatattaatacagtgattctcatatggtatattgtattgagaatgagattaacatgatatatactatgagtctactatgaaaatataaagtataaagtatatataaaaacatggataaaactcaaattttaaacttaaacttttcaacacttttattggcttgtggtacactatatatttactatttagtgttagttttcaattacaatatttgtcataatatattactatgataatattcttggtataccttctaaattattacaattaatcaaagtttgattaagattaactaatttggaaatatccatttcaatagcaagcaatgtatagactcttgagcaccacgaaaaagaagataaggtttatttgaataatctattcttaattaataagtgtaattttcttttgacttttctttgggttcaacaattttctttattatttttttaatcttattgtacatgagtcaagtatattgccctgaaaactagtataatttttgaaccacatcttcatccccaactaggttttatttggaaataaaaataaataaaggaatttagtcaaaaatattatttgatgacgtttattaagggttacatatatgttgatgatcattttcaatgctacgtcttggtttggttgggttaggttaggacactagaaataacactgcaatttgaccttccataaaagaagcaagaaacgattttgactaaatgattaagtagaaatcagttcattagttgtcttaagttgttaagttagttagaacgtttgtaagtttcagttacttttcagttattttgagctctagttgtccacttataattatgtgttcttataaataaagtttctctcaattcatgagagacaagctttcttaagcattttctttactgtgtttctctcttctctggttcttaccttctctcttttagcttgctttagttgagcttctacatggtatcagtcacctagagtcttcgattcatacctccacttttttcaatcctacaaattcaactagacgtaccactgctcatgtaatcaatcaccctctatctgcgcctgctcttgcccttgctctggccacatcgatctggaatcctttatccagttcactctcttcttcttttactttaaagttagattgaattaattttcatacgtggaagtctcggtttgtgccaacagtattcaagcatgaattggatgaaattatgttcagtggtgtccctcatgttcagcatttggtcactagtgaaatcaatctaatctacactcaatgaaagaaatacgatcatttgttgctttcttggctccaatcttccatatctgaagggatcttggcttctgttgctaatcattctacctgctttgttgtttggcaagctttcgaacaaaaattttctaagcaatcgcatgcaagactgcttcaactcaacggtcagttttctcatgtgcagaaggaaaacttatcagtttcggaccatgttgacgaagctcggcctttagccgactctcttgatgttgttggttcatctttgacgggtcaagacattgttcttcaacttctcaatggtcgagggccttaaatttgatcctattgtctctagaattacatctcgaagcgattctttatcaattgaagaggttcaagcattgctcatatctcatgaaagtcttctcgagcatcacaatgtcatgactgatcttactctcaagatgcaagccaatattgcatttggatctttaagaaatggaaattataagcctcctcctccatttattcgaggaaattaccaagatgcttcaagaaccaatcatcgtggtgctcctcgtggctatccttcgtctttttctcgtctcatcaatcaagtttgtcttaaacttggacacacgactactacatgtcactaccattttgatagaaactgggttactcccaagccaaatagagccatttcaagagcctacttgattgagttggaatgtgactaccatcctcaggtatatgccactaccattcctaattttggcaatggttatgcctggtctgttgatacaagaaccacgaaccatgttccaaatggacctgacaatttggactccacagtttcctatcctaggactgagactctagctaaggctttacttattactcacatacattctgctaccttatcatcttcatctactagtccataacaattaaattttgtgcttcaagttccagagatcaaaaagaatcttgttagtatgtctaaactgactgatgacaatgctatttttactgagtttcaaaaaaaaaaaaattactttttcaaggtcaaggatatggggacagttcttcttataaggcttaaagatggtctttacatgcttcatgatgattcttccaggatgtctactcatgctctccagtgtcatctcaaggagtttatgcttctttactctcgttgtactaaaacttgtgattgttcaaatgttaattaaatgaattcttgtaatttgattgaaaagaaaaataaagaaattccttttctgtatgtctcagattcttcttcacaaaatcatattagttatcaatttaagagacttgaagtgatttatgttaacatgtacttatggtttaatatatatatttaatatatacacaaaat

SEQ ID NO: 161320 - DNA, 4132 bp, Cannabis sativa
ggcacaaaacccaacagtttttacctctaagtagatcattgggataaaatactagcttagcttgagtagcaagcataacatggtcatctatgtaccattcaccactcacgttaatactagtgacattattcttagtgattgttttcttcctacatggatcagtattaagccatttcaattgaagaaccatggatgatagttggggattttaatgagattttgagctatgatgaaagagttagaagaaggaaccataaaaatcaatctgagaggtttaaggactatgtagtccattctaaaatggaggaccttaaatttttagggtgctacttcacatggaacaatgagcaggagcctaacgagataattttctttaagatgatcgtgccttggtgaactcaaattggacagattcttttttgaattcagaagttatcttccttttgaaaggggaccatgaccattgtcctacattgatctcgttggataaagatttgagttctgaatgaagccatttacatacttgagcatgtggaaaatagcttaaaattatgtagaaaaggtttgacaaagttggtagaccctcattgcaggtacacctatgtataagttggtgggaagattgaaggggcttaaggaagttcttaaggctattaatagtgagggttttaatgaaatacacaagacttaaatgtgggcaaagcaagagatgctagctatctaggaagaattgaatagaaatccttgaaatagagaattaatggagaaggaacaaatggctcgagataggtatcctcattaacacgaagctcataatatgtttttagatcaaaagacaaagattgattgggttaaaaatggtgatgagaataatgccatattccatgcatctttgaaagcccgaagagctcaaaatagaattaattctatctgaagtgagagtgatatttagatagaaaaaccagaggaaatccaacaagttttttttttttttgtgttattatcataacttgttagggacctttatgagcaacaaaagtaagggcttttaatcggtaatgattgttggacctttatttctaaaagagcatattcaaattgtacaacaacctttcactattcatgaagttaaagatactatattttccattcaaagtatgaaggctctggccaggataggtttgggagttttttttatcatgataattgggatttggtgggagaaaaggttggaattattgtgattagtttcctaaacacatggaaaatacttaaagagatcaatacaacaactattacactcatcctaaagtcaagtgcctggatagtgtcgaagaatttaagccaatttcttgttgtaatgtgatatataaggatgctactaaaataatttttctgagattaatgaaaatcctccctaagataattccagagaaccaaggtagtttcgtacatgggcgatatatatagctcataatataatagtatgccaagacattgttaggcgttatggaaggaagacttgtaaatagagttgcatgatcaaaattgatttgaggaaagcatatgacaccatagaatggggattcattgaagaaatgctcattgcttttcactttccttggaatttcattgatctcatcatggtgtgtatcaaagctccgagattttgcttactgcttaatggtgaaatgcacgaattctttgagtccaagaagggattgagacaagattaactgatgtctcctctcttattttttctaggcatagaatatatgtctacaataatgagaaaagtgggttattggaaaggttttaaataccatgatagaagtgatacttgaaatttgaatcatatgtgctttgcagatgacctactattattttgtcatggtgacttcatttcaattttattaatgttgaaaggtctgaaaatcttttttcaacttctggtttactaccaaatgaagaaattttttagttaatttgcttcaatgatatgaaggagggtgaggttacccgactccttgaaatgtcaggatttacaagagctcaccttcctttcaggtatcttggcatcctaatatgttcacaaaaaatatcagttgttgaatgtaatggaatctttgagaaaaaagtcggttggatcaaagtttagagctctaggaatttttcatacatagagataatcacattaattaattttattttgattaccattcactcttattgtgcctaaattatgattcttccaaaaaagttgttaaaggatgtagaagctatttccagggattttctttggaagggttcgaaagacaccaatggtactcttgggttagtggcttggcaaaatatttgtttgccaaagaaagttggggtttgcgctttaggaaggttcttggttggaacatgactgcaatgagaaaatatgtttagaaaaaattgccaccaagaaagataacttgttcgtgaaatggattaacaatgtttacttgctggataggaattggtgggagtaccacccaccaacttactctagttggtactggaagagactagtcattgttaaatatgctttcaaatttaaggcagatctctcatattttgtagcattaaggtatatcattaaaattggctatgatttactatttgatcaaccacttgcagtaagtttgagtaaagtagtttgtgatagatcgagcattccgaatcatagaatggtgctttggttggaaatgttagagagacttcaaactagatatctgtttcgaaattttgagcctctggtggatcaaacatgtcttgttatgtgagctgataatgagagcataggcctttattcactgtcattgtaacagtggttgtttgcaaaaagttaagcattggacggtttaaaatcgacttctttggacctaattcaattaattcaatatatagacaaagcaaagaaattgagtgctattcaaaagaacatcatgtaagtctaccacgttcggagagtctaaaatgatgtgtattagaataaaaaattatggcatattactaacactgtacagaaaatagaaagcaaaatacaagttagaatgtaatgccaaaataggcaaaagtcatcgaatggttcactaagatatgtaagaaaatagatgtagttagggctgttcacggattggtttggtcccgattttcataatttttaaaccaaatcaataaaacagttttttgatattagaaaccaaaccagaccaataaatttttcaaaccaaaccaaaccaaatcattaagaacggtttggtttggtttgaaaccacggtttaagatgaagttataattattcatatttttttaaatcattgtactatttttactaaatttttaattttatttttcaaaatatatatttaacatgataagtaatagatgtataacatataaataatgatataaaaacattctcaaaaatccaacataacataaaaatttaaaattcatgcaataaaaaacttgacacacaaaaaacttcaaaattatacatatagtcatgtataaaatatatataaattaattatttattataaacggtccggtccggtttaaccgttaactatttattacgaaccgtaagcgaaccattacaccgtaaacggtccggatcgaccaaactaccaaaattattaccattataatcattttcgtgaaatcaacgaaaaaataaatatagtagtagcatatttatgaaataaattcaaattattaccaactttaagcaaaacatatatattcttcacccgttgacttataccatatatattgttgatttgattggatgtgtttttctttactgaactaaattttgtcaggacatgtacatgtggctgttagaaaaatgatatacattgtcaaaaaaatttgaccctcagctacggtttagggtttggaatttggcttgtctccacattgatacgtgtttttttttgacgcggtgatccagatcacacatgattaacaaagcacaatccacaatcggcggcgtcacctcctcgaaccaggatagctcattgtctaaccgaagagcatgttttgccaaaccatgtgctgcagaattcatattccgagccacatgggacaaaactgc

SEQ ID NO: 161321 - DNA, 4843 bp, Cannabis sativa
  modified_base (1257)..(1272): a, c, t, g, unknown or other
  modified_base (1311)..(1312): a, c, t, g, unknown or other
ttttttttctattattataaatatgaataagcaccccattccacctttttgtctttttatactttttgttttttttcttttttctttttttttttttttgtgtttgtctttttcttattgacacactactaagttacaatatatgcttacagaaagaatatatacctattacatatatacataaaacaaatatagaaaaagagagattgaagttgtgaaaattgacttcattacttctttttactatattgtcatttttgttctaattttctataaacaaatattttgataataaatgaataatatacacaacagccttggacacactagtatataataattatgtggaataacaattcacctccctttgaaacacctacaaaaacataatgagttgcttgggattcagcattcatgtcccacactagggatcattacatcttcatcttcctaataagaaattcaaccacaaagctctgaaaagtagtttccaatccactcattgtccatgcagatatagatcatatcatcatatataaaattcatgggccaagcttgaagaatccatattataacttcctttaacagagttagcaaaaaaaaaacttcctttaacagatgtcgaggtaccataccttcttggttaaagaagggtcatgacatgagcatgttgctctatgagtatgggcctcttgtcccaaaatcatagcaacaaacttaaatgcaaattttgaaaggaaaaaaagaaaagaaaaagaaaagaaacattgtcaataagggtagggctggtaggggacccttccacaaaaaccttatcatgggtcattttagcatgggttgttccctcactccacaccatttcttgtgatacttggacaatcactacctaacccaacattgcacctagccaaacgagtagcatttaaaaaaaaagagtgaatatatttatatatatacctgttatattaaatgtgtctatgtaaggagaattattagtttaacggttttttttttcacgttaaaattaacggtcaaactaacaccttcaaatcaatcaattgattatttttttttaaaaaaattaattttaaatatttaaatttaatttaaaagtctcaacaaaattaaataattattttttttactttataacacatttattagttatattatttaaaatatttaaacttatttatttatttgattgtctaatagaattagttatatataagtttttataaataaatttaaaactannnnnnnnnnnnnnnntttaaaaaatataattgaattgtattattattattattnntattattattattattaattaggtaatagcaacactaatacaattctaagcaaataaatacttactatataaatatatctatgttatattaaatgtgactatataaccaaaattgttgttattttttacaattcaaatttaaacatatgtgtataatgtcttttatcttgtattgtcttataataaatatatttctattatcaatattttaccccattcatatacatctaaaaaaatatattttcttttattgttttctttttaaacaataaaaaaagtgtttatgtttcttaacaaaaaatattgtgatgtcgttacctattgcagttattaagaaaatatttttttttattatttttcttttagaaaaagtatataatagttctagaaaaaataaaaaatagttaaactaaaattataattaacaataaattttaaaattattatattttctttttataaatagtaataaattaaatatataattaaaattaattatatacctaaaattatacacacctaaaataaaaattaagaatataattaagtaaatgtattgtacataatattaagttagtatatatatatatatatggaatataaaacaaaataaaagtgttgttaaggtcatgaatgaatgcatgcatttgagctattagatatgcatattccaaatgcatattagcccttagatgtccatgttatgatttattgaaaataataatgccttctaacagtaaaagccacaaatataaatgccatagaaatataatttatatatatttgtacatatgcaaaagtcatgggttaattccctaccatccaagctgtctttcagaaaaatacccctcctaggaaacaaatggtgtgcaattatagaatgggtgtacattacatgatgtattcatatatcataccaacttgttttaattttatggagccaagattctattatctgtgtggaatgactacaattccatggcaaggcacaacttttgttctcctataatgtatattatatttgtaagagtaatatgatatcacattcaaattaacatgtacatattaatttgtacactctaattataaattataatgtgtattttgtaaggatcctatatccaacaaataagaaaagaaaataataatagaagaagagaaactgtttgtattattgaattgaaaagagtattataactttatatacagtgtttaataacgaaaagagaataatagaattataaccaaccaaaccattttaactgatctaactaacttgatgattgagctgttttagttttactatcaggccccctcaaatttagggtggttgagcaaaccactccaagtttatctttaagaaaaggaaacttaaagttagaaataggtttggtaagagtatctactaactagtgttcaacatgaacatgatgtattacgatttccttgttgagcactttgtctcgaacaaagtagaaattaatctttatatgcttcgtttgagcatgcaagactggatttgcagcaagcataacggtactaatgttgtcacaccaaatggttggagtggtgactggaacattaggctcagatagaaatgattggatccaattaatcttagggacaatagaggtaagattttgaaattatgcttttgttgaggatcaagatatggtttgttgcttcttagactgccaccctagcatattatcaccccagaagatgcaaaaatcagaagttgaatgcctctcatctgggtcaacaacctagtctacatcacaataggcttgaatatagaagtgagttactgatttgagttgtaggccatagtctatagtgccagaaaggtacctcaatactctttttactgtaacaaggtgagattgtagagggttatgcatgaattgacaaactttattaacactgaatgcaatgtcaggtctagtgatggtacatattgaaaagctccaacaatagatctatattcagagacattgatcattgggtaacttccatagttagataatcttaggccattgttcattggtgagctttgagttttgacaccttgtatttcagtcttgcaaaggaggtcttgagtatatttcttctaagagagtgtcacaccatttgatgtaggtagaacttgaatttccaaaaaatagttgacattgcctaagtctttgagagaaaactttgcacttaatgtagatatcagtgaggaaacttgagtgttattgctacctgtaattaggatgtcaaatacataaataagaatatgtagatgcaagattaaggtgttatttaaacaaataaagatgaatcagtcttggcagaggtgaaaccaagactaatgagagcaatagagagcttctcaaaccaggttcttggagcttgtcttacaccatacaatgccttgttaactttgcacacttttttaagagcaaaagcatcagcaaagccaggtggtcgtgtcatataaatctcctcatgtaaattcccattgagaaatgtattgttgacatctagctgcctcacaagccacccttttgtaacagccagagagagtacaattcgaatggtaatatgcttaatcataggactaaaggtctcattgaaatcaaatccttcttgttgatgaaaacttttggccacaagtcttgctttgaatcgaataacactacaattttcattttccttaatcctataaacccacttacatccaattaaagttctgtttggaggcagtaacaccaaatcctatgttttatttctcttcaaagatgtgttttctgtgtccatagcagcaagccactttggatcttgtagagaagatttgagagatttcagagttagagaggccatgagtactttaggctttctaatacctggctttgctctagttttcatgggatgagtgttgagttgaggatgaatagatgttgtgttatttagtgaaacaacaacagacttagaagtgacttctgttgtagcattaagaatagcagaaggagcagtagtagtaatatttggagctgtattgaggtgcgaaggcagttctacaggtggtcgatcaaaatcttatcatttgaaattagagagacacctgcattgtaattgttagtagccaaaccatgaagtggatttgcattagtaataatgagttggttagtgtcagattgagatgacacactaggtatgacttgatgagttggaattaagtcaggagcttctatagtagttggataatgggtatttgaatgtgttataataggtggagaagctctagtgttgggaaaagacactgaattatcattagagaaggatatagttgaagaaaaagggaaaacactttcacaaaagagaacatctctagagatgtataacttgccatctttggataatcacttataacctttgtgtgagagactatagcctataaatgtgcatggttgggatagtattgtaatttatttttattgtaaggtcttgttacgaaaattatgatcactacgcaagtatacgcaatca

SEQ ID NO: 161322 - DNA, 6761 bp, Cannabis sativa
ccgccgctgcagctgcggcagctgcagctgccttcttttcatcgtttgctgaatcaattacatcagcgttcaggtcaaagttccgagaagttgggtcaatcgggatggtttcatcaccagtactggtattttccttcaacgggtccttgacatcagtagcattgtccacaggtgctccaaggattgtacttggtttggtaccatactgaggagatgagcagggttcagattctggatcaaggtgagaagtctccctttctaaggtgcgacctcgcccgcgtcctcggcctctacccctacctcttcctctgccactactactgccatgggtcatctcaagctacaaatacaaaagaaaatatatgaataatgaccagaagtttaaaacaaaaacagcttcctggattaaatgctctatcgacctctgcttaaccaatagtcaccccacattttgttttcatgttttcatccagatgactagttatatatacataatataatattagtgcattcaacttcaatgcgatcactgttatgtatgaagacattattcttaaatgttgcatattttaggcctggaagattaatataattcagccatgtaggtgcagttaccgacgggctcactactaaacactatataactgcacacacatttcagacaggattagcaaaaacaggaaaagtagatgattcgagatactataatcataccatcttgctcctcttcagctcttcatcactgtcattgcattcatcaccagcagctttcctaacagaataaatagacactgagtacatctgatcacttttttttcagttaaaacagaactataattgaaaaataaagatcaacaggataacacttgtgtgaccattcctatgtggtcagttctcaagtcatctatgtgctattataaactgggtgagctatcttgtgagcataaagtaatatagatcaaagaaaaagaacaacagtcatcttgcaaaccttctctttgtgtaggctcgatcctcaccagcagcatcagaatgaccgtgaccatagtccggaaccctgctgacgatatccctcaaaaaatcaaacacattgtagctctgtacacaatgttttctgcatttaagggaattataagaattagaatcttatacacaaaagcatttatttaaaggaggcaagagtaccacatactaacatataatacttttaatcaaaagagacattttctctttatttctttaagatatcaatacaaaacaagataatgtgaacttataatttttctgatagagttgtgattaacttcccagcaatcccaaaacacaagatagccctggcagtacccaaaagttacgtaaccgcacaaaccactaaacaaactaaaccattgatgatcatatgaacacctgcccagtactaggaaaatcagaaaaattgacctactttgatttgataatttttccttggagctgcatatatctttgctatgagaaccggtgttcgacaaaaatagactattgtactttacactacgtagaagttctttcagctaaaatgaaggaaattgagcataaaagtatagaaacttttgttagttagaaccttgacggcattaagttatttaatatagtcgatctatagttgtataaatctgaacaactttaacgtgatcctatttcttcaatttgtcagggttggctggaaatttaatttttatttgctgtttgtcagaaacttctcccttcaaatctgttctttgatctctatcccatttaatcccccaaaaaagcaccttccttttcaattcgaataacaatgaacaacatctaaacttgtgtttttcttttccttatgctattggtgttaactgacataaagtgccaagattctcactaaaaatggcaaatcatagctgtggttttgttcatcacaaaacttgaaaaagaaatcgattacaataacgaaaaacaaaagatacttacaaatgcaacgaattcatggtctttgctcctctttgaagagttatctcatatgtacgatcacaaaggtcttgtagaaataactccaatgccttcgctgcattaatattaagaaaactgtaagcaagagagaataaataataaactgagatgtactacaaaagaaagtgagagctacgcacagactaaaacaggaactgccaatgcaatcttcccaacatcctcatcagcctgcattatctttttgatgcgagcctatcaaaatgaatttttcatcaggttagatccaaatactgaaaaaacaaatagcgaacttatttttccagtcatagtttgccatgctatcacataataactcaaaatgtaagaaaatgtttttcatagacctagacagcgataaatgaaaacatgacactcccatagtattagatgcagaaagcattatctgatattgtggtgcaaatacttgtcaaagaacaacatccatctattgtgaattggatatttataagaaatctgctgaaaccttttcagacttcaacccccactccagaacacaagcaacttaaataattactgacatatgaaatacacaaacacaagcgactaaaataataactgacatacgaggggtttctaaccccaaacaaataattgagaactgtagctctgttgatatgcatctctttattgataacagtaatgacactcattagcaacagcaaaatgaccttgactaactcaaacacattcactgtcaccgaaacaaaccgaaccactcaagaaatttgatactgatgagaagaaaaaataatgaatacatcaacaaaaaaaaaaaatccaaatctaaagtatggcagcctggaggggcctatgccatctcaattaacaaaaagaaagaaaaagctgcaagaaagaagaactgtaggctatgcaacaaacactgccacacatatgctctatagctaattaccatcatcacatcagagcattagtttcctatcacattattgcgtccaacacaacaatcatgttcttcaatactcttaaaaatactaccttaacgttaatatcatccatcattgtgtataatcattacatctatcatattggtatatttgctaattatatcatcaatatacaccagcttctaaccaagcacaagaaaagaaactagagaagcagtaattagtaagcatctgatctactgaacacgagatcaacaaatttatcttaagacctccggataaagggtgaagaaaacctgactattggtgtctgcattatgttttcatagctcattatgaaacgagttaacctatagaaaacaactaaaaaaagaaactaattaacctgggcatcgaccttaatccacatatagtcaatgattcaataaaccaaaatagtattctaaatccctgtaaggagcctacaaagcagtgttcaaacaaattatcaaattcgagcaaaatcacaaattccccccaaaaaaaggtggactgccccgaaaagcttactccttaaaatttcagtgctaaaacatattaagcatatattccccctcatcaacaagtctcataaaacaaacccatttaagattttgattttttagtacaagtatataaatcaatttcaatacccatgacccgaagcatatttcaaaaaaaccacagacgatctcaatcaagcccataagaattcaaatcgaaaccctaaattaaagatactaaatgggtatgcaaataaaatcacaatatttcctaagatttcaggagaaaatcttaatccaaaaactccatttctgaagccaattgatacaagaagcatcaactaattaagagaagagaaaagacagaaatgaaacataggaacttactgctggaaaacgggtatcgagcttcttcctcatggtgtcagaattggacaataaactaagcttaaaataacgaaaaataaaactttttttttttttaaataaagaaaagaacaaaaaaaaaaacaaaaacaaagatggaaaagaaaaatcaaagcttgagaagaggagaatgattagtatgataattgtaaggtaaaatctacgagacccatctcagatccgaaactatctactacgctcttccatttaagactagtttagttccaacggaatatccgtcgagattgacgaagcctgaaaaaataaataaaaaataaataaaaataaaagctgaagatagcgttacaggtctgtcacataaatttcaggaataatctaattgacgacaatagaatgcgccagctggacaatttcgtgccgtttctcgccacgtgtcaaattttggttggcaccttcacgtaatttcatgccagtgttattagttttctctttttcgtttttcttttgctaacttttattatcttttgttctttctttttttttatttctgttattagatgaattttttcatccaaacatagcgagtagtgcaacaagtgtatcccatttctcataaagaaggatggcgtgccatgggtaccaagatcctatggacacctctcatgtagaaagtagaaacaatgaattttttttacactttaaaagtattttttttttttttgtatttttacgaaaatcaaatagcaatcaacgaaataacttaaattgcaattaaaattcatataacaacccacataaaaatcatcagaacaactatcggaaaaactcaaactgtaaattttttaaaaaaaagttaaaaaatagtatataaagtaattcgactaaaaacaaacgagaagatgcaactgggacagactcaagtcgtgtgctactatgcatcgcataatgtgagtataaaagcaggacttagagagaagtgagcatcagttgtgacatatactgattatatacaatgacccgatatttctccctcgcacccaattgaaagtcgcacttttactagaatggtctcaaaactaaatatacgcggtgactcgtatgaactcgcgagttcatatgtcaccaagtacctcttgcaaccgaggtagttgtgcccgtttgattattaaataaggaatggtcaaaattgttccattatttattttataaatgttttttcttttaattaaatataattaatgttttaattgacgtgtttgatcaaatctgaataagactaatcacaatttatttttcaaaagtagactaagctctgactgaattactataattcatttgtcttttacatatttgttgtttatattctattagtcgttgttttatatcgagtattcaataatctaggtgaatactcacagttttgcttatgggtgttcttgtgtagtttgaatacttgcagtttttggtgttgtttattttcttttgacaacatttggcgctagaaggagaatgtttcaacaatattttttttgattttggaggaagatcacaatgaatacgaaccaaaactaaaatgtcaataacaacaccaacaacgcacccactgttaacaatggaactatttctgctccacccaataatggcagcactgtgagtctaaactcaaccgttgacgcgacatttgggggatttggttggactaacattgtcccgctgaacttggtcccttagttcataaaatccattacagaaacatcaactcccagagcaactacgggaaatttcccattgataacgcctacccataccgccgatgggttggtaaaattattagtcacatagtatactgttctacaggaacaaatgcaggctctacaagttgaaattgtcagcatgccaccaaattgtatcgcacctgcaaataatgaggtaagtaatattaactggcatccttctgaatgggttattgtcaattgaggacacaggtattacgtcaggtgttatccatgttttcggacaaacgacacgtgtgcgctcattgtccccagttcaatttgcaggcctattctcatgtcctaaatagatagcgaaccagcccaataacagatagtttgaattcagttaagacctgaccgagggtaaaccgagattgatgaacctagagagcttacttgtatgaattaccaagcatccaaaaaagacacaaatggataccccaaggctatcccaaaagggtaatctgaagggtgtcgcaaaaccccacttcatagggctgtcgccgaaaccaactttttaggatttgtatgatgtggcccatctttggcataaaattcatgagttgggcctcaatccatgggccctaggtcagtgtattatatgtatttacccatggtatatccatacataaaccttagcctttaaatactacatgatcccttcaagcaaagggttagaaattggttactcaaataatatagcaaagagcaagagttcttaagcttgtcaatggtggatttacctcgggcggcagaggctcattattgggatcaactgggttggcagtgtcgacctaaccagttgtgttggtcaattttgttgtgtctactgggttggcagggttggccacatccgttagattcgtggagattctagtggcggctggaacacgaacgttaagatcaacagtcatagggtattgaggaagacctaatgaggcagaagctgtagccgaagttctccttgtgttaaccatgatgatagatcagatcaattaagaacactctcaatgaaagcaccaagtttttaacctcagatttggctaaccaatagcagagtcatatttatgactaatatcaccatgtgtatgttggaatttattttaccaggatcttagatcggaagagcg

SEQ ID NO: 161323 - DNA, 1152 bp, Cannabis sativa
aactacttttctaaataatggatttcatatgaaataaatgtgatccatagaaaaaactactatgttatagtgtctaatattttgatacataatttaagtgtacataaattctttactataatgccacaatatattaatgtgatctaataccaaagttgtgttttagcatttctttaccaaattcaccttcatatgcttttgctattttattctttaactactattacaaagattgcaatatatgatagatcatagatatgatatttgcctatttggcataaaggtttggaatcaaaatagtaaaaagaaaatgagaatgcgtaaagggtgtccagaaaaaaggttaatataaaagtaaatataggatttaaagtgagaaaaaacaaatctttgagacttttttatatctgttatagagatatacaaatgactcaatacacaaaaatctcaactttagttgaaagacaagacacaatcatattccttaaaagggttatattctagatgaataaactacaactataactataacatacacttgtttgctgattgttttgggtttaacatggtacacaatcattaaacccaacaaaacaaaccttaccgactaactatacaagatcataacatcaaacattagtaaaattctaacataaaccaagtctctcatctcaacattgtgtcattatcttgtcatgtttctccatttgtccttcaaatctacctgtacataaacctcaaaccttaaacttgaatattaaagtttgtaatggagaaagaaagcataaactttgtttacctctgttctttcttcgaataaatcgtggtatgtattaaggattagcttccagtttccctttccataccttaatgagaagacaaaaatgattacatcttatgtttgttaatgtttcactttgattgaaattttatgaaagaacaatactgattttaacagatctaattagaataaataattgggattttagaggctgagttgtcaaattcttagtggctttgagtgaatcccaaggtgttaaaacagtaaagggagtcttagtataaatagagggcatattgtaagaagggtccctataccaaactgtctcgaaaagtttggaactttgtaattttctctttgatatcaatgaa

SEQ ID NO: 161324 - DNA, 3242 bp, Cannabis sativa
tctctcggtttatctcacttcttggaatcttgacttcttctgctataacgtctggcctttcaatacattgttttgagactattatctctgctatcaagtttgtaggatcaaaagttgaaacttcagcagtaaggaactcaccacagctactttggttcatttcttggatagacttgcagttttgatcagattggacagaagataacaaagtttgaggggccagtactgcttctgcttgttcaactttaattgggatttcttccgttttgatctcggtgacatgtaattgttctgtagcgtcctctctttcttcaacaattctcttctctgatgattcttcttcctcctcatcatttgagtctgatggaatgatatcatgctcagtaacaatcacaatatgaccttcagattcctggagactttcctgatcaaccactggttgatcattctcaacaacctttgcttcctcacttggacaatctttattgatctttgaatcattgacatgatcaatggcttcagtttcagattcagttgaattgtagtcagacttgtatttgtattctccattttccagctttttttctctgagactgattgtctctgtaacaatcatgcatttgtcttcagtttcaggaactatctgatggagatttggtgagttagccactgagatggtttctgattctgaggagtcatcttctcctaaactcacttctgttgaaaacccttcatcacttttgtcacttagaacagtttcttctgctgttacaatacttaatcgatcatctactttatctccatctttagattcaaactcatcaccacagacaagtaaatcctcctttttcttctgaatgaaagtatctgattcagtttcaacacttgcttttagattctcaaactcctcagattctgacaagtgaccaacattctcaatacacgactttgaacttgaagttagaacttccccaacctcctcagatacttcactgtcacctaaaagggatgcttgtggattattggaatcttcagtctctgacaagtgaccactctccacactagagtttaaactatatgttaggacttcctcattctctccagattcttcactttctcctggtacagatgcttctatattatctgattccttagcctctgacaagtgaccactctccacactagagtttaaacttggtgttataacttccttagtcccttcatatagttcactttctcccagtaaagattcttctgtattgtttgattcctcagcctctgacaagtgaccaatttcaatggtagaacttaaactttgtgttagaacttcctcaatcccttcatatatttcactttcccctagagcagatgcttctgtattatctgattcctcagcctctgacaggtgaccattctccacagtagacttcaaacttgagcctagaacttcctcactcctgttgtcatctgggacagactgatcagcctgaattgaggccaattcatgctgttttccatttgaattttcaagttttggaggttcttgatcatgtgataaaatggatattggatcaaacacgaagttttcaatttcctcttgctctgccaatatattatagtagaacagtatatcattattttggtcaatataattttttttttctttctttctatattcatgaaatgaaactatgtgtagactggtaataaaggttgcaatctaagtacttcctacatgataatagaatagtaaaatggagaaacattggtattgaatttgtaacttaattagtagcctagtataatagtatgctaaccttttctaacagaggcctgcttttgaagcttattttcattacttcccagggaaaaatcattcttgtttagcttattttcactgctttcatcacctatttcgtctaacccccctgtgactttcggaggatcagtaagaacagaaatttcactttcttcttgcactgaaaatagaatgcaccagttttaggctacaagttttttccttcaaagattataattaatataatgtaagtaaaataatggttatcaataattcagaccttttctgcttgatgattttttaacatcatcaactctctccagattatgaggagcagaatcattagctttgtcatgaaaattattatcttcagcagcatctactaagtaattttcccctttaatatcatcaacaccagcagtcttgtttgataacccttttggatcttcaacattggtgtgaatggtatcttcttctgcattaaaagcttcatagtaaacagccaaactatacttgaaaatcaaataggaaaggacacaaaaaagctaatacctttcaaacttgatgtgctgttgttacccatttcatttcccatgttcagctcttcaaatcctgtaatataagcaaaccccagaaactaaattcactcacaagagccaattaagcaagcttaatagtagtatatgaaacaataaaaagggtatcaaaatatcaaaatacccaagtcaagcaattgatccataccatggtgatagataatgatgtcttcacatgcaatgagggcatagacagagtgttaatagatgtagaagttggggggcactgctttcttgtaccaaaagccatatcatgggtcatgttttggccaatcaaagcaaatataggactaaaaaaaagtagtgacacatctcaaacttttattattatgattatcatcttctgcttttgttaaaaatatgtgaaatatgagattcatgacaatctgtgatcatgagaacattgctaactaaatgaaaaaaggtgtagtgtgggcgagtgaatgaatgtgactttgtacttaggtaggcatttgaagtggtctgccactatgattatgttgtgccaaaatttctaataaaggtctcatctgattgattttttaatcacctagcgccgcgagcaaactcattagacagaggagtttatatttgataaaatccctgacagcctaacaggttgcattggtccttggatcaaggagaaaagagtactattgcaaagcaaagctctttttaaattagaaatattatgattttttttaattagaaatattaataagataatttaaatttaaatttaaaatacttaaaatattataaatatttataattttgcttggtttagttctatataaagtgtacctatataatagaattcttggtttgggtgactttttatttatatt

SEQ ID NO: 161325 - DNA, 10548 bp, Cannabis sativa
aatatacaaacctcaagggtctcggcaccagactcatctaatgtttctggagggggttccaacacttcaggagcagcataaaccctagttgaggactgtgaaggttttacagttctgagcttagcggaggagttagcaaagtgtaaagaaaaaggagaaagctttggtttaaatgaagaagaaaaggaagtagagagagaaagagaagggattaaggttgcagatactgaagaaaccgccattgaaatcttggtttcaagctttttagctctgaaatcgaagagagactattctcttctcttcttcctctgctatgatgagctctgtagaattatcctatttatttattttatttttctacaaaaataaaaattgtattgggctggaccatggtttgagaagataggcccattgggcctctttttaatgggccaaaaaaagagaaatagtgaagtttttaagaggaaattaaacaaggaaagtatttaaaatcacacttttatttatatttttacggatttttttcttttatttttttttacgaaattatgattttttagagaaaaataatattattttaatattgtcacaacactatactatatttttgtaacatattagaataatctaaaaataatgtaagaaaaaaattagtaaaaatatatatatatataaaaaaaaaatagaattctgtacaaaaaaatgtttgttttttttttgtttttgtttttgagtatttctaaaacaatcccaagtttttatcactttcataaaattaaaaatagttacctataaaagagttcatttttatgcccaaacaaaactttgttatacatcatttataaccgattatattaaatataaatatgagaaaattaataaagtatataatctatttttattcaagtatatatctacttgttcaaagcaaaaaaaaacaaaaagttggagtaatttttaagtgaatataaacaattacataatccccacttgatcatattagggtatatttttttttagaactttaaattctcactactatagtaacaccaacaagcttgaaatgaattaaaatagggctaattttgtatttaatatattttttataattattttgtatttaacattaatactttaattactctatacaaacatgtaaacatacactaaatggaggcagttgacctcacttgttatatgtatttacaatttagtccattttatgtaaatttttacattcataccccaacttttttttattataattttcttcattcatgtctttctaaatatttatatactttcattttcaaaggtaatttagtggactttagtggttgtttgttatggttgtgcttagttcctcacaatagaatcctaaccccttatatagtaacaaagctaattggaatataatacctaatatcatcactttgtcttaatttgatggctataattttttttttaaaaaaaaaatggcttaattaagaaattgatgtcatgtcaaacaaatgagtttgcttcaaaagacactacactaccctaaactatgtttctttaattcataactataggtcatgaaagtgaaattttggaatataaattatcatatatagatatgtatatattttgaaaagaaaaaaacaaatattattggattaaattaactcatgcaaagaaactgaatttcacctttttcttttttaacaaaccacttctcccatgatcttatttaaaaaaaaaaaaattgattttttttttaattccctccaccaattttaactgtaatttttttctcatttttaaacttttatttcttaattaaataaaaaatatttatatttaatatataaatatagaacctcttcttatgtttgtgtaactctttgtttgtaataattaaagattagaccattttaatttggttaattgctctctttatcttccaagttttagtcattaaaaactctcaattgtaaaatatgtatacactcacttaaatatgtattaggaaaattttaaaatgcatctcctaaaatgatttactgatacacttttatttattttggcatctaaaaaacttttttaaactaattttcttatgatcgtgtacattacagttaacacattatgtaaaattttgaaaaattcaaaaaaatgtagtacactgaaaataaggttcaaactgtctgttacacgcgtgtgaaataaactgtatgaacattactttgtataccgtaaattattctgaatttctcgaaatttcacgagataaaaagaatgcattgtaaaaacatcatatgtattattatagctctttcatttattatttgcatcaaaaatcacaaattcaactatttcatattttactactatggtttatttcatttctcctatgttagataaaataaccatactattattgtacaaacataatacaatataatatatagatatatatataaccacttttatttgttagctatgaaagttgtattaacatccataagttgttttaacttctctcctacttctgcccaccattttaaccatataatattttattaaaattcttacacaaaccaaaaaaaaaataactgaaaaaaaaatcacacaaaataataatagtatacaactatttatttatatatacataaacacaataatataatacaacaaatttcttttaacttctcccgcccacccaccattttcactcttaacattacatatacatgtcatacatatatacacacatatatatatataattacagttttttgtatagaactaaccatgataatcacgatgaactaaaagttaaaaaaatatgaacagaattgaaagaacacgtttatataacagagcagttttcaaatattaactcaacaaaaggttaaagcttcatgactaaaccaagtctctttatattcttttcatatacatacacatatatatatacacatatacatatacatatatatataagtatataacgtctcttgtcacaataactactctcacagcttttttgatgatcttaacataaacacacacgctcctcttcttcttcttcttcatttattatcatcatatatatatgtatatgtgtatgtatatgtgtatatgatgtttaatcattattaattactctcttattatacagtttcattttgacttttccgtttacacaaacagaacagagagaaaaacagagatcataatggagttcttattatttggtgtcgttttagtaactattttgtgtcgttttgaagtgggattttctctacaagaagttactagtactagtaataagatcagcttcattggttgggatgatttcaaggttgattttcagaaaatgggaaatgataataacaatgatgatgataataaagggagaaggagcagagttattgttgttgataagaatgggaatggtgattctttaactgttcaaggagctattgatttagttcctaattacaattctcagagagttaagatcttcattcttcctgggatttacaggtttggctttttaattctttaattttctccattgtttttagagtgtgaaaatctgatttttgatttgggttttttttgcagagaaaaagttttgataccaaatacaaagccatatatatcattgattgggaatcaatctcaaacatctgagactgtaattagttggaatgataaagcttctgatagagataataatgggtttcaattagggacttatagttcagcttcagtttctattgaatctgattacttttgtgccactgccattactttcgaggtaagaaattactatgaatcgagtcgaatatcacaacttcttttaccgatcttataaattttccttcttttcggtttttgttgtaatagaagctgtttagtagacaagattttacgaattcgacacaacatgaacattactgttggagccttagctcggttccaactacgagagtttgcttttgtttcatctttctaagagcggttttattcattatttaatcgaacaaacatgttttcaatctttcgtttggtattattgggggatttcggtttgggttaaacgacatgtcgttttttgttttgtttcgacagaatacagttattgctgatcctgctggatatggtatgcaagcagttgcattaagaatcagtggtgataaagctgtgttttacaaagttagaatcttgggtactcaagatactcttttggatgataccggaacacattatttctacaaatcctacattcagggcagtgttgatttcgtctttggaacagcaagatcactctacaaggtaccaacaaattcatcatcttaaaaaaaatcccatctgggcattttcggtttctgatcattaatcaaagtgttttgcgaaaataggattgtgttctacaatcaacagcaaattatgccggagcagttgcagcacatcaccgaaactcgcctcgagaaaacacaggcttctcttttgtgaactgcatggttagaggaactggaaatatttacttaggaagagcttggggagactattcaaggattatctatgcattttgttattttgagaagatcataacttctcctggatggagtgactgggatatcccatcaaggcaaaagtatatataaacattgttatttgtatctatatcataggataattggcgcgaaacccctctggcaaaactttcttaagtatttaacggtaatatctaactgacgctataagaaaattaagagtataaaattaaaacataaaaggggtttcgccgctaataactctatatctgttgtagagattaacagttattttgtgtgtaggactgctgagtttggggaatatcactgcagaggagcgggagcagatcgaaaaggtcgagttccatggatgaaatcctttaatgatgaacagataaagccttacataagtacaaactatatagatggacaacaatggctaagattgtagtttttactttctcttcaactcactcttttttttttttgtagagaaaactgacaaatatagagatatatacaaacacttgtaaggtttttgagtttctaattcaaagaagcaaaatagagaacacaaatgatctgatatcatattatagatttcaatctttttgttgttttttttacacaaagatacaaaacaagcataatgtgagtcattaaacagactattttttctgactcaatttatggagctctcctaattttgaagggtatctaagttctaatgccaattagtaaaaatcagaaaaggggtcatcaaaatcaaaatcctaattccgtcactgtacacctacaaaagaccgcccgcctcgccctgccccaaccaattcgaatgaatggaatgagttttcccctcccaagactttgtaactatttacagagacactaactaataaggtaaaaataaattaaaccactcttaacaattgacataaaattaaaaaattaatcgtagaaaacactaaaggcgtaccaactcgtgttagacatcttattatcccgctacttccattgtttctacttctttactgctcttttgctcggaagtttcatgctcctttgtgtctactttcccgtcatcattgttggaattgtcattaccattgacattcccatcttcgcctttggaactgtctgcattatcacaaccgttgtcaacttcaacaccatcattgtctctcagcgacggtgacttctcaatctcacaatcgacacagtccatatctttaggagggtcatcagaactagtagatgtagtcaagttgagattttgattttcctcttcgggaatgatgcatttcgtgctagaagggtcttcaaaagtagaagctaagccacccgaattgatgtctttatgaatagttgacgatgtggatggccttgatcctgagctagaaacaatggatatggctgaaactatgtcgggcttcgtctcaatgttaatccatttatctcccaaccaatctcgggatgttcttaggtcctttttgtgtaaattcaagaccaagctttcacctaatatcaataacaccacacaaattataacaaagaaagaaaataaattataatgcaaacatagttcatcgttcgattatcttaccagggaagaaaatttggacataatcaccacaactacctaatccagttataactccttcccaccaaccatcgctccaccatgcatcgattgcagctcctatctcgagggaaagctcggtctgttctttaataggggttggccgaattgtggggcggcctgaatgcctcatgccaagtttatctggcattgccagtttaaaagacgggatccattcctgcaatttcgggaaaattatgttatggcttaatgataagagggtcccttttctttaaatggtgagaagcttaaagaataaaagtaagcaatacctcaagattgccagatccatcctcgtcttgcaaatcatcatattggactttgatctgttttttcgatatttgcaggacggtacacctgaaccaacatcctcggatgccactatcttggcataacaattctatcttgtcatcaaccttaaacagttgagtcaaccaaggctgagatcttaaatgcttgagtgaaaataggccgtctcttattgtaccgcgatttttagatgactttttggctctcgaatgatcggtactgcttctagtcctcttcttagttccaacctttgcattttctccattgcttatgtcatccgtttcttccaatgactcagactgaaggaagaaatcaggaccgagacaagagagaatcggttgatcaaaataacctcgcaatttactcaaatcaaaagactttgttctgttacttttgaactgtctataacacatatgtactttgaccaagaaagcttgaggaattgcagcttcacatttttcataatgttcgcgagttaggactgtagcaagaccatctacacattcggcactaatgacttgagcgtatggggttataaaaacttctttcgggtgaggatttcgtattggaatcacccccttgacttcctgatttcggtgaaaccacctcactttgaccttcttttgacccctcttgtcttcatacatatcttctagataagcaatgtagtgattcgcccccttcgccataacaaacacaaaagaatgaatctgcacacaaaggaaattcggaaatatacttaacaaacatgtttcttttacacaattaatatgataaaataagtgcatttgattcaacatctcttttattgtaactaaaatgcaattttttcgaaacgatgccataacaaggtatgtagaaaaccaacttgtctttcgtctttctaatagattttctatacagaattaaaatagttttgacattagctaacagataaggagatgtatgttactcagtactatgtttggctttaatagttcgagtagattcataccgatactgtaatcccgttcctgcagaatgccggataatgcttgagctgcttaccacacgcccatggacttcctgaccaaacaatatccgaaccgtgtcccttgaaattctttgcaaaacggccctaaaatacatttatcaagcgtcaaaaataatcattgggacatagctaggagaggcataatccttatccaaattaaaataaaacctacctttccttctgatgcatgattatgattaattccattaattgggtattcaggaaactgcaatgcttgtgttgaatcatgtgtaggtgattctgaatttaaacaagaatcaaatatcagtcacaggacacacacacatatatatatgtatgtataagtagcttttaaggtgggggcatcacttttgctcctaccattctaattttttttacatgacagtatacactatagttatagtaggcatcttatacgttttcgaaaaattctaaataatttatggtatcaaaaataaaattcaaaatagtgagttgcaccctaactatttgaatcatattttcggcaccttcacttcctcaaaatttcccgaaaacagacagaatacctactatataactataatgtataccgtcatataaaaaaaaaagtttacaatttctctatataccaaaagtaagaaatgcccacctaaaaattttcctatatatatgaatattcatgtgtgaaatcaatagggttagatgtagttagttgtatacattactaatttcatctactattcaactacaccaaccatatcatatcccattaagagtaaacaaagaaaaagacaatgttgaatctgaatctagaaaggaaatagtctaaatcaaaaaccataaggggtttaagagaacataccagatctatctccatgaagattatgttgcttggagagcatagaagtgagccaatcaacaacctctcttcttgatctccatttaaaaccagcatgaatggaactactttccttaccataaacttccaaaaactcctcagcaatcacataaaacatgtgtctaacactcctttcagtgcccacaacagctagagtggattctccattagaatcttttaagaaataatgaacaactctatttcccctctcttgtgaaacaaattgttctttccattccacaaaacatggaccatttccagacattttgacaaggatttaacaaaaaaataacaaaaccccaacttgaaattctaattacatagctaagtcttgcccccaataaagatggcaaagggtccaaaagagaaaaaaccaaggtaaaattcagaacaaaaaagcaacaatctttctataatggaacatcatccccctaatattttttcaaactttatagctaaagaatcataaaaaagttttatggtttgggcatataagggcagatcagaaaacccaagctttatagctaaagatgcccaccaacccaagaacaaaatcccaactatgaaattgtttttagaaaaagaaatcaaaagacttttaccatttaatcaaagcacagcttcagaaccaattaactctctcagcagatgaacttcaaaacccaacaaagaatcaaaagagcctataaagagctgtgctttgaaggagagaagacagatcagaaacccatcaagccaagagaactaaaaataaaaactttccttgattgtcccaaaagaaccaaaaaagaaatggtcttggccggttgttttctacagaatcaaccaaaagaaccaaatgggcatctcagttttcaacagattagagagaaagaaagcttgagagggttggaagagaagaagagaggagaatgcattgtatttactttggtgggtacaaaggagagtaaagaaagagagataaaaaagatggagaatttgaggttagagaaggtgaaagatgaaaacttgaaatggccatggaacatggaaagtgagatgagaatgagttgcagagctttggagctgacaatggtggtgtggtgggaaagggatgaacagaagaatagttgaacaaacaacaataaaggttaaaactttttttttcttcttaatattattattaatcactaatcactatcatttctattaattaattaattaattattaattaatttaatcttttgtcaaacaaatgaaatgggcttgggtccatgggcctgtttctacatcacgtttgtaacttccatcttttttttttcttgttttgaaatttaccacttttacttatatatttttttgaagggaaagtttaatatgtaataatgtaattcaaaacaatataaataaatttgattatattaaattataggaaaaatttagatataaataaaacaaaaatttataaaatagatacaaaaatacttcaacacgatcaaatttttatttttactcttttgaaaatttttatttacaaaaaaatctcttcagtaaaaataataaatagttttttatgttgttttattgttgtattatagctattatgagtatttttctggttgttttatagtttatttataattgatttatagctgtcgtgagattatttttttgattgtttttagttgttttcttattttttgctgagtaatgtgtatttttgtaattttaaaacttaaaaagtatattttgtaaataaaaattttagattgtaaaattgtaaataaaatataaaaaaatatttttaaaaatttccctaaataaaatatattcaaataaatgcattttagatattgagataaaaaatattcatatgaaatattattagagttaaaaagatgaaagtaagattaaacaacattgtaacttgtactaaagaatgtaaaaaaaaaataataagaaaaattattaatgagttttacaaattatttttagttgatcttttttttttaatattgatatgcatatataaattattaaagttgtgaatatagtgtgcctttttgaattcattaatttggattatttattttgggctattttcaaaaatatgggaaaaattattaaggttatgataaatatggcataaaaagt

SEQ ID NO: 161326 - DNA, 2619 bp, Cannabis sativa
agagagagagagagagagcttaagaatgtgttttgtcttctaccaaaactaattaatcaatagttaatttcttttacaattatcagctgaatatagttctacaagaatccactaaagggcaaacctcaccgaggtaacaaaattacccttttcctcttacttacacctttagtaatctaaaggtttaggggtaaaatggtccattaccatcaccccgcctaacccgatattcaaagttcctctaatgtttgtcccgctaagaaaaaagttctaaatttacccatgtgactctaacagctatccgtcgtattttccatcgtcaccgagtaaaaatcataaaaattgcataattcatatttagtataaataatactcccagagtttaataaaatctccagaattgagaaattataactctaatgcccatttctaataataggacccacaacaatattaaatcataaataattataaaaatatcaataattaatgctaattgtctttactaatccatattctaatatgcagtcattacatatattcataccttatagtgttatacaggttacatgggtgagtctaagttcaacccgacctgtgagtatataaatgtgcagacccaaaacccaacctgtgtaatgaacgagttcaatctgacttgcccttgaataaagggatttttctttatttttggtttcacgggtcaagtctggacgggttgaccagatcgagccctaacctagtacaaatattcaaccataataatgtcgatatcaagattgaaaaaaaaggtgaacagttgggtgggtgcggatccgacccgaaacaatgaggggcgggtcatacacctgaaaattggcctgattgatttgggttagaaccaaaccctccctgattatatgggctttttttacacccctagcctcagtactaggctgagccttggaccgaaatgaaacacgaccttgaacccgatcgcggacccaaacttggacctgatcgtggggccgaactttgaccaggtctaaggcctcaaccctagtttcggagcctgccccgaatcctgatgcagtccaaactaatcgctcctaagaatttatttgaccctcatatacgtaatctagtatctaagaatgcacatatctttacaatgttttctatatttttcaaccttgtaacaaatgtataacaaatgagctatatagtcactatttagagttttccactctcatcatttaaactggaatgagtgtcacaaatcccttggttgttgggaataatgattaattgagggttcgtagacttgattgggtgagttataggagctattggaaccaaacaaaacactccaaaaactttcaaaaactatgtgctgaaaaaaggcttgactgtagatgacatgttatctaaggtggctgccaacaatttttgagcattttgtttttctacttcaaacgctccaaatcttttttagtagactttctaccatgtacaaccacaccctattaatgagaaaattaagtcaccaacaactaattagtgactcatttactaagatgatgaaagttacaaatttaattattcattaatttaaagcatttgcaacttcatttatgatcatcatcgacatattttttgtaattttatattgtaatgttacaattggacaaaaatattattttgtgacactcaattctttgtcatataattatttaatctaacattatattataactaataaaacataacttatacacacataaatgagtaaaaaaaattaaaaacaatatttaaacatttataaacattatataaatagcattaagaatttcaaattcatgttaagtacatttcttttttcacacacttactgttagtgaccatttgggagttacaaatatataactaaattatttatacacccaaaaatgatagtacaaaattgataaattatttttttcactcaaattattaaatttaatttatgtattattttgtattcatgttgtggagtgtaattcttctgttatatactaggcttgggtttctaaggctcgtcttagtagtaacgattgtgaattgatttacgtgtctttttgttgtgttcatttgtaagttacacttattaatatattttgtcaatatacattaaatgtatatatatatttatatatatatatattatatatatatatataatgtagtatatgtagtaggtgtagctgtacaaattatggttgtgttgcgtgatatcttcacaatgctaccttaaccttactttaaaaaaaagtttatataaaatcataatggtagcttcaaataagaatactatataataataaatgtatatccattttttttcttcttttttttttttaaaaaaaaaaataagtatattagcacgaaactgtttttacacaatctgtaacaatactagtaacaggccccaatatcagatctctgtacaaagattatcaacccaattttgatctttaactaccactctctcttctgtaattaggaatggttgagatgcaaaataaccttaaatttggtaactaaattagtaaatgtccattttttaaaaaaattaagaaaattgtcaaatctaataaatta

SEQ ID NO: 161327 - DNA, 4275 bp, Cannabis sativa
ataataagaattttttttagggataataaataaaattgtcctttataaaaacataaaaatttggtccttttttatatttatgaaataatcgctttctataatagatatttgtttttttttttcgaaaggaagtgtaatagattagatagttgatgagtgactatgttattagtcacaaattattttttaaaataaataaataacatacgatacgaagaatagatgtaatgagacaaaagagagtgaggaagagagccttatccttcttcttcttcttcttcttcttcttcttagcaattgagctgtcataacaaaactatctctctctctctcttccttcaatagccgttttcattttctcccgttgggaccaccaaagtctccttcttcgcctgaaagatgccttaaacatcatcatcatcatcatcatcgactgggtttggatttagatttgggtaacttaattaattttctaggtgggttcgtgatttttctgctccaacaaaaaaacaaaattgattttttttaatcctaacgactttcccacatgggattgggactgattctcaaaccgaagaaaggcaaagattacaactttgaaagatggaatcaattcaacactgtttaaacacctcttattactcactatggattacagatgctttggaagaaatcccacacaatttcaccatcaccgatcctagtatctccggccacccaatcgttttcgccagccgtggcttcttaaaaatgacaggttactccaaaagcgaggtcatcgggaagaatgggaggatgtttcagggtcccaggacttgtagaaggtcggttatggaggttcgtgaggctgttagggaagagagagctattcagattaatttgttgaattatcgcaaggatgggacacccttttggattttgtttcatatgtgtcctgttttcagtaaggaagatgggaaagtcatcaactttatcgctgttcaggtccctcttcatctttccacaccaccaacaacaacaacagcaactgggttttccagatatcaacaacaactgggttcatgtagaagacaagtatggtctgattctttgactcctgcagcttcttctgatgtttcaggtatgtggtatgtaattgaattgaattgaattgagtcgaaatctttaaggaaacatctaaaaccaaaacaccccgacaaccccttaatgaattaaacatagtacaacaatataagaatgtcttaatatcaactcaatacgtactaagtatgcccacatacataaatcaacattcatggtctattactcacgagttttttttatatagtgtaataacgggcatcatctcttatgtctattctatctatttgtgttgttgaatgaactgaattgaatttgatttgatttaacaaagcagaaatgaaaattgaagaagcttgggaagcaagtgatgcagagaagaataaagctgcttctggcatcagtagagtgttgtctgtgctaactcactatagcgagtcaacagggagagttgtgtgtggaaagagatgtggaggcttatctggggtgggacttctaagttcatccttaactatttctcttggtagaatcaaacaaagctttgtattgtgagttattattgcattttttactcatcatcatcatcatcatcatcttccaaagactgctgactgaatttctctgtgtttatgtttgtgtttggattcaatgcataggactgatcctcacttacctgacatgccaatagtttacgcaagtgatgctttcttaaagttaacaggtgctttaaacttgttatccaatacaaatttagtcacacatatatataatctctaatgtcttttggctacttatacaggttattcctggcatgaagtaatagggagaaactgtaggtttttgaatggggaggatacagattcctcagccttgtgtaaggtataacacttcattcataagacattgactctgtcatttggtttgaatatctgatgatttcatatttgagagagcttgttgttttcggtttacccagatagaggaaaatattcaaatggaacgggcatgcacagtacgtatcttgagttacaggttgattcttatttctttatccaaatatccaataggttacttaggtaggtattatgaaagtctgcaattttcttatctgaattttaatgaaaatgcattgttcttcattttcagaaagaataagagttcattttggaattctcttcacgtatcaccagttcgtaatgcttccgggaaggtattttacatgctactatacttgtttttcttttataaaaagcttcaactcgatatgacttttcattagttacatgaactccatttgtttctacatagccaggtcaaaaattgttgaggcaaaaagaaaagaaatgaatgtgcataattagacaaatgttttaaattgattgagagaaaacatgtaccacattcgcctcatttttatatattggcgaagacaaaaacagtgttctcgaatgtttcagtgtacacaccttgtgatagtctgaggtttttcttatgtcgttaaaattgtttgattgttcagattgcatacattgtgggtgttcatatgttgcaagaaagcagttatgaacagggccagggggaacacggactgagccctgagatgaaacaacttagcacagttggtgctgttaaaattgcagtgaggagttcgtcgatgggagctagctcgtcgtccaagtcttagcaccttaatcatcttggccaattgcaattaatagtagttctcatacgagagagataatacaatagaaagaagcctcttggaacggaaccttaatcattcccgtaagtcttcctcagcggctacgtcccacgaaacaaatcttatgagagctcttgtttgcagtgtagccaagattaccaatttacgagacatgtaataaactagacatggtacttggaggaaactgggggagatgaactgaagacttgtatgccgaaaaaagtatgaactgaagacttgtgagttcatttgggatgatgatgatggtatcatataggtgctcccttcgaatatgaatattcttcgatgacagaactgagactcccaagttccaatccatctcggtatgatgtcaaccagatcaagaatttcaacacagcttcatgtttgtttgttttcatgattgaatgttggtatagcttgtgaggggacattatacattataattctatacgtagcttatacatatcacattacaccagttgatttcattatatcccaaatgcaatgacctatatactctcaatctgtctgaaggaagaacggacaataaagaatgattggatcaaaaaaaaaaaaaactagtcccattgcttttatgcgagtagattaatattgtacttttcttgttctgttttcatatttcacattcttttaagactattgaggaatctgacaacatacaattaaatttgaaaaacacggtgatgatttctcatgagtcaaacataatttatcaataagagcctgtttgaatacatacaaaagctcataccacaatttcattcctttgctgcaatattatgccaaaatgataatatatgtaacattatcattagctaattacatgtgttgatcatgctattaatcagctaactattggcttaattataaaattagttttatcacacattttctgtgttataaaagctgagaattgtgaaatgacttgtcattccacaatttaaaccttatttccctgaaaaattaaggaaagccaaagttgcagttcagaaagcaactattttctcattaaaatctgatgcagaaagcaataaatcatccgaatgagttttacacaatgaactcaaaacgaaaatagcacaactgaactccattgagatagcccaatgagatattacttaaaataaaaagcatcctacagtaaatatagataaaatccagccaaatatgagtgaatttcctaacacaacaccctcatcagaaaaccaagcgttcacaaaaaaagaacggaagcttgaatgcaagcttctccagcaagtactagctcttcctttttactcaaatgtatcatcatcgtcatcaggaagaggctgattagcagcttgagcaagttcggcttcatgactgcaacaaacaacaaacgcttatttaagactagaatatgaaagaggtgatatcgaagcgggtacaaatggtgtgtgtggcaatacttgcaaatgggaaagaag

SEQ ID NO: 161328 - DNA, 5012 bp, Cannabis sativa
tcgagaatttttatggcacataatctcatctcatcactctttttttcttttttgtttcttccatataaactgatctacagaatataaagagaagaataaaaatgaatgtttttgctgctgctgcaatactaactatgtaactaaaacagggctataagcctatatacctataatataataacgtgcatttttttttggctcttatatatatttatattactctgatcaaacttatccttaaatttacttatattctttcatgttattataatttagtcaggtccagtcagtcatctgaaaccctctctctttcatatattctttcatgtgttataatttgtagctgtagctatagctacaccaattagggaaatttagactttgaccctataaaaaaacctgggaattatatatataactgataatgaagagagaattggatcaagctgaaaataatgaatactaaaactgcttcattataaatatatgtatatatatatttacagaaatcagaggggaaatggaaattgatcacactgcaaattcagatacatgtatatatatattatatacagagcagatcaatacactacacctaaaagggaagaaaaataccctacagtgaacttaattaattaattactccattaattgtatatacaccagaaatgaaggaagaagaagagaaaacactatattgattttgatattattaattattatttgtttttctaaaactaaaactaaattatattgtattgtatatatatatgtataaattaatcatgctgcaggtacatgcaatatatatatatatataattaaaaagagtagtattaataaaaattcatgatcgaacgccttacctgagagagtctagtacttgatcaggaaattcaggtgtgatatagctatagtatatcactgtttggcttgtaataataatatataattttatgttatagtactcgtttaagacagaaaagaatactgaagaagaaaacaagaacaattgttttagatgatgatgatgatgatgattattattagtatgattaatgaaaattttgaaacttatatatatgaaaaacaatataaatattatagttgtacagagagagagagagagtttggagatagatggatagatagataagaaaaaatgggttaagaagtgagagagaattatataaaaaggaattgaggaagggaaggaccgctcgattgcgcatggcttaaagcttgtccccagtacctgatgtcactctctctctctctctttaattaatttcatatatatatatatatattttctttttctcatgagattttttgaattaatttaatttaattattcaaaccatatattactatttattattaatataactcatcaactttctttttctagtaatagtagtgtacttacttactatactactactactatactatcatatatagttaatatcaagcttgctaaagacatattattacttatctagctagatgggtgtaaattaattttgtgctgaatttaatttattagtgcaaaaattaaaattgttaatgtttgttggaagttttatttgtatttttttttatgtcaaagttatgaaactctaccaatgcacacatatttaaagtgaaaaaaaattgtttcaaggtagacatttcattaagatttattaggatttttatcttttgttataatttgttaataaaacattaatataaacaaaaaaacatatgcctcaataattatttaatgacgaattatgaaaatgtgtatataaatacaatcttagtgcttatgtttgatgtttagtgtcaataaaataaattagagctagttagttattaactagatcatcttactgtttataaaatgaaataatgtaattaaatagaacgtacaattgcaatataattttttgtagtccagaaaaatttatccaaaggaaaaaattccacaaaaatcataattgcaaaaatcatttttattgttttattaatatttagtatatagaaaagtaaataaaatcaatatttaattagtgagtcacactcacattcgactgaattgttagtacatgtgtcaaatttaagagactttgtacagtattatattaaagttttaatcatctataataagattataagaggtggctagtcttgattcctttctctaaccccttttccatgatataattaattgtaattaagtaagggtgaaattaatagatcgaccaaatttagtttattttgaagactatatgattactttcatcgacattgatgttttatcaaatctgtcaatgtctaattagaagttgcaattaagtaatagtaatatgttgtagctagtgattatatatgtctcattctttctacatctcatatttttactttttatataaatatatatatatcatcacttgtctaaaaaaaatatttcaaatttctaattattaagcccctaactattcattaattttataaattagggactaatatgataaagcaagtaaccttttttggggataattaagtaagtacgaaataataagtacacttaattaatttgcatattcttttctctacaaagaaaatttaagtaaattagatggataataataggacaatatttcaagattaattaataattatgattattatctatacagtctcatgagttttcaaccgattgagacccttgtttaaattatatatatagatatatatatttaaaatattattatagtgttgcatgagatgaggataaaaaataaagtcagaattaatacttagaagcttctctgtatggtacgatctattcctcaatcactttctaaacgactcatatttcttttatagcattattattgtgtcttacctaagtttttatttttattattattattattattattccttaattaatataaattacaatatatatatgttctaaaatggtattaggtcttgtttaattagctagatagatgaatgatattattagttgtggatataaatatattataggactataatctacaccttaatacatcattaatattagtgatatcaatctatagtttggtaattaagagactgatcaccctataatttatttttctaaaataaattttaataatttgatcaatgcatgttatgttataataaattaaatatagggaaatttatatttttccttaatttgactagtgatgataagaagagccctaattgaaagctcctcatgaacttaattattattattagttaatcccaaaaaaatcaaaatctcaccaaaatctcacgatatacaaaagttttcctttctcgttgtacttttcactttttcgttttcaaacatcccgacacacacacacctgccaagctggcaaaaaacgacagcattagcgagcaaaacgacagcccaattttagatcaaccgaggtagctagctcttccagcgggggcggctcacatggcttgtttcctggtataattacgaaaataccctccataaagacgaattgattttctgtttttgaggagggtaatttggtaaattcgagtagcgttttacagagtgggaatgatttgtggacaagtattttggtgaaggaagtgtaataagtagaaaaaagtaggggaaaacgtagactgaacggggaagaaaggctgggttggtatacatatatattactttacgtagatcataaacaaagcaaagatcaataaaaatatctcactatatataaaggcctctctatatattatatatatgtgactgtttgtgaggaaaacatattgaggaggacccccactttttgttttcagcacatcaatttttaggccccaaatattgtttgtactcttatatataacgcaaatgaaaaagtagactagaaataattaatgttcgaacaatataaaaatttgtttttatttattaactgcttttattatttcgtaagatcttatttaattggttttcaaaaatctcagtaactaatttagtatttttattgagagctaaggaaatatctaagtcacggtgttactacaacgtggtggctacacgaaaaaaatgtgataaagaagactcttcgggacaacccgacctccacattttgttttcaacaaatcaatatttagaccccaaaatattgtttgtactcttgtatataaggtaattttttttttttttttaaaaaaaaaaccttattcattttttcccaaaaaatcttacctagagttgtaaactaaacatctatctcttttaatttgcattttgagtcttgaattgaatatatatttatattataaatatattagaatattttctattagatcattgtattgtattattttgtgtataaaattttatttatctatcaaaatataaattgcatattataatgttaatacatatcaaatgaatatagtacgtagctagagataaatatatttatgtaacaaaatataatataatactatacaatgcaatcagggcgaagttaatgtgaggcatggggccaaaatgtaaaagaaaaatttaagtgggtcacttaattaatttataaaaaaaaaattacaaaattataataatatatataaaaaataaacaatttggatgcaaggcctctcatgagagactgatctatctacgaatacaatatatgagttattatcaaacgaattttatatataagtaatgtatattaagggcggttataaggatggcttaattatatattaaagagttctagaagagagggaatatatatagtggtggcttcgaaatgaatatatcatgctaacatatagattgttagttaatagatatcattaactatcataacaaagatgatggtcggcttaagctatatccttttcgccggttcattatatctttatatattaaaagtgtctatttaacggcattttttggtttaacagaatataccttaaaaataaaaaaaatattcgttaaatttaac

SEQ ID NO: 161329 - DNA, 15006 bp, Cannabis sativa
tttttggtcataaatggtaggtaacaggaagttctccaagtaggaggaagagagagaaaacaaaaagggtgaggctatgattgaatattggagaacaatggctattggtcaaggaaaaataagtgtgctatattgaagtctgttttgttggtcactggactactatgattgaaatctattactatctcaacatttacacataatgcccatccttaaaatagagtgtgtgttaatcttttttagatcatattaactaacgttaatgtgaattgaggtttttgggagaaagctaagttctttcccgttgttgatgaaatgaaaaggctaagagtagtttgagtacaataaagtatttgtgaaatttgtttctaatagaatttagaactatcatattttataaggatatgtaacattttgttgctcaatgctaattaataaaaatgaactaccacggttgtaagaaaagacaaacgtttagtggtggttccttcttggcggctttcctgatactgatgcctctattgtcatcgttctctctattaatgagatttcttgattctttatatgcagacattcaacaattattatctgaggcacaacatcgttggttgcgaccagctgaaatttgtgaaattcttcgtaaccatcaaacttttcgtatttcaccagagcccccaagcaggccaccaagtatgaatttattttctttccccaacattcacgaaagtaattttcatttatcagttcgtcatagggattggtgttataagtgtttctgttaacattgcaaaccattatgttagctgatatttattatatgaataatagatgagcatgattcgttatcttcttagcagtcccacaagaggctttataattctaaacatcttatagagtatataagtagctgtcacaaaatttatgatctatcataatatagccaccagtcaacacaaaagcattgagaaagagtatgctttaatttcatttttatactccaaacacactgcccatagaatagcaaggaccatgacctccatatgcttgttttgatgatagctcttcctgaattttgatttcatattgctgtaatatatatttagaaattaagttcatacatcaatagtttcgtgggcgataatttgatagcaggttatttacttgctctaattcaatataatttcctcaatcaaacttctattagcttgaattgctctattatttgttttcaagacctttaaatccatgtgccctcaaaatatattattttattaaacccaagagtggaagtagctaggcatgtggtttgttctcacattgaggtcttgtttgagaccctctagatacctacatagctgttgttatagcagagaaattgctgtaattattatagcagattatttagcaattgctatagcaatttctgtaatatatatttagaaattaagttcatacatttatagtttcgtagtataatttgatagcagattctttatttcctctagttttatataatttcctcaatcaaacttcttctagattgaagtgctctattatttgttttcaagaccttttaaatctatctgttcataaaacattttattgtattaaacccaagagtggtagctcaaatagttaggcatgtggtttgctcatacatggaggtcttgtttgagacctcctagatacctacatagcaattgttatagttttgtagtccccaaatattgtagggttaggtggggaccctagatagaaacaataaaattgtattttagtagcaaaatgcttttcctatttaaaataagaatttaaaatttttggatatttaccttcaaggcatgtgttaggtagttacactataaattcaagacaattgtattgttttaagctcctatattctttgtcttcaagacaattttgagatacatatgctctgaaattgtattttatcatcaaaatgcttattttccgtagaaaataaacatttttatatctaccttcaggggtcatgtgttaggtgccaaagcaagttgtactgagtttaaaatccttgtagcgggacagcgtgaacttgttattccctctttaatttcataggcttgttctttgtaaaaaaaaatatatatttcatgcttggctttatgcattgggcttgtccaatccaattgtcttatcccgtgcatacctatgaaagggagtcttattatatcatattacatatgttaaaacttatcctttttagaattaatgacatagtatgttcactttcaagattatcaaacattcatgtatgcttcttttgaagtatttccacttaaaaggatatcatattgacatatattccacctcactaggtggttcactttttctgtttgatcggaatgttttaagatactttagaaaggatggacataactggaggaagaaaaaagatggaaagaccgtgaaagaggctcatgaaaaattaaaggtaaggtttctttaaattgtattgttgattattttaattgccttactaagggtttatgttttttcgaaaagaaactgaccagcataggatctttattagctatttgggcctagttagttgagtcctgggagtaccaattccaaagaaagtcaaaacaatttttaactgattttttttcttatttattcaagttatataaccaatctagatacaaatctgagattaagctggattactcaactaaaagaaaactgaaattcattttgtaatcataatatggtattttgggttgttagttgtacttggaaggtctatctcttttttgtttctcctcttttttattttggtttcttacatagatggatatatatatatctgagtggtgacatcctttaagcaattttaggttggaagcgttgatgtgctccattgctactatgctcatggagaagataacgaatattttcagaggcggagctattggatgcttgaagagtgagaataactattcacgatactgatttatattttggaacacatttatatgttttaacttctatgaatgcattaacatgcacacatatatttatattgttgagcattttgtaaatcaataggctctgcttctatgcctcttgtcactgtatagcattatgatcaatgctgtaaatagaagtgaaacacttcttgattaatattgccagtgtctgggacactaaattttgcaccaaagttatatcaataaatatgaaactgaggtgacgtaaaatcatgtagcatattttacttttaacagcactgtctcgctatcgttgctagaattatgattggccccttatctggtttacttccaggtgcagaaatgacatgccgggcaattaaaataattttaattggcttttttttttttttttgtagtttgggtagctctagttagttggggtctctttagtgctaattctatatgtttgctaggttgggccaaagggtatataagggagccttagtatatgctgagggacatcagattgttaatgattgcaacacctacttcgtatcagtaagattgctctacagacccaagagtggtagctcaaatggtcagacatgtggttgatctcacaaggtccgaggttcgagtccctcttgggtacctataatgcaattatagtttcctggtccctaaatttagggttagggagggagcctagtttaaaaagaaaaatatgattacgaaattatttcaatttttagatttctgtgtagagcttattaaattagtgcatgtatcttttctcttttcatgatatttttatcaacttataggcttgagaattatcaaatgcatttgattctctaatatgccgtattttggaagaaagccttcatttacagtaaaagggaaaaagaagtcttctgttacggcctcttgtatgataaggataaatttatggtttttaaaacctaagaaatgagtcaatagtagacaaatatagactgatcatgagttaatttcacatctcatggctattatttgctggtttccttgacctcctgtaaatgttacagcaataagaattgggagggtcttctagcattgtgcagtactgcatagtacatgcgttttggctttatgtcaggggaaaaatggaaggatatattaatgaggcctcaagactctcaaccttttggacagtagaatatttgtttcttgtaactagcttgagctggtcaggtgttgtttaaaagagtttgcttgtggagatttaatgtttgtttgctatgtcttaaggcattttatatatttttctcctatgtattttattccccttgcaatatatctctactttgtttaagatctggtagtgtatgggtacacctgcatttttaaagggatttggtcatagtgtccaagctagatatttttcagatgaaataatagtcatcgtaaactttatcatgattgttttccttgaggttttttgtgttttctttttgttgcagggataagaatatcgtctttgttcactatttggaagtaaaggtaactgttcttcttttcattttcttgttgcgttcagtgttattctggtattgatggttttgctttagccttcacattttctgttcgtggtggagcttcacagaatttatattactaggttaaatgtttatctcgttaatataaataaagcatatactttatagcttgccttctgggtgctatgctatttgaaccagagtattgcacttatcatcctcaagattttcgtctgtagttttttagccttttaataagtttaaaatttttattaagtaaatttgagtgctaaccagtcacaccagtaggaatagtgatgagtggtttgagatgagaactattgtctaattagtattagtctacaccattttcatgtaagtttcaatcctttgttttacactattgcagattttccgttaattgtcgactgttgtactttaattatccttatagcatggtagttaaatagattctcttgtaaaaaaaaggtatttacagtacattttttttcttcagggaaatagaacaaatgttggaggcattagagagactgatgacagttcatcaagtctccgagagggcagccctcagacttctagttcttctacaagtcaatacaaagctccttcaggaagcacagattatacgagtccaagtccaaacagctgtttgacatcgttatgtgaagatgctgattcaggtacattttactcctaaaatttattattagaaatcacatttttaaaataattatgataataatcctgagtgatcctaataatacagcagtagcagtcgtactaataatgacagtaatagtaacaacaactatattgtcatcttcacttggggggccataacatctattttgagagtcttataaaattgatgatgaatgtcattttttatcattgattagtctaaagtacgaactggattttctgtacaacttgaaattaattgcaggggatattcaccaagcaaattccagattgcccccatttgctgagtcacgacaactacaatttggggatggaccactaaggaataatctggacgctggtttctctctgcatcacagttcaagtaattgtttattgtggttttaatttacctcaagagtgtttagatttttcttttctttttctgtgttatgtcttcggctaacaatgttatatgttcttactagatcatcgtaaagagcagtcatcaattcatgtagaagattatattccccaatttaaggaagaaacacctaattttactaatcctgtggctggctctcaaaactcacttggtttgggaacctgggaagagattttggaacaatgcagtacaggttataatactgtaccttctcatgtatcagtatcacccagccaacatgcttttgtgggagttgcacatgatcgagaaaatgtgatacaaggcaagttcttggctcgagaaattgtcaaagaagagcttgagaattctctgccgagcgactcaacttggcaggtatgttacaattcagtattctgtcttttaattttcctaagaatcctggggtgctagctgagttattaggcaggcttgtggttctcctacaatgttttgtgtttgagtttttcaggaacacatacttgctgaataaccagtaagtaaccacatctttcttgctagccaaagcttgtaaggttcagcttgaatccaatttcaaattcaagccagattgggtttggggaatatttgtaatttactatcaaaagactcaaaacaaaataacctttatcataactcgttttgtatagtttgataccagaatatgaaactatagcaaattagcaatagctatctctgtagatgcccaagaggggttgaaccttagatcttgtgggagcaaatcacaggcctgactataccttgatttcttgccccccctctcttctctcccaaaaccctaatacttaatgatgaagtataattctcattgatctcttatcttacttaaactggattattttccttctgaatcactcatcttccattttcaaatttcttttgagagaatcaatttcctaaaccatatggaaggctgattcctgtttatgtacatttgtattatttgatttggtttaaccaatctataaattgtactttgtggatctgattaaatttctgatgtgctagataagaattttgattggatgtttattttccaatggggaaaatcttgttctccttgataaagtaaggatatatgctcaatcttattcttctttttatctttttgcctagttttcttctggagacaacgtgccatctcaccttaaagggttggtggaacagtcatcaaatttggacttgtcctttgacattggacacatattgtttgagaaaaatactcttgattctaacttgagtactcctgatcagtttagtactcatcatggtcagcaaaatgagaggcgtgtgcagaacgacctacaagtacagtttacaaatatggagtctcaatcttcaatgccatataagttcgataacaatataaatacggatggaaatgtaaattataatttcactttaagacaacaactactggatggtgaagaaggtctgaagaaagtcgacagcttttctcggtggatcagcaaggcacttggggatgtagatctgcaaatgcagtcctcttctggcatcccctggagcactgttgaatgtgggagtgcggatgatgattcatcattgagcccttctatttcccaggaccagctcttcaccattatcgatttttctccaaaatgggccttcacagactcacagccagaggtattttgcatgttatttacctaatggggaataatattagaagcacaatgttatgaaatctctcatatgtcctgaagttttctgcatgagtactaacaaatcagctttcactgcatattttctaagttgcacctaacacctttttgctttcttgtgccttgttatattcctgcttttgtaaatagaatatgatttttgaagaattttatcatttgataatctttgctaaaatttcgggttgcaacttgggtctacaagaccaaaggttttgagggactttctttccaaggcctcagtagagagtgtgaatgctttctgcaataagctactattttgggtctttatctcggcttatttttctttttcttctgctgaggaaaataggttttgtgtagaaagcttatctatccttatgtttttacttgtttggtcaacacggttgtcctctgccataagtgaggctcctaataaatttgggaggaggtcagtcttagacatatgatcactgtaaagaaatatgatctttgttaaaattaagaaaatgtgttagaagctgaatatagtatatttttgatattatttcataatataatttgttaatttgctttaaaaagcatgttactgacactttgccatctgttgaatttcactgcgctacatacaatatctgtggatgagattgatgatgcttttattcttattgtggaatcttaattattattattattatttactttatttatttttaaacaggttctggtatttggaaattttttaaagagtcaacaagaggtggcaaaatacaggtggtcctgtatgtttggagaggtggaggttgctgcagaggttttagcatatgggattctttgttgccaagctccaccacacagggatggtttggttccgttctatgttacctgttccaacaggttagcttgtagtgagttgagggagtttaattataagtttggctctactaaagatatagaaatcacagatatctatgatggcaatacaattgagctttctcttcacctaagacttgagaaattactgtcacttgctgtaaacccttcaagcttctcctttaaaattgtcgcggagaaacgaaacttgattaataagattatttcactgaaggaggaagatgaaggttaccagcaggtagaccaaacaaacgatactggtttctcccaatatgaggtgagagatcatctacttactaagctgatgaaagagaaactgtactcgtggcttcttcacaaaacaatcgaagatggtaaagggccaaatatattagatgatgacgggcaaggtgtgttacatctagcagctgctctcggttatgactgggcaattaagccaattgtcacggcaggagttagcattaatttccgtgatattaacggttggactgcgcttcattgggcagcattctatggcaggtaagggcccctaactttgtgctgtttcaatgtatgtttatattgtgattatttccgtctataaatgtatttatgtgtctaccttaagtttgtagatagactaatttgactgccttaagtttttttttgttttgaacaaactgccttatgttttatacatagactaatctgacaaaccgaagttctcttttgtatcctagatatttcaagtaccatgtaagcatctagctacatatttatttttttgaaaaaagagaaaggtcacttgtcgtctaacccctcccccgttaagttattgaaaccctcacttgtagcggaggaataccgtggatacaatagctttagcacaaaacgaactaaaaacatacggtaccaaaacagttgaggcacattttgagcaatcatctaaatatgtagcatctagatacatatgtagatgattgctgaaaatgtgtctcaactgtttctaagttactgattgctttcatgtatttattatttgtatatgaactaccattgatgtcaatcttgtttggaaagctaatttcttttcttgctttttactcttaaaatatagggagcagacagttgcatatcttgtctctcttggggcagctcctggatttgtgactgatccatctccagaattcctgtctggtagaacaccggcagacctagcatctgttaatggacacaaaggtatctctggtttccttgcagagtcttccttaacaagtcacctttcttccctggaacttgttgattcaaaggaagatggtgttgttgaaagttctgctacgaaggctatccaaaccgtttcagaaagaacaacaactcctaggacttacggtgaaatgccagatgcactttcactgaaggattcacttactgctgttcgtaatgccacacaagctgctgatcgtatacatcaaatgttccggatgcagtcattagagagaagacgattaaatgagtatggtgatgatggactattagatgagcgagctctttcacttttggctgggaagtcaagcaaggctggaccaaatgatgggcaaactcatactgctgctgtacaaatacagaaaaaatatcggggttggaagaagagaaaagagttcctgataattcggcaaagaattgttaaaatacaggttagttgaactttttctttttggatgtattttgtaaccaccctctctgaggaagatcttctagctcacctttaaattgtgctccacatactaatgtagtctttgaaaaatctgaatgggagctgtttggaatttgtggctttttatgactggcaaaattaaggttgcttcaggagaaaaatataatctgttttcatttaattttgaaaatcctggaaccagaatctaggaacatagttttgggtcttgggctgtggtatcctgggagtaactacctggctgtcattgttctataatgattgattttatctttgtacattttgatattatgtaaattaataaatatatattatatacacacacttagatgaaccaaaagaaaaatggcccaaaagctgctcgtcttaatttatttctactttataaatctaaatgtgtcgatagtaattaactaatgtgtagtgaatgacaattgatgaagttcaaatttactctccaagagggcgaaaagagtattttcatgttagaaattattattaatcttttaaactcacaatatagttaatttcttaattcattgataatgagctagaatgctataacttcttccgtatcggaaatttttatctttaaattcacattaaagttaacttcttaagagtcattggtcatgaccaagaatgctaacttcttccgtttcagaaattattattctttacactcacattaaagctaacttcttccatattagaaatcattgattatgaacaagaatgctaacttctagttttaattgtttgaaggcccatgtaagaggacaccaggtaaggaaacagtatagagcaatcacctggtcagtagggatcctggaaaaggttatattgcgttggagacgtaaagggagtggtttgcggggatttcgacctgatgcagttaataaagaggcagtcatgcaaagtttacccttaaaagaagatgattatgatttctttaaggaaggacggaagcaaacagaggaaaggttacaaaaggcacttactagggtaaagtcaatggttcaatatccagagggacgagctcagtatcgcagagtgctaaatgttgttgaagggctacgagagaccaaggtatgtataagtcagtgttaatgttttcaaagggtcaatgttcttcattccattgcatattgtctaaagcttatcataatgtccaacttgtttctcaagtaaagggatcattgatgaataccgttttcagcttttcaaattattaagtgaatagctctagaatttattagatctggctcaagttcttgaagtcatctgtcaaacctttactaattactaagtctttatgctcgtcaactagtcttacgctcctataatttgtgacatctttttattaagtatccactgttcacctatgtacgaaacttcacaaatttgcctactttgaaaaatttgcataataatggatgtgattttcattttgtttagcaacctcttttaaacaaatatgtaccttatttgagtaaataaggacgcatgtcaatttatattcactatactggatgtatgactgtctatgatccttctgagtggattgtcttcttgtttatttgtcagaaataattcttttcatttcgcaaaaagcttctgttctgaaaggttaactgggaaaacctgtttccttgccagttggccctgtcccgtttttgtttttagttttgcttggaatgttactttctttctactgtgaatgactagttgtttaatagcaattctattattatggtcattatcttcatgttcattctgttgctacaaatgctgtaactaatttggtggggctttaacaatcctttttatatttgtcagacggattttacaatgaatgaatcagaagaaacaacttatgacgacctgattgaaatcgataagttgttggacgatgatagtttcatgtatgcataagagtgaggaatgtgtctcttaatctgtgtatgtttacctgatcagcccaacctgtaggtctgtaaatacaccagggctggtttcttcaatgatttcaatatcttacctaatcttgtgtgtagatgtaatttgttaaccaaattagtcaaatcagttagataatgttcttagcaggtttgttagtttagagatcaaactagcatataaatatttttttttccatcttaccgagttcaaatatgattgtaattttaatatatggtgcttttattaggacatgagacaagagcatatagtctatctccctatttctatatatataaatatatctatatatatatatatatattgctaccctttttcgttttatgaaagaatagatatatttttttttctgaaataaaaacgtcgattgataacataaaattagacctcgcggtcattataaaggatagtgctaggtatagcagatggttttataatacttgagatattttgagcataagtccatctagcgacattataagccgcaaagttacaacttttaaaattaaaacaaaaattacaagataaaaactttttagagagttgattacaagcagacatataatgaaagtatagatatcaaatgttaattccaagctcttttcatagagtatttgaagctaatttggacactttcagcatttgagatcaggcttaattagtagtaaaacttgttcagtgtcgtattatcatataaagaaagggcataatatccaatccaagacatgactcaggtacaactcattattcttgtactttatatctgaattcaaaaggataaaagtgagtaaaatttggtcattctttatttcagaacttaccaaaattaattctatatacgattttggttacatgtttcttaatacacttttacatttatacctcccctatctaaaaataggtgcctccaaaatagtaatttatttttcaaatcaaacataatgatattctgaacttttttctttttttttagtgaaaataaaatataataatttatgacttagagtgttatagttaggtaacatttctttgcagaccatcttcaatagaaaatttaaatttgtgtttaatttgacacaaaaaatgagttcgtgttatatttaactcactatttataattatgctccaatacataagattgtaaaataagaaaaaaaataattaattatattaatgattatttaatattttattaagaatataaaaaaaattattcttttttatttttttattatttaaataatggtaatatgataaataaagaatgtaaagtttagtaaaagtcaatgaatcataataattagtgatattatagtaaataaaaagaaaaaattacactacatacctcttttaattttatgtctttaatttttaccatctcttttaaaatctattatgtttacctcttttttcaatcattctactaattttacccctatcactttacgatagttttcatacttctctaatcaaaattttgctctaactttcctacaaatctacacatccatctacaaagaacacaaatatattatatttgaaaatatgtcttagttatgtgagtgtataaagataattttggtacaatactcataaaagaggtatatttgaattaaattttatttagatataaatttggttaatgtataaaaaaagaggttgttcttgaacttctctaaaataaaaaagtagcatttattgtgggctaaatttagcacaatgctatatcttgtgccagatttgacacaacttttagcatgtgccaaatttagcacaatttttagaacattattagagtagtagtttttcttaagtgtgctgaaatataacaacacactattttttagcactccattgaagatattcttatactagacggttatctcaagatagttatgttttagttttactaaaaaaaatatgactaaaattgagtttagatattattatgtaccattttaaaaaatattgtctaaattatttaacaaataaaatgattcaatcgataatttttacaaaaatatagtctaaaataatatttattattttttttataaattatatagtctaaaatatgtaagaccatctccaatggaagatgtaaaagttgagctatatttggcataaaaagtagttttgtgacatttttacatcaacttttattattgtgctctaatgtataattgtaaatcttaatacaaaatttaatataacatttaatgtccacttaataatttaataaattaaattattttcaaaaaaaatataaataatactaataatgcaaagataaatataaaatttaataataatgatgcaagttatttaatgtaaatgagcttgttaactaaaattaataataaaatattaaaatgatataatggtaaatataaaagcatagcatagtaaattttgtatcatgcaatgttgtgatttaaatttagattattttttattatgtaacatatttgcatcataatttggcacactattaaagtaaaattttaattaagtgaactatattttacattgacatttacattatttataaatggaaatgctctaatgtattactttgaaaataacattttcctactctaaatatggcaaaacttcaaatttattttccttaagaatgatcatatttgttgtttatacatgttcttacctactagagttagagtagctaccactttgattgaattttggtactaatcacagaggcatcaacatttcgttatgcacaattttgtggtttgttctatcctttacttgtactcaatattatatgtcaacattatcatatctaaaactatgtgatgaaaagtaatcttaactttagttcttgctaatgattttaataacaaacaagaaagaaaaatatgagttatgctgtttttgttcttcttagaaagggcacagttctcagttctcaattctcgtttgtgatttttgcaggatttataataaaaggaaattacactttatatttttttttatactgttctcttttattttttatttttatttttttttaaagtctatcattttaacctcttttttt

SEQ ID NO: 161330 - DNA, 2263 bp, Cannabis sativa
  modified_base (1269)..(1284): a, c, t, g, unknown or other
  modified_base (1398)..(1399): a, c, t, g, unknown or other
  modified_base (1874)..(1883): a, c, t, g, unknown or other
tgtccatgaagctgaattccaaggttttgtagttgcataatcttcgaggcactttgacacttcgcacgagtgttggaattacacactattctggaagagacttcaaacgttacaatcgtctttactcttgacccggtaaaatttggtagatgctctccatggtttaaattcagtcttaagtggattttggtcagagtcttcaggagaactctgcatggttggatttggttatagctctactgaagggatatctgaccctcttcattttgaaacactggagttggtgtcgactgcttttgtcttcaatgaagtgcaagatcccattttgagagcagatgtggagactatcaaagctattttctccaacacgcttgcttgtgttttttcagtgttgcagatctttcacctgagaaggaatcctaatgtagtttcattcgtttcaatgatcatgtttttttgactcttaactttggcctacacaatacctcttatgctggagtttaatccattttcattacaattcataaagcccaaaacttttttttttggtggttggcttgaagccaaacaaataagtgaaaggggtgataaaagttgcattcttcttgttccaatctcgtcttctacagcacacatggctggccagaagatcctctcatggagacaatgagggactacaaatggcggagaaggaggccatgtttgtgacattacgggtttatgctgaattggcctttttaagtcggaggaagagaaatcatgaggtttgttattctttcttctgccttcttgacaagttacaagaaagaccgcatttgggataccatgaaatcttgtgctgacagacatccttttagatagatagctttctcttgcctcaaatatttttcaagctgttcagagattcaagagagatttcactagcttattcttactacatcggaacaactcttgtctgttggatccttcccaatgcttatggttttgttctgctttcttgtcttgacatatgaataaactttaaagtaaaggatataacctcaaattttaatcaatctcttactaggaaagttttctttgcatccaaacaaactataaaattattttattataggctaattaataatttttttccctgaattttgacatgtactaaatcgtgttccctgaacttttttggccgttaaaaattcccccgaactattgagattgttaaatttaaggactttttgtctaattttagtataaaattctaacatggatgaaagnnnnnnnnnnnnnnnntagtacatatcaaagtttgagggacatgatttggtagatatcgaagtcttgaatgaaattagacaaaaaattttaaatttaataatctaaatagttcgaggggaatttttaacnnccaaaaaagttcaggggcacaatttactacatgtcaaaatttaagaggaataattactaattagcctttattatattatatcgacgcatttttaatttgtactcacttttttttatatataatttcatagtaaaaaatcaaacaagaaaatgtacactattaaataactacgaaaataaaataaaataattaaaattaacataaaaatatatgaaaaccattattatgattaaatctttaaaacctaatattgtagtacaaatataaattttatgaatgtatataaaactgtgaaaagaagatttcaaaatattaggagtcattttttaaaattattattttttttattaatatagtattgcacttataattttatgagtgcaattaaaactcaccagttataattatttttgtaaaattttatttgcaccccataaaattataaatacaccttattattaaaaaaaatataaannnnnnnnnnttttaaaaattattcttaatatattttttaaattttttccttacattattttatattaatttcaatatttattttaattttatttttataattttttctaattcatatatgtagatatgtatatttttttctaagaaaatttcagataattttttattttaattttttttttcataatatttaaaatataatttaattttgtttaatagatatatttctttaagaatatgaattggaagaaaaaaaattaaaaaaattagtataaataaatatataaattttatataaaataaaaattattaaaatggaatgcgtaaaagaaattaggggagctatatttgcaccccataaaattataaatacaccccattattaaaaaa

SEQ ID NO: 161331 - DNA, 2334 bp, Cannabis sativa
ttttttttttctgaaaaaaataatagaaaacggaaattgtggaacttaacacttgcgcactaactctaacagcaattaggtgtataggtcatacttgttggtataacttactaactaggaatattaattatccaaaattttctcgacccactttcaacattatagatatataataatattggcataattacttactcacaattacattaaccaattttaatgtaaactttgtgacaatagggtctaatcatactcacagtacaagcccgttcatcatctcttaaaccaccaccgtgcacaaaaactggtttggacatatgtgaagaagttcatgggggcaaggctgcaatgctatttctgggcctatatctggttgcacttggtgttgggggcataaaaggatcgctaccgtcacatggcgccgagcaattcgacgagagcacccctcaaggaagaaagcagagatcaaccttcttcaactactttgtgttttgtctctcatgtggtgccctgatagcagtgacattagttgtgtggattgaggacaacaaagggtgggaatggggttttggaatctcaactctcagcatattgttatcaatcccagtcttcctatcaggatcagctctttacaggaacaaaatcccttctgggagtccacttacgactattgtcaaggtgaagcaagagaatatgttctatataaataattacatcccctgttttccttctgttctattcattctcctccctcccctgaatataacatagtcataacactgatcttatatatctatgaatggaataagcaggttttggttgcggctttagtaaatacttgcatgaagaagaagacgccaagcaatgcaattgcaaacatgggaacatcatcctctcctcccaccacaaccaacaaggaagtagaaaaagataccaaacaaaaggagtccactgaaacaacctcaaatagcttcaaattccttaacagtgcagctgagggtgatccaattcatgtggctttacaatgcagtgtgcagcaagtggaagatgtcaaagctgtgttgaaaatcctccgaatctttgcttgcacaattatgctcaattgctgcttggctcagctatccacattttctgtccaacaagctgcaacaatgaatacaaagcttggttcgttgaaagttccaccagcttccctccccattttcccagtcgtttttatcatgatcttagctccaatatacgaccatttcattgtcccatttgcaagaaaagtaaccaaatccgaaatgggcataactcacctgcagagaattggaattggtttacttctttccatcttagcaatgggtgtggctgcactagttgagattaagagaaagagagttgcaaccagctcaggcctacttgactcaaccgagccattgcccataactttcttttggattgcattgcagtacttgttccttggttcagcagatcttttcaccttggcagggttgttagaatttttctttacagaagcacctctaagcatgagatctttggcgacatctctttcctgggtttctttggctatgggatactacctaagcacagtgattgtgtccatagtcaataatgtcacaggaatctccaaacacaagtcatggctgtctggaagtaacataaatcatcatcacttagaacgcttctactggcttatgtgtgtgctcagtgcactgaatttcttgcactaccttttctgggcctgcaagtataaatacagatcaaacaaatcgcgcccttgaagaataagaggaaagaaagaaaagttaacaacaaaaaaaaaagcaaagaaataacaacacaaaagaagttacacatgcagtggcatttgtcaaattgacatgataattttgattgcacatcgaatactcaattgaggcatgttgaaactgtctcggctgtatatacttggggttgggccaaattcaaatttggatgcaaggagatcaaaccaggaattgtatctgcaataccatatttgataacaactcccattgttatagtagctagttgtaattggtttatattttcagaaaaatcaagcttctttttttgtctaatcaattaattagttaagcaatgtcaatttttctttttcttttctttattattatttaaaaataaacactcaacgaaaagtacacatttttcaggctgtatccgctatctagcttaaacattttttagcaaatacactaagtttaatgtaacgctctaatgctaagggacgctacagtgttgtttcaattacaacactgtagcaaactttgctaattaaagtattttctt

SEQ ID NO: 161332 - DNA, 2598 bp, Cannabis sativa
aaaccccaaaagagccaaaaacaaaaagagtaaccaacagtaaagctgagttggtagaagaaagagaagccatgaaaggatatatgagtagtgtttgtaaagtaagatatgagagttgaagaagagtttaagagattggtgaatatggttttgaatgagaagaggtatttatagcattattaatggtaggatagagctaaaaggttgatatggttaggtaatgaagtagcaataggcaaaggaaggttcactaaaagtaaagagtgaagctaagctatgtatatatatcagctgtggccagttcattcagcattatatgcagttggcttggcccaacacggttttgttcatcatataatatacatattattatatgatgaagaaattgaatggctggagtggattaatacataaaacttaattaaaagaaatcgaaaaaaaaaaatagttttattttataagaaataatagttggtatgtacttgatgtagctagttttaatattttaatttaaagtaaagtctcaattctcaaaccagctagcaccgccacaagatttgcttacaaatcctttttagacttgtgtctttttttttcagtaatatattagggtacatagcttttttaattcctagtggtacacttatggtactattgtgctgaaattcgagagtatagacataaaatacttgtatattatggtattaatgtggcgtaattcgagagtatagacacaaaatacctgtatattatagtattaatgtggcgtaattcgagagtatagacacaaaatacctgtatattatggtactaatgtggtataattcgagagtagacataaaatagtaaatacatgtatgttatgttatgctacactaataaattattaggtttaatatctgcattcttaaaactaattaacactaagcttaattttaactaacttcaattaattatataaacttttgcattgcaattaatcttatggcctgaaaaaaggagtgaaatataatagaagtggcatacaattgttgctataattcaaaagaaatttttgccaaaggaaaaattgagagagattttggtcatgttaaaaaatacagggagacaaaattcagtagctagattcataattaagaggaaaacttatcgatacacaatatattatttcttttagtttttgtgataaaaaaaaaatacatgatttgattatttcttaatatataaggacatttatgtttatttacaaaagcatatctattattaattaatgggtaactaacaatttggtaactttaagttttatttcaatacaaatttggtatatcttatattttctaataatactcatgagtcattacatactatgcaatttaaaaccatacaatactacactttcattggctatagcctaaagtggtttcttatgatattaatgctaatgtagttaggtaaactaatttgtatttaacacaatactaatcccatgattaagtggtgttacactctataggaaagccttggggaaacctcttagtatcagtacaatagttataaatcatgtaattcctttgcacccattttagcttcttcttaccatttggatccatttcttggttgaaccatggattggatggtccagggttagagccacaagaagatgaaccatagttcataacacaagcattggctttgaaattcctataggaggctgtgaaaggagccttggtccaatcagtcttcaccaaaccacctcttgtggcccaatcatctgcgttccaaagactcgagtataatctcattggttggtactttagatatgggacacctttcgattccaagttcttgaattttcgaattggtgtaccatccacagataagctgaaaattaaacaagaaaaataaaattatactacaattaataaggtagggatggtgttgaaaagttattatagttttttaatatgtatacttacattatgttcaaagggttccaaagaatggaatatgtgtggaaattggcagttgggtcaaaccaaaatttgaattgttgctctctatttcctttgccttgagtaaatatgtttgtgtgaatagtgtagggatcaccacttagatttcccaagaactcaaagtcaatctcatcccaagtttgcccttttgatgataactgaaaatttggaaaagaaaattaataggaatatatatatatattgttgttgtggttttatatttgtagatggattagttagatgttgtgttgtgttacttttatgtagtttaagattttgttgaattctacatatattagaaaataattcttttgattctattgataaaagtgtttctttattggtaattcaaattgttttagatgataatattgcattgcagttagtaagagttcttacaagttttggtgaaattttaaagaggaatttacggtataaattaggggtgttcataaaatagcaatccaatctaatccgcactatttaattcaattcaattcgcaaagtgcggatatccgcacttgtacggattagaaaattcaaaatccgcacttgtacggattggatgttaattgacatgtaaaag

SEQ ID NO: 161333 - DNA, 1174 bp, Cannabis sativa
tgcagcagatgttgtcttcaccgtcttggttagtacaagcaatcttgtaaaaaagataacctacatgaatcaacgcactaaaaaatgaaaaaaagagtaggccgaaccctagcttttcagtcagtttacttttcttagtgtgatcgatatcttccagtgctaaagtgagaaggaagaccacagagcagatgatagtgaaagtcttctccagattattcatcacgaacttcaccaaagcccaacatttgaatgtcgcttcgcagagccacggtgacagagttatcatcttcttgggtttctggggtttggggtttcttgggtttctggggtttttgggtttctggggtttcttgggtttctgggattggttcgaagaattgatagagagagacagagacagagagaggcaaatatatatatacgctatcccatttttactgtcgcactaatagaagtggacatgtgtcctttccttttaatctctccacatacgattttctagagagagaaagcagagagaaaagatttttgttagttttgtctttattgctttctcgtgtcagaaattttacaataggaataaaaatattagcaattgacacatcatttaatttcaaaaaagataacgtttttcactctgaacctctttccttctttcttacattgtttttctttttcttattttcttaaaagaaaaactcttggtctgacaagatatattgcaaatgaaagtgtttttttttttttttttatattttatttatttataaaattataaaaattttccatttataaaaataaactataaagattagtttaacaataaaaaaaaagagagaattactctacatattattattattttttttttaaatttacagttttagagtaatttaacatattgtaaattatttcaaatttttcaaaattatataaaatattttaaataactataacgtagaaatatatataaaaaaatagactaaaaaattcatctaaatgctcaaataggtacattccttcaagaaggtgcattataaaagtacccaaaaatactataggaaaattttacaaaaaaaaaaaattataaaccgaccaatggtttggacgggttaacctgcccaaaccggctaaacttttgttttttttttgtttcaaagtcaataaaaattaa

SEQ ID NO: 161334 - DNA, 13910 bp, Cannabis sativa
tttgattcattctcgggaatgaattttaatatcctcgccataaatttcagtagattaattggaaatgtcagatatctctaaatatttcacaatgctcataacttatttttcagcccatttcctttttataagtgcaatgacagtaactcactaatctaaacatcttggctatctcatcatcagtccaagcacaaagaaagatctttgttatagcttatatgtatgatacgggtcatataattagaagaccaaaagaaagtaatatttgttgacaagttgatcaaagttgattgtgagacgaatttctttattgaaatgtgtacttttcaatctaggtttgtctaatgaaacaactaagtagagttcaaagggaatgaaccaaccatcaagatctcgatataccatgggcacactatacagagcacactgactcattttttgtttaatttatatataaaataaataaactcccataattgtcctattcttctatgctgatttgaaagtaactcatcagtgtcaaactgcccctggttttccaaaattctatgattcacactatactaagttaccaatgagagtaaattcctgtaaaaggaagcatactatttacttttttatttttattttctgtttcctcttttggaagcaaaaaaggctttgcatctaatataatatgtacatttgtagtttttagtgagaggctgagaaatagttacaaagagggaatgatttaatcagggaggaaaaattccttacaaaactttaaaaggagtaaaaggcttcctttacaacagagattttttaagaaatttaaaaactagtgactcacacatggggggttagttgcacttggactagtctttttgcttttttccctactaagcaatttcctttcggtgagtactgctattcagtaactaccaaaacttaccattttattgcaatactaactaagataattgcaccatttagagcgcttatatataccccactccattccataactatacacatgcagattaagagagaaagaaaagagatggagatcccagtgatagatttcgctgagctggatggaaagaaaagaagcaacacaatggctcaactacacgaagcttgtgaaaaatggggctgttttcaagtaagtattttgttctcctagtttttcattttctcgaatctaatatgaacttctatcttgcatcatcttaataagacattgctcatttcatgcagataaagaaccatggaattgatgaaaagttgatggagaaagtgaagcatttggtgaatacacactatgaggaaaatttgaagcaggagttctatgagtctcaggtagctaaaagattggagatcaaaggacatacctctgacgtagactgggaaagcagcttcttcatttggcatcgcccggtatctaacatggaacaaattgaaaaccttccaaaagacttttggtgagccaacaggatatcagagctaagctctttacataaaacttgatcaaactttttctttattatatgttgtatatctagaaataaattgttaacttaccaagaataattgcagctcaacgatgaacgagtacatagttcacatgattaaactggctgagaagctttctgggctcatgtgtgagaatcttggtttggaaagagatcatataaaggatgctttctctggaaccaaaggtccttctgtggggacaaaggtggcaaaataccctcaatgtccaaatccagaacttgtgaaaggacttcgagagcatactgatgcgggtgggatcatacttttgctccaagatgaccaagttcccggtcttcaattcctgaaagatggagaatggattgcagttcccccatccaaaaataacaccatctttgtgaacacaggtgaccaagtggaaatattgagtaatggaaggtataagagtgcattacaccgtgtcatggctgagaagaatggaagtagactgtccattgctaccttctataacccagccggtgatgctatcatttctcccgcacccaagctgctgtacccgaatcacttccgtttccaagattacctgaaactttatgcaactacaaagttttctgacaagggccccaggtttgaatccatgaagcaaatggccaacgggaacgacagtcttctaccctaaaatgttatgattatttggtataaacaatatttatatgtaatactaaccaacgcgtggtttgtgtgctacttttgttgttggtatgttttcacacataaattaccaacgaaagaaaagaaatacccaaataaaagatgtttctttcttcatttatacattaccaaaacattcccctttctatactgagagggaacattggcctcaagtgatgatttcaagcagtgacaagcatggcttatcctttatactctagttttgttttgttttgtcatgagtgaagattatatttctcgagtgttctacttctatcacgtacaattaattaaaaacttatgaatgaattatgatagtccactccactgaacaaacaaagataattgttatccattagaatgataaattgatcaagtagcttatgtcaacagactactgtgttatacaactatctactcatataccaggtcagtctcacagcttcaatcatgtcgcttctttgatctcttgatcctataaaaataattattttatttacaccttccctgcagtggcatattgatagattttcttctataaaattaatataatatatattatatcactttttcttaactctttatatcgttttcagttcaaattcaatatgttcaccttgagaaacatctaaagtttaccaacatataattaatattaattgatgacaactaatcaaaccattaaaggaacttcatttcctggacacttctgagcctatctaaagttaaaattccaactcgacacaatatatccctccacattgtcaagatataacactaaaagctcgacctattccgaatcattgacaatatatttgtatgtattacgttcacgaataaattccagtcaatgatcattagaaaatagataaatccaaaagttgatgaacacagcacagagaaaatatctaagtaaacacattaaacaagacattatggctaggttataaaaattctccacagaatagttccagagctaaaatccttttaaaagtagcattcgaatgaggagtaaaaatgaagtaaagtgcatattttccaattgactgaagctaaagaacccaaaaaaatgtagtgctacatacttgccaatttagataatatagattttgtcaaaagggtattggttttctcaaccacttcagtcaaaaggcttttgtgtgacttcaacagtggagaacatttagttactaaacataataaaaagtttccaaatttcaaagatttggaaaatctttcagctaaatgatgaacttgataaagaatacgatcaaccgaatcctgagttaaacatacattatgatttaaaatgctctggaacaggttaaacaatgattctgtccataccatttcgtctgatatgagatgctggtggcaaggaaggcagatgactcctctctcatcctttccactacagagcagcttctgacagaaagcagaaacatgagctgggtgcaagcattccttgatgaccctagtgataacatcacatattggattgttgatgccatttttatagaggatcagcggaagcaagagagcatatacagcggttttctgatggagcttgcaaaattctaatgttgcggccagtaggacacgaggagctggttctttaagaaccaaaaacttgggaagaatgatggagcagataacctggcttggccaagttaactcttcttcacttccatatgaaagttgagaaatcaaaacagaagcagtttcattgtctgcgagccaaggttcgatcagctccaaaactagtgaagaatctccttttctaacagtgcaaagctctcgaatttcattagctaggcctacaacttttgtagttgattcgaagttcataatctgagctttcagattaagtgccttgttgtgaatttcaggcccaacagaataattcttacattgggaatcatgaatctcatctttgtcagcttttccatccataaattgttctacttcctcagctacttgatccaaagtatcattatttgtaccagaacctccacacaaggtccatgatttcaaatcttcaaaagatataggaagccatggaagcaattcactgctacccgcagcatccttaagccaactcggcaaggactcaaactcatcttccgtactctcctcctccccagaatccaagtttaggcacgaaatccactcataattcaactcagacaccgcatcaagcaggtggcgggcagctctctcaacccaaaaatcaagcgtttgattgtcactcaaaacaatccgtgccaaattacacaaatcccgccggcaaaatcgcttgtgttccacagctagaaaagagaaaattctagcctgaaccatgttcgggagagtttgtacatagatgaccctggttaacataaagcaacataatcaatatccaaacgaactcaaaaccaaacacaaaataattgaagtgctcctaccttcttgtggaagaagaagacgatgcgtactcggattcgtccacaacaatggcatccaagggtttcattagcaacgagacgaatgaggctgtggtaattggtaccgtcgcagctgatgaggcattgaaagatcggtggaaccactgtgaagcttccgattccggtaccggagaattgaggaaaatatcgaagagcggtacccaagcctccatgatcgatagtttcagggtagtttagttttcccaatttggagggaaaagaaaaagagaataacgataaaccgcgggaaagtcaataaacgattttaaactttaaaccaaacagggtgttaaatttcgaggtttagtttatccatgtttccaaacagatgtctatccttcctttggttttcttccgattaaagttgattcttccaagaatcacgtcggtggagatagtggcaaatggtttcaaatttgatatttccaagcaccaataagagcggtgaaacgtgggaactttgtctttgtcacgtggcaacggcaagtatatctcgaaggctactactactactctggggaagctcgtaccgtacgcaccggccttattgcttaggtggctttacgaacaagttctattggtgcgtagtactactcgcgttgattgcgcttaagtttatttctttaaaaaaaaaaattaaaaatataataatttagaataattaaaaattgtcaccaatttactacaaaaaatataacttatataaagatacttagagagtttaaaaaatataattgaaatattattactacaaaaaattaaatttatatatttatttctaatatgagttactgcaaattactcttatttctattatagttaaaatcctttaaattaattaactgagaaatttaaaattcaatctatcttttatactcaatttatcaacatgattatttatgtgtacatttttatacatttgacacgctattgatatacctaatattattagttaaaaactataaaaaattatttcaaaatttgtaatatttttatttttttaaaatattttatttatgtaaatgtgccacgtgtataagagtgtgcatataagccatctataatagtaattaattggatgacaccttaaatttgctaacagtctagtagtttagaaagttttaccgctaaaatttaaacttataaggtcaagtacaaataaaataatagttggaaggatttggccgctaaaaacttttttcaaattgttattgtatttctttttcattatactatgcaaatgcatatatttaatttaaactcgtacgttattgaattattttagcataaagttgacaaaaaagaagaaagaagaatattgagaaaaaaaaaagaagaaaggaggaaaaaaaaagtgagatccactttttccttttgtcaatcacataaaacctaaaaaattgtatttaaaatcactaatagtgaataactattattatttatttaataaaaagtgaaaattttctttctatcattcatattttatgtgcactcttttttttttggtgcccttttttgttttcttcctaccaaatagtcttagtgtgtggattttcaaatgatacgaggtgaaacaaagtgatgaactattatattttgaggctaatttaattgcatatatatatatatagcttgctaaagctataacccatgtgaattccaactaattattaagcacgaccaatttagaattgcattattaattattattattattattattgatgtggtcatgcctagacttgcaattcaacattcatacataatttattgcaacaatattcacaatacgctttttccttttcatagtgctagcaataactagaaaatactcatcttgaaaaagattgacagcatatacaattctatacagataattataaatataaaaaagtgggaattgtcatataatttaacttaactattttttgtttgaatataattttagttaactattacatgcttaagtaatttttttgaagactagaaatatcaataataaaaaattagcattaatttccacacacacaagaaaaactccacatataacttttacatagaatttcctgatttggttgtagttttatgctcaagttagcccttgaaaattgtcatttctttagaatgaagcaatagaataatgtcaacaatctaagtactgtaccatgcatgtatggtctccaaattaaattatttaaatgataattgaaaagacagatattattacttggttgaaaaacataaactatatatcttttggtgaaattcatttattaacagttatgcatttcaatgatgaacaaattgttttaacttttatattacaacactaattgctgctatcatagttaagaagaagaaaaaaaggcctttctttcaaaataattaaaaaaaagcatgtaaagccaaaatgtatcacagttttatcgcattcttcattttgatattcttttgttgcaaaaagtaccttttgtttcttggcatattgcactagaaaatagaattgctgaaataaaagtattactactgcctaacaattttttcagtataatacctgttgaataaacataaaatttccaacaataccactattcatataactaaatactatcttatatcatatagcttaaaaaaataatatttaaaaaatatacacacacacctcactaatcacactaataataataatagaagtttcaaaacgagttcttatataaaagataaaaaagtcacagcacaacaaacttcttcttctttcttagtcaccactcaccaccattacctaccactctcttcacttttttttctctcctcctaccatgggagtgagcaacaacataaccgctgtactcaacttcatcgcctttctctgttccatacccataatcgcagccggtacatggcttgcatccaagcccgacaacgagtgcatccacgccttccggtggccggtggttatcctcggcgtcctcatcctcctcgtctccctcgccggcttcgtcggcgcttgctggaacaagcaaggtctcctcgccttttacctcttctgtatggccatcctcatagctctcctcctcattctcctcgtcttcgcctttgtcgtcacgcgccgcgacggcagctaccaagtccccggtcgttattacaaagaataccgcctcgacggcttctccgattggctcagggaccgagtcaccagctccgccaattggggaaaaattagggcgtgtttggctgattccgatgtctgtaccaaacttaatcaggattatctcaccgccgatcagttcttcaatgctcacatctctccacttcaggtaagtataactttctaatactattttttttttcatttattattattattatttaaactgcgctttgtttggttgcttgcaattattaaaaacagtttttaattaattaaataaaaaactaaacatgttcctgttcagctgtgtgttaattaagagtatcttacttaaatagggtgagataaattaattaatattataatctattttggtatcatccaaacagctctttaaatttctggttgacgcgatgactttctatgtatcatattctctccttttcagtacctaacagcaggttaaccgaataaatcagtgtagttttcaattaatccagtaggcataataataaatagttcaagtagtttcatatcagccactctgattacatggtggaagtttcagagaaagtttgatagtatttgagtaaattaagaacttacatagtgaattgaaaagctttgagattccatgtttactttcatttggtgaaattgaggaggtgaatgtagacccagatttatccagaaagttaaggttcggtagtgtctaggaaccaaatgggtcaaataggcagcgtatgggattatatggttatgtgccccaccaacggagcaatgtggtccacatgttggcccagggcaaggtcacctcatcaccatatactggaattggaattggaaatggtatcagcatgactaggcaaacgcattagtacaaaaatttaatgacgacacttgcttattacctaacgcttttgggagtttttgaaaattgtgagcctattatataagtaaaagggtccttatgaaggttagattagacctaattactataattcattgatagataattggagttcatagttgtcttttattgcaagccaaaaaggccataatatgattgccagctattgatattatttaaatgctatataattagaaggattatcatattttatgtaagaaaaatttacacaaaaattttttaaaaaaattatttttatgttttaaattttttacttacaattttttttttaggtaaaaataataaattatttttttatataatttatttatagttatcataaaattattttttaattaatttataattattatgacgttaatttcttattttttacgaataaaatataattttaaaactttaaaattttacaaatagtaaataaaaacttttagactattaaattataaataaaatataaaaaatattttttaaaatttttctttaaaaaagattaaaattagtcattttgatcttacattaatttgttaaaatattttgtcgcatttaactacttgtcttttcttactgacttttttttttttggatccaatcatattttaaaatattttaacgaaattgagtctaaaatgttatctttacttttctaattttttaaatagaaatccaaacaaacaatggcacaaaacatagataaactcttatcttaaatttgttaagtaattaatcttttttttttcttgttcattgtgttgttttacagtcaggatgttgtaaacccccaacagtttgtggctacaactatgttaaccctacactttggataaacccagttaaccaagtgggtgatcctgattgcttcttgtggagcaatgaccaaacccaactttgctacaattgtaactcttgcaaagctggccttttgggtaacctaagacaagaatggaggaaagccaatgtgattctcatagtggcagttgtggttttgatttgggtctacctaattgcctgcagtgccttcaagaatgcccaaacagaggacctcttccgccgttacaagcagggttgggtctgatcttgttcccaaacaaacagaccccacattttctcatcatatgctcctattatggaaatgtgtccctgtcaaagtaatgtacatattccactgttttctactcatttttcttcttaatctgtttaattgcaatgtgtggtggtaagttgagttgttcttatactgatttattgagtcagtctcttgctagaaggagcatagcatctttaagttatcatcagcttttaactggtattggattcttctttttagtcaccactttgtcttctttcacataaatattttttattttatttatttttttgtccttatatattatttgcagccattgtcacgcgctcataagaaaattctaaacaaaaggattgattttaattccttttttccccaaataattggcttcaattgattggtcttgtataattatttaattttcttaacattttctttcgtacttgttgtagatgtatatatattatttatgccgaccatttataatccaccgactaacttagtaaccttttgttttgtttttgtttttgtttgtttgttttttgataaaaacttagtaacctttatgtgtgggagaaacaacttctttccaatatcaagattttgtattagaaaaaggatcacttgtttaatggggttgtgaaagtactcttttcttttttttttttagaaagaaaatagcttcatttatgggtattttttggatgttaaatttttataaatttgtgaacaatttatattatcttctaaaacaactataatgtatactgatgaaaaaagttttaagaattaaactatataatcagagagcgtctgcccatgttcatgctctgtggcagtttttcagttttctacagttattttagatctccatttccccatttttatgattctctaccactctccttgatttcctgatcccctccgtatcactctgattttattcaccagtatttggtaactggtttttgttttgttatctcaatctttgttttgtatcagttaccttttttctcaccaatgaatccattcttgcacaaaatgaaatccacaataacattaaccgataatgaaagcacaatattggctattactgatgatggcgttgatactgaagtaccagaagaatttattctgatcgctcgtgttcttacaagtaaaaaagtgtggttaactacttttcaacggcaaatggcagaacattgggatggaaggttcaaagttaacatcaaagaacatcattatgatttgttcctgctttgtttcaaatgtgaaggagatcgaattcgagcattagaaaaagagtcgtggcacttccaaaaccaccacattgtccttcttgatccaaccttgcatcaaacaatcactcctgaaatcatgatttttttctcctttttgggtgcaagcctatagactacctttcttgagtaagtctagatctttggctaaatcgttggccttaatttcgggagaatttttggatgtccacgatgattctctaaatgaaggttgggagccttttttacgttttcgggtcaaaatggatattactaaaccactcttgaggggccggatgattactcttcctaagatcaaggatgagtttgggttgagttctgttatgagcggttaccaaactattgtatggaatgtgggctaattgggcatctttatcaaaagtgtcctgtttttcttgagaagttggacaatggattggaacctgaattaccttttggacctgaactgaaaggatcaagattacctacatcttcctatgattgctatcgtactgattttccaaagggtaactcgcttggcaagaaatacattgactgtaacacttcccagtctacgctctactcccaaaccgcaaccaagatcttttctgttgggtgaatcttctaactctactacagaaacgcctgcaccttactcatcacacaatgttccacccgttcctgttatgtcgactggcacttctactaatatacatgtcattcaacctcagattgtacctttgttcacaccaccatctcttaacaacatttcctttagtaaatccccagatggctctttcaatgcttcaaccatttcccctagtttggattatcaagcaaaaaataaaggaaaaactgttcttacttctagcagcaaccaaaattcccctattatgctagatgtgtacactccagatttagtgaaaaaaaccctgacacattcagattattgctcttccagtgttttttctacataccctccaacaacaaactcaatccatggcaaaacacaaccctttcggcccttacctgctggtgctgtcacctctacatcggtctcaactatttctcctgctactttgcacactacaaggacaaccctcaaaggccaagagaatgctcatcccaatcgtactttcaaaagacagtttgacactaattcaatgagacaaacttttaaaagatgtcgagccaaccaatctgaagtggtctcttccttgtcagaagaaattcctccaattcattatgtttctgatgctagtatagattcaactgatgctcaagacaacttcgcggtgatttctcagcaatcccgcgattcgccatgaaaattatcagttggaatgcacgggatttagggaacccgagtgcattctgtcgtcttcgtttgcttgttaaagagcaaactcctcatgtaatgtttcttatggagacaaaggtcactgttaattctctttctcgttttaatcagtctttgaattttagttctggtttagaggttcctaggactggtttgaagggtggaatcatgttgttatggaaggatgttgtagatgtaactcttatctcaatgaatgttaattattttaattgttatatgttgtgtaatgatggaccacgatggcatttagctcttgtttatggcttcccgaaaactaaaaataaaaagcacacttggactcttattaaacgtttacatgatgtatctccacttgatccatggatggtgctaggtgaccttaatgaaattttctcacacactcacaaaaatgggggacctttgagacaagataatcaaatgactgcttttcgaactactttggatcaatgttgcttgaatgaattgccttatttgggtgatgatttcacttggactaggagtaaaaaaaaaaccctgctgctcttaaaaaaagactagactggtgttttgtgaatactgtttggatggactctctaattctgccaacagttacacaccttgattactatggttctgaccatagagcagtttatgttgatcttaacttctctaaccagctggaaaatgaaaaaagaagatcgaggttttggttcgaaagaatttggttaaatgatgcagaatgttcagctatcatttctgcaaattggaataaaaaccagaatgcaaatgaggacatctttcaatagttaacagatagcatacaatgttgttcaaccaacttgcaaaaatggcataatggaaaatttggacacatgaaacaagatattaaggagacacaatccagagttcaacaattaaataactgtgttacagcagattctgatttctcaaggaatgtacaatcggctgaagctattttggatgagcttttggcaaatgaagagctatactagcaacaacgttctagggtggaatggctcaaatccggggatcgtaataccgaattctttcatgccaaggctacgtctcggaaatccaacagccgcatcagcaaattgcataatgataatggacaatatgtgtattctcgtgatgacattgctacggttacacaggattttaatactcttttcaaagctttggatgaagacaattgggctctctctcatgttctatcaacaattccaaccacaataacttatgctcacaatgatttccttcttcaagaattcactcaagaagatgtcatttcagctttgaaaactatgggagttgataaaagtccaggtattgatggtctttctgctaaataaaacttcatttcaatgtaatctattttattcaacatcaataaag

SEQ ID NO: 161335 - DNA, 4602 bp, Cannabis sativa
taatattttttgtaaaaatcccttaattttcactataaattagtttagaaagttgcggtagttttctaaaatattgggcttgggctcaaaatactacaatttgggcccaactaaccctaaccctagacttttctttcttcttcactaccacgtctggtttttgtctctcgctcactgtctcattctccccttctcaggcgctctcctcaccggttagccgtcgcttttcagcctccgaaaccctcttttttggtcttcccacggccacggacactgcaactcctctccgagctctcgttcagtgacagccattgagctctgaggtcggcacactggttcactttcctcagctacggtaactctaaatccaaattattttagtttcatgtgctaaaatgctttctatccttggaagtataatttttaattagtccttttttaggggtttgggtgaatatttgttctttgtttgggggttattggttgatcatttgttgaattccatttctttaatgctgtgtttgatggatgtttatattgtttcccatttgatgattatcgctgttaacatccgttgcttacatgagtggttcttagaacttgcaaataatatcattcaatagttgcttacatgagtttgtgtgagagtaggatataatcactgcaattagtaaacaccatatagcacatcagtcttcctaatgaataattttaggtcaagtttgagagtctacctaattattgtgtaccaaatggtcaagtaaacaaattaatggaaaatacttatctggtgttcattacctatgggatataatcgagttatctgggccctggaggattgacaggacgaactgcatcttttcttcttttagacaaacaagtctagtagacaaaagacttgttacagcaagcatgggctagcaaagatgagtgggagggaatgagcaatgacttgagtttagttctggagttcgagcggccgaaagaaaataaacattcgtatgatctttatctttatggattgaaaaaggaactacactggattggtacgaccttccaggtaatatccataaattttggtcattagctctgtcaagtgtcttatttgggctctgtgggagtttttatgagaatgttgtggtgcccctgccacacatatttagtttcgttggctgtcaataacaacattcttagaaactcagatatttagttggaagattctccttcttttatagagatatagatacataaacaaaaaatgtatatataatttggttatttatgtaagaatgtaagatgaattaaacattacctttgattgatgaggccaagatagcgtatccatatattttttgaagaattttgacagagtttgtgtttttcatgttttgggtccacaattgaagccatgcagtgtgtttgtgttgtacagtatgtttgtgtagcaaagtcattaaatctttttattataaattgaatgtaccattcttagctgcacagtttgttatttcatgtctagtgagtgatgaggaaaaaactacctcatgtttctctaaatacatgtgtatctttatttgactttgttcttttgcgtgttgcagatggcatttaggatgctgatgctgaggagtgctggagggaaaatttctagcttgttaggactcaggtggagtcatggtgctgctattcctggcccattggatgggctcatagatcgtaatgtgatatctcctcagatggttttgccagaggcatctctggaggattcttacaataataaaaatattggatttggtttcccgattttctcatttggtggatcgatggagcttatggctgtccccaagaggaaggtctttctacttccttggtcttgctattcttttattctttcctaaatttctggaattagtttgaaggttcatacgttttggattttctgctgtgtagacttctccacacaagagaggcataagaaatggtcctaaggctttgaagcccactccagttatagtaagatgcaggtaggagtttaacaagttattttgcttgtttttccgatttagtgggattttgggactaattgctgtggacggcacacttcaatatattttttaccccatgttagaattaatttaaccctctaatatgttgtattgttagatttgaaaaccttacattaggaatttgaatgatagatagatgcttgaaagttgatatattattcaataaaccattggaagaatgctgtttctaaaactttcattgcttgatttcttgtgaaaaacatggagttgaattttttccatttcacattcacccatcaacaaggacagccaacgcatttaaatctcgttaattgaggttatcatatttctagatgatgattatttgtgagaaaaaaacattttcttttatctctgtacctaatcgagtattctttggttgcaggggttgtggtcgagtcaaattgccgcacttctattgttgcagcggggacagaggcaacaatgcaggtgaccaaaatgtctctacaagatgaaaggattttgtactacacaagcaaaacttcaagggagctgtagaacaggaagtgctttaaatagaatgtatgcactgctgaagctctgatggattgaaaaacaaaatctagtttgaatagaaattttgcagttttgttgtagaagtgcttggtgaattgagaacatgtgctccccttactgttcaatgttgcaccaagacctagggaatgcagctgctttgagaataatgtcgtgtgagatttaaactcaaatgaatacacaatcattgagattcacagcttttcgtttttgtttatggacatatgtgaggctgttactaggcatttgttattatagtcatttccacttgtggatatcagcctactttttatttagttcttaatacagtttaaactagtaaacataatccctcaacttatcttagaaacgacacgctttttaaactgttaagttgagcaacattaactttgaatttacttaggtcagttggttggccactgcattgattgatagtcaagactcaaagagcctttcctgagcatgaccggttgatattatgattatccttaccgacaagtcttcacatctttgattacgcaaaagctagtacaaaggtccaaacaagatacaacaaactaagattgtttggatcaacaaggctagtataaaggtccaaacagggtcctacgatgcctagtttctttgatcttgtttggactgacgtgcaataatagttgtcataatgtgcgtctactcgggaaataaatgcagtttacactaggatggatgtgagaccaacgaaaatggttgattgttatctaatgagatatggtagctaccagcattaccacctcttaaaaatcagtgtgtgaaagagcaaaattggatagatgtagtgactcatatcttgggaagattagtcacctttagagctaggtgtcacatgttgggaatgatagagttggtaagagagaaaggaagtaatgatattacacaaagcttattttctctgttaagaggtaaccggttttggaaatatatatgtatgtactatgtatatctatatacatatataattatgtcaaaactctctatctctctcttccatcatttactattttccattttcttttcatcaaacctcatgtcttgatatttaaaaaacttggaagcaatccaagagcgaataattcaaggtagtttctttaactctttccttcatttactcttctttgttaagctaaagctatgatatagaacgactttggtttgtatgtgggagacttaaaagtgattataaataagatattcacccaagcctaagaccttcaaaaaaggtcacattttgaggaattttggttttgattagaaaatgatacgaggttaagtgttttagtttttttctagctagtattataattagttataaacttgtgttggtgattgatgacgcatgtgtgtagataggaacccaaaaaggatgatgaaaactaaagtttctataacttaggataaaaatcatatatatatattttcagatttgggttgtgagcatatgtgaatttatttgttgaatttgtagtatgttaagagtagacgtgtttagacttttgaaaaattcaaaaacattctatatgaatcaagttatgacttgcaagatcatcatgtgaacttttttttatttctctgaaatcagttttgacctacgagtttgaggaattaatttcacaaaccatatacgattatattttcttgagatttttgtgagacattctaaacatatggtattgttaaaatgcaacaacaatatctacgaaataggaatttaaatttataataattaatattggtggtaaagctatttaaactttatgattagtgatacttaattatataaattgatattttggtagtaaaattttctaaacatcatttttgttagctatttacctattttgttcaaaaagcgtgttcaaaagatgctgttaagtgctacggtagacataccacaatgtacacgtgataaatttttagtggggatatatgattagccacttaa

SEQ ID NO: 161336 - DNA, 5275 bp, Cannabis sativa
ggtagtagtgtatgttactatgttactatgttgtatgaaaatgaatatctctctctttggccaaaagagaaaaaagctggagactttctccttgtctctctctcttttgcctgccttttgcaaaaatatatatatataaaatggaattggaatagaatggttaataataataataaaaaggattttatatgggaggattgagtagtgacagagtgctgatgtcaaaggaagagaaaagcaaaaaaaaggtgagtttgttggtttctatttatagaaataataatagaggattgagagagatttgttaaagaagaagaaagaaagaaagaaagaaaggggtatgtatgtaatatatttttgtaggctatttggttattgcttatgcaatgtaatgggtaagccattttggggaagagcaaaaggaccatactgtataccattctgatcaccttcaacacaccatctgcacatcaataccaacacaacacttgtcactctcacaatcacactcataaacaacagtcacacacacacaaaataaaaaactacatcaattctttccttttactatttttagcatctttttccctccatattattcttaccccacttaaaacaacaacaacaataataataacaatgtgttttttttttaccaacctgtattttgtggttatatggtgaagaagaactaacatttctaacttggctaactcattccctggacatgagtggaccccatttccaaatggcatgtatgtgtttggtttaggtgcaacctgtaatttacataattcattcatttaaacaacatgttaataaataatcaaaatggatcatgttcattatataatcatgaagatgaatcagtagtttcactgaccttgaatcttgcagggtcaaatttctcaggctctgggaaaaagtctggactgtgatgaatgtttctgaaaaggggtaacactttccacccttttggtatcagatatcctgttttaatcatataaaaaaaacatgttaaatatctattattaaaaagagaaaaaagccaaaggcaaaagaagaagatgaactgaccttcatattgaacatcctccacagcttctctgaaagtaaaagataaaatggaagcaactctaagtgtctcttgaataactcttgtagtaataggcatcttctttgtatctccccaactaagactaccactattctcatcttttcctttcaatatggatcgttgctcttcctataaaaatccaaacattaatattaataaacaaaacacaagtgatcatattcattgaagacttttcacaaacagtttatatacttacagtgacagcttcaagaacagaagggttttcaccaaggtacttaagaatccaagtcaaaacacttgctgtagtgtctctagctgcgaatatcactccaatgatgttatcagcgatctgttcatctgtaagcccttctttctctcccatgaaagaccccaaaaggtcattgtgttcttcttccttgttctgtcttctggttgacagaatttgagccaagatctgagcaagttcttttcttgctttcatggatttatggtaaagtgttccaggaagatttatgggcattgaattataagccttttcaagtatgtaataacaccttttcagatcttctctgtacaagatttcatcttttccaaatatggataacagagcaacattgaaagtgaactgaaaaaaaaaaaaaaaaacacaaaacagaacactgatcagtcactaatttcaccatgaaaattggataaacaaagaaagaaaattgaagtttttgtttgagagtactgactgttttcatttcttgataagtattgatcaaacgaccttccattgactgaagagagtgtttagctaaggtctcaatatcagagacaatgaatttaatggcatctggggagaaagcccttagaacaatcttcctcaacttattgtggtaatcaccttggttgaagaataaagcttgtttccccaagatcttctccttactagctggaaatgtgggcttgaacagttcacttcttgtcaacacgaatttaactgcttcaggactcgaaatcatcacacatggacaacccaagatgtgggttttgaatatggaaccatacctgtcattattaataatcataatcatataagtaagtttcattacaacaataaaaaaagagtgaagagttaaatttaaaggtacgaactttttctgtttttgagtgaagaagacatttgggtcttgggagtaaagctggaaagtttctcctatgtatggtaatccaagagtaccgggtggaagtgggagagtggttcgtttggaagagacgaaggatttgattacagagattatgagtatggagattgccagaaaacagagaacagaggttgctgtgatgagttccataatataaaaatagaaagactaattaaaaactgaatcttttgatgaaaacaaatgagtgactaaaaactctatttatagacaaaccccttcttcacttcacacttattttattttattttatttaaaagagtaaaaaaatagaaaaaaaggaagaggaggggaaagagagggagggtgggggtgctttcagtttcaattacagctcaaatcccacagagggaatctccaatccagctcatgtttttttggtcatcttcttcttcttctactactactactactaatactactacttcttctcttattattattattattattaagtaatattatatatataagtagaaagaaatagtagtagtagagtagtaatagtagatagatttatccatagatagatagtagtctttagtcttaacttacttgctcactatgattatcattaattaggctcccacgtgtcaacgtgactctttctcaattaaacagcgtgtggggaacccctttctttctcactgctgactaggacagttgaccctacaacttaacttaatcacccattactcctaatttactacacttttgatttgttgcagtgttatatcatattaaattgtatatatattatttaatacaaaattaacttggattaatagtttctgtaatattatatttattataaactcgactccaactttaaaccccgtttaggtcaggagtcaagggttgggttcaagttcagattctgaatatgagttgggttcaaatttagattaaggtttgcatttggatctaatttcggagttttaatctaagtttggggtatgtgatagtttactcatcactcctaatttaatacactttaagatcgaaaaatgttaaaaaatatcaatagtacgtgtaattaagtatagagtctcgtataatttaaagtaataacttttaagaatatagttaccaattgtagaatatcacttctaaatagtactaagtgtcactgataccaaatagttatgctttttaaaattttgcacattgattaacaattttttaaactaattgatacttaaccactctttcagaagtaggttcagaatcttttagactaaaaaactaaaagttgttataaatccaatatttttcaagttgcaaaaatctaaaagtgactaataataataatgatgatctctaaattaaatgtgtggaaaccgattgtaatttatactaataataatattgatattttacgaggtgtttgagttcttgttttggcctttgctttagcctaattattagtattagtattataaaattacaaaagcgtcccttaagcttcacaaaaggggaactttggctcttgtccctacaacaattataataataattattaatatttgttcttgttgtattactttgtttatgtaacatatcattaaattatacgcttctatatatatgtatgtatgaatctacctttttcttttctttttttttctttttaaaaatatatatttattttatttaatgtgtgtagcaacatccgtacaactcaactactttatattataccactttgatcccaattattacacataaaatgaaattgaagtacccttttcctttttcaaattaccaaattcaataacaatacaaaactaattatttaacaagacaagacgaggagggtcgatttttcattcctattcaattttaataattaataatttaaccttcatgtatataaatactcatcatagttaattgccaactcatcaatttgtacatatatatagggtcactcactttattatgtatacttttgctttgtacacaatttgtgatcaagtgtttccattttgatatttactcttttcattattcgtcactataacttgttattatacgtgtgcttggaatgaaatatttgacctttttttattattttattttggaagatcttaatatatattggaattattattattctagctaattgtgttgactatatatatatatatgtaagttgttcaatcaagttggttctatagtcttctagatatgaattgaagtcaaaatatactaaaccaaatttgttgaccaattcctatgtatacatgtctagtctctatatagtagtatgtagtagtacagctactgaatacaagtgatcataataatagaatgaattatcttctcactctttgtaatgttctttattataaatagctattccattaaaattcactataggaataatatatatatatattggtgtattattatttaagtttgattaaaataaactaattattttagtaattgtaaattattaattattaaagtgtcatcagctaattaaatgcatagatactttaagaaatatttttaatttattgatagactaaattagaaatattaaaatcaataagagcaactttattcttatcttcttctattaagagagaaaactagagaactttaagtcttgtattcttaaaagattattacccaaaattagtacaaaaatcatctctatcagttgattaatttacactttcgctattcatgtttttttttctcttttaatcaacaaatttattttttaaatctatggttatacacttataataaaatataatatatttatttatggaattaattttgatattgcaattctcaccatagcttcaccaaaataataatgataaagaatttattttttgaaaaaaaataaaatagtattaattaattacaacataccatatgaacacgtagagccgaggtgcttttaatttaggagtttttcttatttatttttacactttaaaacattttt

SEQ ID NO: 161337 - DNA, 4903 bp, Cannabis sativa
atcatttcatgattttttgggtactttagtcatgagcaaataaaagaagccgcctggagtgaatatccattatgtttttttttttaacaatgaatatcattatgttgatataacattatatttgctctatttgaatctgtgagcttttctactttatacgggcaattgcctctttataccatctccatctcctatgttttgacactaagtaagcccttttcagttgctgtagctggttttgaatatggaattcctcgtttttgtcatacgggcaaaatagttgctgctattatgttattagcattctattaggtttcagttacagtttagtgatttgctaagtgctcctgtttctattcttgatgatctggaccagattgttaatggacctgaagtcttgagcaaatttgttggtgaaacagaaaagaatgttagagatctatttgctgatgctgaaaatgatcagaggactcgcggtaagaggattttatgcccagaatatgatagacgttaacctgttgctgttggtatttactaatgctgttatgttcattactgtttaggtgatgaaagtgatttgcacgtcataatctttgatgaaattgatgctatttgcaaggtatgtactattatgagtctgtatcagattctttgtgtttttgaactggtctatcagttttattttaatttggtcatcaatatttcttttattgttttatgaattttttttgacatcattattatcttttcgcaaacctcactgcttaacttcattattagcactgatttgcttttaatttgtgattgcagtcgagaggatcaaccagagatggtactggagttcatgatagtatcgtgaatcagctacttacaaaggtacgctaatcgtttcaacttttcagtctgggataatgtataaattttgtcctatattaatgtctatttaccagggatggcccaacttttctaatttggggggaattttatcaatgtaatcgacggctgaaagattatttgctttgcagatagatggtgtagaggctttgaataatgtcttgctcattggaatgaccaacagaaaggatttacttgatgaagccctactgaggtgctttcctttctcctttaccatttatagcctcatagcctatctttttacacacttaataccacacatatattgtgtaaattttcctttttaaaattcatttcaatactatgataggcccattctacatccaatagattagagccttgtttatatttgattagatccagtctattttctattcttatttgtcaaggagtcgtatagtttcgagggtttcgaatcactcttcgattgaatcatgtgtataggtcttgcttagtttcaagagcatcaagtctatgtctgattgaatcacttctaggcccagttcgtgtttgactggatactttctaggcccagtctattttctatgggatcctgtctagtaatgcaaaaaaagaaaatattattttgggtatatttttcacaatgtagctcgtcattatttaagagggattatttcataaatacctcaaaactacaattgtttacgttttatgaaattttgagttttttttacatttttattgactatttttcttacagaccgttgttttttagctgttctaaaaaagacggttgtttgcacaattttttcacattgcggagatgtagtatactgttgtggcaacaaaacaacgtataaaaaactttttgcataattggctaacttgccatgtacaaacatcctgatttttcttattacttttgacaaatggaaccatagtagctgtttaattctgaattaagtagggattatttctttttgatttttgttaaatgaagattgagaatgaaatgatggtgacaatatcaagaaaaacttcttggccaacaacttttaaatttcttttccatattacgcagaccgggacgattggaggttcaagttgagataagccttcctgatgagaatggtcgtctacagattcttcaaattcatacaaacaaaatgaaggaaaattcctttcttgctcctgatgtgaaccttgccgaacttggtacgtgcattggtgatgtattgtatatagtgagatctacatattaagtcttgtactttggttgaaattatcattgaattcttctgccttttaatgaaagaaattaaattagtctggctaggtaagacacaatttatgtatatgtataaaatgcagaaaaagaatattgaatacttgaaataccatgtgtccagtagctagctttttattatataatcttcacaaccccttttttgatagactattactagctttttctttattgaaattttgaattgtttgtcctgacatttattcagtgtcgatattataaacttaaccatgtaatgtcgtatttacatgcttttctatgtgcagctgctcgtacaaagaattatagtggtgcagaacttgaaggtgttgtaaaaagtgcagtatcatatgctttgaatagacaactgagtatggacgatctcaccaaaccagtagatgaagaaaatatcaaagtgactatggatgatttcctgaatgcatgtcatgaaattgttcctgcatttggagcttcgactgatgaccttaaacgatccaggtatgctatttgattttattatttatccaaagtagattgggtttgacagttgattcctgctcaatactattatatatcttaaggaccttattggaaaagtttactctctgacatgcacaatatcttctcttgagatgtctaactttttttgtatgaacaatggctaacttgttccttgtaacatgatttgaaggcttaatggtatggcggattgtggtgatcgacataagcacatttatcaaagagctatgctacttgtggaacaagttaaagtgagcaaaggaagcccgcttgtcacatgccttttggaaggacctagtggcaggtattgtttgtttataattagtaaatatttattttttttctttggtataagatatcagttaattagtttattttattaaagatagcaaaatgaagtaaaaaaataattactactgctaaacattgtttttccaacaaagcataaaacattgttcttgcttctgataagacacaccgccgagactagaggctctcagtaaatggaaaattcaactaatgaaaagccacatagctttaatttttctaccctcatggacagcctcccagttggcaatatgttaagatagaaaacttcagaacactttattttagtattcgttactcacaaaatattctcaccaactttctagaaaaaaaactatttttatagaaatgttttaattacccgtgaaaatgcttaaccttttataacctttgacagtggtaaaactgcattagcggctactgttggcattgacagcgactttccctatgtcaagattgtaagcttccatccttttttcccctctctcactctaattttcaattgtcatatcaattcataggcttctttagtatctttcctctataatcaaatgtatcctgattctctattcttgcattttggtttggataggtctcagctgagacaatgattggtcttcatgagagcaccaaatgtgcgcatattgtcaaggtttgtaaattaccaattttttttttgtatcttgaatgcttttacaaaaattagagtatttaataagtgctatcttttgataattacctttgttttctcaaatagttgtggtgtattttatagtacagcttcttgtgtttgaaattcgttttcttttttaaaggtttttgaggatgcatataagtcaccgttgagcataattatccttgatgacattgagaggtaataactgctcattgttcttgaggaaatcagaactgaattactttgtttctagtcttaacccaattgtttatttgctgtgaaggcttctggagtatgttgctattgggcctcgattctctaatgtgatatctcaaacacttttggttcttctcaaacgacttcccccagaggtgttttttttttctctttgttttatcagttaaatgggaaacattttctatgagtgattgctataattcttttcctaatattatcaaaagaaaaaaaggcatacctttcactgttcttaactaccaagaaagccatttaaagaaaaaacatatttcataatgcctttctatatgttttactcaagaacaaatttgaagcatcatttttattttattttgtatgttctagattatgtatagtgcttcttttgttagacgtggaatactacgttctgaacatgtgtttcttccatctgattctttcctaacgggacctcttgtttatttaggggaagaagcttatggtcattgggacaacaagtgaactaaactttctggattcagttggtctttgttatgcattttctgtgacttaccatgtacctacattgaaggctaatgacgcaaagagggtaagtgatcctcgttcttttctatcgtaactattctattttagttttgtctcgaatttaccagagtatatttccttaaagaatgataaagattttaaaccactaaggttcatttttttattttactaaataatagtttaaaacaaagtagtacacgacatattcatcttacaattcgacccctctccccgcacatacaccttaatttgtaactaattgaactagctgcaatttgtcaaaatgaccaccaaattgttctgctgtttttactcgaataactgtcaaaaataaaaatgggaaatttgattttatatacttaaaaaattaaaaatttttattattaaacaaaaaatttaaaccctaaaaaaactatacctttttttttcaaaaccccaaa

SEQ ID NO: 161338 - DNA, 5638 bp, Cannabis sativa
taacacttttactaacgaaaattcaccatatcagtctcaacttcgtaaaagaattatacatttgatacttagctagctattctattaagcacactcatagaatatgcagagtgatttcaacaatattagctacgtaatatgtacataataaaaaaaccatattgagaatcaagtatattacactccacaggcctaggcaaacaataacaacaggtgctagaacaacccgaaattcgtcagaaacttttccagagttttacgaccccattgaagatcgttgttcaggacattcacgtcttctacatcagagtcatattcttcttccaattcagtaatcacaggcttttgtcgcagctgattttcaagcgtcttcacttcctcttcttcatcggttatcttcgatgatggagttccagtttcaaaagggtaactgtgtttgtgtagttctttctcctcgtccaactggttttgtatcaatgtcacaagagaaagaaataggatatcaatttcaaaactaacaacaaagatcacaaggtattctgatactgcagaataatatgttgcataaaatagaatagtgatggaaaataaaagttctcttactgctcaagaaatcacatcattcgtaatcatatgataaagaaaacgaatgctctaggaatgggaaatgctttgaaacttacaataaaaataggctatggtaccatatgtggaatttgcattcattctagtttcatgtgcaaatgcaaaaacatgattcaatatctcattttaattgcttaatgcttgtgtcttacattcaaccaaaaaacaatgtaacagtatacaagaattgtactttcattttcatacaaggatattcatattggcattttggttgtacacttctgttgaaactggtgaaaatgaaaaagcagaaaaccaatttaacaagtaatgaattttccttacaaaagatctcttttactaaaaacatcaattaagtaaattactctttatgaaatagattactagaacaaaaaataaatggacagtagcagaaccaaaactcagacttagataagttgcatcttctggtagcataatggagtattatttcaagctaagaaaacctagttgaagaagaatatgaaaggaaaagtgcttcacacccatcaatcaagcagttacctctggcaaattatgatctttagctttgaatgctgcttcaacaggtttatcgacggaaagggtattctcaacctcatcttggcttacttcttcagttggctctgggggtgtcttagtcaagccaggcaccagaacgggttctccttcatagttgactaaaatgttatcaatgtttgtgctctccatattcttggatgttgtaactctaccattgtttcctaaaacttcttcacctatcaccacattgttgtttgatatagcagcaaacttcttttccagggaatcattatccgtgtaacttgtactgtcttcaactatagcttgtggcttctcttctggtgaaggaatgttattcagaacaatttgttcttcgcgtaattctaccaacggtttctcttgtgtagtcacatcattattagtaatggttggctcattgtatacatcagacaccaattcctcctgtggatgagtcaagttctcatcagcattttgaatggaaacttcatcttcctcagctactatctgaagctccgtgttttcccaatcttcatagaccgtgattgcattcttagtttcccatgtttgaaaaacccgatctggaccaggctgccacaagacctccccattgctgtctttaagtatgaacttaaagtggatcgattttccgataggtatatcctatcatagtacaaaacaaagcaccatatcaaacattgtctgtaacaatcaacttgttaatatgtagtagtccatctgaattccaactcaccagctcaacaatccacgcatgcccatctgaccagttcaacggtattgcactttctggatcccacaaaccgaaaataggatcatctcccactatgaaaaaatgctcaccaaacatacattctttctgtaacttgaatatgacacgagctgtttttgattgatctacaaaacagagatgtggcattgaaactaaaagttgcagaagaaaagataaggaattagataactcaaaatctgaactcacatctgcctttagcttgaacattctctgcctccaagtccacctgaaaatgaaatcagatggggttgtcagtatcaacaacaagatcactttctcccaatctacttacattaagaatattaaaaaaggaacttcattacaatgtggttactatgtatatgccctcttcagtttctagttcttctttttcaaaaaagtaaccattcttcaaaaatggagtaaaaaactacaaaaagaaagaatttaaagtacagaactaaactttgttagcagtgctgacaaagtttattgtattccttgcttgatcagcaaacaaaaagagaaaaaaaaatatataaattgaaagagctgtaaaggcaaaaagggtcattttggtatgaagcagcttatatagaataagcaaaaatagaagtaaaatagtcaaaaattaacttcatgggattctttaagctctgacacacacacatacaaacacaaaagctgacaatgaaacttccattgatgatctaatcataaattctgtaaatatataaaaccacaaaccaatccaaaaaaagattccaaactttacttattggacttggacacgataaacaacaaaacaaaagaattatcattaacaacttcaaataaaaataaataagaagaagaagacgaagacagacctggtttttgggtgagatacaagaaacgggatcaataaacgtgttggttagcttaacattgttgaagttcaagaacccaaaaccagaaactttaacccaaggccttaaaaaacacgtctcgatcaaagacgaacaagaagaagaagaacctctttccctgcagtacgagtcgaaggagaccctgcaacttgggttggttagggttttcatgactgtggtgactcagtgactcaactcggtacttccccagtccacaacaaggtcagtttttttttttttttttgttcggttctgttttcactctctttcgtttttttttttttgattaaatttcagttttgaatgattaatctgttttttcctgggtggtggaagtaggagagttctatatatatagtggtggaccctaccacatctgatccagtgtgacggatcttctgccacgtggtgaatggacacgtcatctgtgtaggacccgatttgtgttggcctttactaatctaataatttactatatattttacgggagaatctctaacaaaaattaacttaactgtttctccggtttacttccacactaaatcattattattactttagttaattaatcacacataaataaaactgattaagaactcttctttaaatcctgaccgtccatgaattatttcttgagataaaatattttgtttggaccttattaagttaattttgaatccacttataagattagaaataaatttaggggagattgagacaaatataagaattgtaaaaatgtttttcaacatcattaattttgcctattgttttgaagaaaaaataaatattgaataaataaagtgatgttggaaatattattagtaaagctcttaattattggaaacttagtgaattatgggattgtgtgtttgtatatgagtacttgattagttcatattgtgtttatggtataataaaagcttaaatgactttcaactgtctactctttacttaagtcatttcattacaaccttgaaagttctgttgattccaaataagtattgttgatattagtagagaaagataagtcatgcaaacattttgaatattggtttgtagagagttagaaagaggacatttatatgttgttgtccaaatcttcttgagttgtaatttacatttatacactacttttcaatagaggcatttggtttaattattagagtaattgagttaaaattttggttaaaaaaattattaaaattctgcagacagtagcagtttgtgaattaaaaaaaatagaggcttaattatttgtgttagttttaatttaagtttaatcttattcttactcgagggcgagtaaggatatagtttgcagagtttattatgctatttttaccctaatattcaaagtatttttagtagttatttttttcttaaatgttagtttttggaacataattacgcttattttctttagtttcaagtttcacaattgaaatgtgcaaattagttaaatattagaaatatggtgtagaattgaaactgaagaaattggagttgccattttacgtgccaggcgttgcggtaccctaacactggcgtctcagcagaaatagcaccgcgaggccaccacgatggagaattaatagaaagttcgtatgtttttcaagatggctcaggcgtcgtggcgccgttgtcgtgttttggggtttttttttgtcttgtcgtgtttttggctaaaaaatccagttttatataaaaagagggcttcgaaaattagagggatatacaaaaacaagccctagaaaagaagaagaagaagaagaggattagagtgagaagttggcgatccgtgacaatcccccatctactttccttctcgttctctttactttctatgttattgtctctgtttagtttgattatggatatgaattctgagattatgagttaaactcccaatttagatatttgatggatattaattgagattaccttatgagttaatatgaattgattattctttcttctttgattatgtgatttatttatctttgtgcttaatgcatgtttgattgatcaccttgagcatgatttatgatcttaatatgaaatctgaaaagtgaatattagaaatgctctaaatgaataaatacaagttttgatgtgagacgaaattatttacataacttgtttgactcttaaattattggttaatgtgaattgtttgttaactaacagttgacttgcaattcaattctttattatctaaaaagaatttaggtagtttttataatttgtcatcacataagaagaagaataattaatttttattaataattaggtaatcaaaacaattgaaataatttttctaagttcatatctattgattgaacccttttattgattgttttattttttttgcattgttgttttcaataccataaatctaatttaattggtatttaactacaatttctttgaattcgatgtcacttgtgtgagttactatttaaataatacatatacttacatgtgtaaatatctgcaacaacctttatggaagtaattttaattttatattatgcaattgaatctcataagagaaatatatttttttttacaaagatgttataactatattgattatgggcacatatcatatttttatttgtattctgtcatttttgtatactggaatttttgtttcatataattctaattaggaatattggcggctaaactaactgaatttaagatttgtaacacttaaccacaaaaactgaatttttggcggctaaactac

SEQ ID NO: 161339 - DNA, 4822 bp, Cannabis sativa
taaattctctctacccaataccaaacataggctaaaactatatatatataggagttgctgtagttgaaccttctatcgttgcttcggcaactatatattataatatacagtacttatatctctctcttcagtttcgtagttatcttcttatttttcaccacagctaatactaatagctattcttccctattgatttcgtaacttgcgattctcttcgctgatcagagcaaagaaattctctccggttatcgtttcgatttcccttcaccatggcttacgaggatgatccgtacgtcttcctcttcttttccttctaaaaggattagggtttcgttcgattcaattcaattcaactcatagttattgttggtttcaggtaccgagatgagaatggcgagccactgatggactacgacgacgtgccttccgataccgatcaaaccccggagcgcaatcagcacctcttagatgacgatctccttgaggatgatgattggcaaggcgcgcgagagcggtcacagaccccggtccatggcactgcgtccggctcgaaatcgaagcccagaaagaggcttattaagaaaagccattccactagggaggatgttgtggccccggaatttatcgatgatgaggacggcgatgttgacgcttttgttggggatgggtcagatggaaagaggaagaagcttggtgggggtgggaaggagaaaggacataagggggaaaagaagtttgggaacaaagctgggtcgagttcgcggttgtcgaagaggggattctcggataaagcggctagggatcaggatggtgaggtcaaggagctgtgggatactattgctggtggtgattccgaggttaaatttgattgttcattgttctttctttttcttttttcaggtttttgatttagtagttgctatttggtttttttctgcgttagaattatgttaaatctcttgttgtgtctactttaaattgaatacgggcaatctaaatgttcctttctttgttacaatttaagtgtgtactttgtttggtatatggtaaaatcgaaaaatgtatttagttggtataccaatgtaaaattcataggcaatgctggctatgattctttatatgctgaccttgtctcttctagcgtttgtgggcagcttaaatggttatctgttacttgcttgttatcttttcttttgttaaataatgtctcttaaagtttactctcttgaatggagtaggatgatcaagaaggtgtcagaactatggatgatgacaactttatagatgatactggcgtagatgctgctgaccggtatggcagtgacaatgagcgacgctctcctcgttatgcgcctgaggtttgagttttatcccactcctacatgcatacatcttcttaattactgttgctcagtgatcgtatttagcatcatcatccctctctctcatgaagttttgttccatcaaaaacaagaaaaaactctttatctatttgggcttgggtttgttaaattcttagaatgacataataacgaatgttactcattaaatgtcagttttattttcaaaaaatgtttggtactgaactattgatactatagaccttcaattgcttgttaggctactctttttgttactgtattgctataattgtttggtattttgctaggcggaagaggttgatgaagacgaagaaattgatcagctttttaagatgggaaagaaacgaaagaaaaatgaaaaaagtcctgctgaaattgcattgctagttgagaatgtcatggctgagcttgaagtcacagctgaagaggatgcagaacttaacagacagggaaaacctgccattaataaactcaagaagttgcctctgcttactgatgttctctcaaagtaagatgtttaaatttgatcctctgttaggtggacttgtgtccatttcatgtatttaatgtatattatgtgtttttgggtgttcaggaaacagcttcagcaggagttcttagatcacggagtgctaaatttacttaggacctggcttgaacctcttccggatggaagtttgccaaatataaacattcgtgctgcaattttgaagattttgaatgatgtatgttttattgcctacctccttagtttgagaagtttggtaatctgttgatagcttattaagtacctgaaatttatttctttcatgcagattccaattgatctggagcagtatgatagaagagagcaactgaagaagagtggtctgggaaaggtgaggggtttcatttgacttgataatcaattacacaactttgtcaacatgatttgaaagaaacaaagtgaactttaacacttttcatttttggcaggtcattatgttcttgtccaaatctgatgaagaaaccacatcaaacagaaagcttgcaaaagaattagttgataaatgggtaaagtgttgatcctgaatagctctcttttactttaatttggacccgagcattctctcacagaatgtttctctatgcagagtcgaccaatatttaataaaagtacgaggtttgaggacatgagaaatgttgaagatgagagagttccataccgaaggcctatggtcaaaaagtacttctccttccctgcatgcatttatgtagttcgtcattttcattttcatattagattgttagagggtgcattttttctttatttcttttgttttctaatctatgtatgtgtattaatcacacaggcctgcgaataactcagcgagaatggaatctagagatggtgatctggaattagatgaattttctaggtaagatgacacaccagttctgatctcaagacaatcaaattgaacctctaatctgctctaagccttttataattgttaaaatatatttaagggagcgcaaatctggtcaatcatcatcgagacaactcactacaaggccggaagcaactccgatggattttgttgtacggccacagtctaagattgatccagatgaaattagagcccgtgccaaacaaggaatacaggatcagcgacggttgaaggttggtattcttcttcttaagtaattatcaattgaacttaaatatgtcaggtatgtctctagcttttttgaaaggtaaataaaagatgattttgcaataaatattatctagatggtaaaaggaaaatgtgtatttctttcaaattagtctagttgaactgtatttatgggtagaaacattattttttaaggccctaggctgtgatgttgcatttgctaccgtgtcttctacttatgctactgtgtatctctactctcttctaatttattctttatgatttaatccttgatactgcagatgaataaaaagttgcagcagctaaaggcaccgaagaagaagcggcttcaggccacaaaaattagtgtggagggtcgcggtatggtgaagtacttgtaatgatgtgacgtgagcttgaataattggaagaggggtcttgtggtactatctttccaagttgtaccgatttgtgattgtgggggcataaacgagattaaattctttcgctacgaaccgtttgaagcagtgaatggtgagagaatttaaagatgtactgctgttgtatgtgtggccaaagcaaaggaagagaatttctgtgccccagtttatggccctttataggcacattctgccttcctgttcctggattgagtgctctgaataggatcaatccagttaataacgtccttgttagcttggctatttgggggttgtgaattcccccttgtccttcttactatgttcaaactaatacaaatgcggattttgatgatttattcatttcctaactggttgttgtatatcatttccaaagaaaattgaaacaaaaaacccaatttgtgaggatataaattttgttctgtatatatgtatgttgactacatgttgtcttaggtcgtcattatggtggggttgattgacatgggtgattggctatggtaaacctccctcttgatccctttatttgtgattctatcctggaatatattgggtataagggtgagtcgaggagaattaggattgttaatctaatctattcggtacaattcagtttacatataactcaaatctaatattgttatctcaaagtttgcgtacttggtgtgacacccatatgtggtttagtttagttgatacttggcataaacagagacctctgggcagagcatgccgggcagatcccacatgagattaatatcaacaaattacctccagaaagcatctaaccagactatcaatatgtccgccaggtaagaatagatcaatgtaccttaaaagattatttcaatagaaaaggacaaatctcaaaaagagcctggcgaggtcgttagcgcgttagctaggttaaaggatccaagaaaagttggtcaggattaaattttgtaattttttttatttgtgataaacctagcaacatgatagtcatctaaatcagtttgtatgtgtaagcctatatatttgcttttgggccaaattagtattgtgcttattccattaataacaattatttactgaaaaattaaattcctcccctttcgccttgtgtgagagttagggggcagtaataggtacgatatactgaatttaaccctctttcacatgaacaaccccaattatgaaggtccatttactttatttaaataattgtgttaggctaattatattagtttaacctaattaaaattaattaacgacataaccaattttgaaataaatgaaattaatttttcattagactattttagaattaatttacaaaaatacatttagtttaaagaaa

SEQ ID NO: 161340 - DNA, 7886 bp, Cannabis sativa
  modified_base (7834)..(7838): a, c, t, g, unknown or other
tttttttttttttttttgcagtgcttgcagtttgagtggtttgatgaacaatcctaataatgacacatcaaaatgagattatatcgttgagtataagtacaatatacataaaaagattataaaaattggataacactacgcaaaacgcaacttaattctctaatttaataataataatatgattaaataataattgttctagtttatgttaatatacagtttgttattaattactcttaattaaagttcgtattttaaattttctagtgttattagtattttatttttattattggtttttatgttgtgtaaatttgtttgtttttacaatgttagtataatatatttttttttattattctttgtatgaagaaaataactcattaaaatttattgagtaaattcaatagaaaaacctttaagagagaaaagagtgagaaaataataatcaataaagattggcaaacaaaaaagtactaatacaattaagataaccaatcatcacaaataatgatcatttaaaaaagaacaagtttttctaataattaaaaaaaaacatttacacgatagatcaaaatttaaaagacaatacaaaaatactttaacatagaaaaaaatatatatttttacgccttaaacttttttatttacaaaaatatatttttagtaaaaataataaattattttgttgttgttgttgttgttattttataatttatttatagttgtgttatagttgggatgatgttttttgttattttataaattctttatagctaatttatagttgtcatgagattaatttttcgttgttttttagttatttttttaacttttttctgaaaaggtgttttataattttaaaactttaaaaaaaaatacttttataaataaaaaaaatttagtcgtaaaattgtaaataaaaaatcaaaggatttttaaaaattctcctaattaaaatataatattattttaaaaaaatactaaccataataataataaaataaatcaaaccttgaaaaaatgtatggaaataaaaaatttacatttatatatccagcttatcatctttaaaattgaccaagcatttcttttttaaaccaaaaaaaataatcattatgaagttgaagtcggtggtccattccattccattgcagtgaaagtacaccatggaagatgcccttaggtggatttcgtgccttgaataaccttccaagcaaattaagtggtcactcttccactcagttactccaaaaagtttgtatttcggaatcaaaaattacaaaaaaaaaaaaaaatatatttaaaaagacgtaaatacaaaaacttgtatttagaaaaaaaaaaaaaaaatcaaatcaaatggagttcactagagtcactacccgcactagtctcaatctaggctcctagaagctaatgtgtaattaagtaatgttacgtgtgtttagatataaagtaataattaaatataaatttttaatatattgtttgacaaaataattaataattacacaataaaataaatttttttagtagtttatattttaaatgaaatatttttaataattacatttaataataactaaattatgtaattacttttaattaaaacaatacaaaatatttagataagaaagacaatgttttcttaatcaactaaaacaactcccattatcttgatgggttcactaaattaattttgtggctcacattattgccaaatgattcttgtttggataataaggagaaaattctctaaacaaaacgttagaattgacaatgagatagtagagttatcaaaagctttctctcatttcgagtgcttataatttttgtgcaacttgctaagattcgttgatatataatttgccgagtggattagacgaaagtgtttgttcaatgattgaaaacaaaatccttgcttaattttccagggtcccatcaagaagaaaagtattaagaaagtgagaacattgtagggatgagtttgagctttttccaattgttgagctaagttttcaaacttaaacagtaacactttgttagtccaaaagtgtcaaatcctcttatgggcctaattacatgtttcctttactttgaatttgaaatgtatatattttttattttatttttttttgaaatgcgaaatgtataatttttcaaagtgttgaaattgtttaacaagagcccgactcctaatgacaggacaatttataatacaaacaagccagattacatcgtaatcaagctgacttaaaagcaaataaaaaaacagggctaccatattggcctgctttttttattattttttattttatttatttattttgttgttatatctaaatataaatttctacactggttagtcttgccaaccaagaataaagaaagtagattcctccaaatagatgggacaagaaagttcaaacctgattaaaaaattggggaagtaaaatgacatttaagcttaaacatggccttggttattaacttattattgatttcttgctcttacaaaatctttcaagtgcaaaaataaaagaagcaaaaagaaaacccaaatggcaattggcttcagttattggcaagacagaaggaacttcgttattcatgtattggaaagcaaatggttcatggtgtttggcacactcttgatcatgagcgccaatggctctggttacatgtttggtttatactcaaatgacatcaaatcaaaattgggttacgaccaaagcaccctgaatttgataagcttcttcaaagacttgggtggaaatctgggaatctcggcagggctaatcaacgaggtgtcaccaccttgggtggtgctgtcaattggtgcagccatgaacttctttggctacctcatgatatggactgccatcactaatagagtgccaaaacctcatgtttggcaaatgtgtctttacatctgcattggcgcaaattcattgtcttttcctaacaccgccgcattagttgcctgcgtgaagaatttcccagaaaaccgaggcagtgttataggcctcttgaagggatcgattggtctaagtggtgccatcttgacacaggtctatcatgccatttatggaaatgattccaaggctcttgtcttgttcattgcttggcttccgcctgttgtttctttggtttttcttcgaacaattcgaatcaagaataccattcggcaaccaaatgagttgagagtcttttgtaacttcctgtatatatcacttggtgtagctggatctctcatgaccataattattatacaaaatagcttacatttcaagagaccccaatatgctgcaagtgcttctgttattttggttctactctttttctcattgtttgttgtcattaatgaagaactaaagtcctggaagctcaaaaagcaagccttgaaagaaacttcccaagactttccaatatcagaacaattgccagttattactgaaaaccccctgacccccgagccacatccagttgcaaacagagttatgacaaattcatttaaaacatacttaagttggatgaaaaccattttcaatgcaccagacagaggtgaagactataccatactccaggccgtgttaagcatcgacatggtaattctcttcattgccacaacatgtggggctggaggggcattgacattaattgataatttgggtcagataggaagctccttagggtatcctaaacatagcatagcgacatttatatctctcattagcatatggaattttctcggacgagtcgtggcaggctttgcttctgaaattttcttaacaaagtacaagctccctcgccctttattgctcgctatagtgatgcttctctcttgtgttggtcatctcctcatagccttctctgtctcacattctctttactttgcatcagtaatcaatggcttttgctatggagcacaactatcattgttgtttgcaatcatatccgaactctttggcctcaaatactactcaactctttacaatgttggagcactttcgagccccctcggctcttatattctcaatgtgagggtggctggtcgcttgtatgataaagaggctctaatgcaaatgaaagccctaggcattgtgaggaaagctggggaggaattgacttgtaatggcggtaagtgttacaggacagctttcatagtaatcacagctgtgacattgtttggctcccttgtttcattcattttggtgtttcgaacaagaaagttttaccagagtgatatctacaaaaagtttagggaggaagaaacagctatgactcagatcacacctaattgaaaccataacagaataacagaaatagaaaatgttgcagctgtaagtactggtgttactcccactgtactaaaccaccagaaacagaaccatcatagaaatatctctgtaataaaaaagaaagatatttggcaatgtgtgaaaacaaatttggcatatgagaatgtccttagcaatctattcttctgtaagatcactatagtaactgttacccaggaattgctcctactttcttttttcattaatttccaaggaaaaactaccactgaaagtagcggctgaatcccagatgtaagactcaataagaattgcaactaaagggagttaaaagaaagagatatcttgtgctgttgtgcaccaataatcacaaccaaaacttggtaacatcttggagtaaacagcagtccaattaacaaacggctcaactgtaaaagatcaaagattctataacaaaacataaataaccatcaatagacattatgtactttcttcttttcatatctgccttgtgaaaacttatagaaagcatctcagacattatccatttttggttccatgcccactagcataggagttaactgaagaaagaatcagccataatatatccgaaatgagttccagacatcaagttccacaccattagaagttccatacttatatatttaagaaaaactaagttaacatagcaactagctacaaatgcctccatcacacggtcacagatcagaaactgaacgctggtgtaaacataaacacattctacaaataaaactaacaaaattgtctcagtatggatcatatgatgatagatgatctcccctcctaggacgatcataaggacctgccttttctctatagcctcccctaccataaggcacatgacgatctggccctccacttccattcctgtcaccaccagttcttggatctccatctctgaagtagcctctgcctctaccatactcattttggagctctcggtcaacaaaggtgtcacgagcaggtgcatacctttcactgtacctatcactgacataacgatcctggctttcatacctgctttctctaccatcaaaacgatccctatctccataacgtcctcggctgaatcgattatcaaaatggtctgtcctgaaacgatctccacgaccaccaccaccaccactacctctgccagaaccaaactgggatgagaaacgtcccccaacatccccacccaaggggcactcacgagcaaaatgtccaggacgaccacacttgaagcaatcagaaccagagccagaacggcctcctggtcttctcccaccaggaacatagtccctgtcatattccaaaccagcatcaacatcacccaactttggcttcgccttgttcactgatataacccgaccatctaactcccggccattcatatcactgattgcatcacccatagctcgatgatcagcaaaagttacgaatccaaacccacgagggcgaccagtctctctgtcagccacaacctaaatgaaaaacagccttagcctaatcataacatgagatgaaaccgaaaacccttccaatgctcacttgtaagtttcattgtcaagtcattaaacaaggagaaccttttcaattaggtctacttctacccccttaataatagcaccaccaatttaagaaagcctctacttttggaactggttaaaaaacaataatctattcatgagatcaaatactaaatttatttaaaaaataaaatcttcacaataatagtcccaaatcagtttagaaattttcccaaaaaagaagaagaaaaccctttggagttttaaaattaaaaataataaaaggctattcctttctttttccttccatgaacaagtacaatccttaattttatgagtcaaagaacttcaaatagaattatcaagtaagtactaagggaaaaatagaataaaattgaaaacgtattaaaaaattcatacataatatattattggcataccacacattcaagaatttttccatatcgagtgaaagcgtcttgaagctgtcgctcagtggtctcccaggccaatccaccaacaaatacacgattatcttctctcccagccatatctacgtatattcaacaatttcgttagataagtttgtatactatcatacaaaaatatatatatgtgtaaaaatcgagagccctattaaaagataagcagaaaccctaacctaggagagtgagaaagaaagagtttatgggtagatccaagtaattgatagggtaaaagattttcctttcccttttttggtcagttttgatcgggtaaagtttcaacctttgaagcttttgattttctggggttgcctttggggccgtactaggtccaatgtttcgtccgtcggtttgaaaatttagtacaggggaaaattgtttatttaaataaatttaagtggtttttagtaatattttttaattagttttttgtttctaaaattaaaaaaaataaaaatatttttaaaaattatgttttataaaattatttttattttttaattttttaattaagaattaaaattttaaaaataaaaaaaaaatacttttaatatttttttaattaatattttggactcgcgtgtgtattagttctttttttctatggcgaaaaagaagagagtgatacgaaagcctgctatcaaactgaatctagcaagttccccttcaatcaaagacagtttggttgatcaatcggatgttgcggagtcgaatgaagttaatttggtggagatggcttcgcaatcggaggatattatttagactgttctgaactctgaatcagataaggaggacattgaggagtagggaacctaagcagatgaagttgagaatgatgatttacttgcaaattctcaacaaaaatgaaagcgattcacagaaggtaagctctcgttctttgaacctaagctaacctacactgaacctatcaagaaaatgggaagaaaattgctcaagtagatttggaagaggttaaggatcaagcgactatatggagtactgctgtagtttgtatgatgttaggtgcaaaccccccatttgctatttttgagggcttcataaaacgtaaatggggtaaactaggtatacaataaatagtgaggatgaatggaggttttaatattgtgaagttcaatgacacaatgacccgtgacatggttttggaggagggtgtagtccaatttgataaaaaaaaaaaaaaaccaatcataattcgcccttggtcaactgatataacggctctaagcttggtgaaattggttcctctatggatccgattacatgatcttggtttgcattactggggcaacaaatgtcttagtgcaatagtgagtacgatagggaaacccataatgactgataaaattaccaaagagagatctatggtgaaattatcaagggtattggttgagatggatatttcagatgagcctccaagagtgatagaggacaataccatttagtagtcttagacaaaattcacggtaccttgtcgtannnnnagggtttcaaggaactcaccctataatgacttggaagacacttgtgat

SEQ ID NO: 161341 - DNA, 8071 bp, Cannabis sativa
acacggctgatcccaaatgcaccctaaaaccactttagcctaaacttctgaaaatcaatattgctcagtttgtataaattgtctgtacatatagatttttctataatttgtaacctgcttttacaattaaaggggtcattgttacagttacaacttccaaaaataaacaaaagatccaatttaaaacggcaactagtatgacccctttttccaagcacatgacgcccttaattattatgtgtggcaagtatatacaccaaatcctattaaagaaatattaaataaaaacctaaaaaggttgttgagaagataggtaaaccattactagtttttttatttttattcttttatattgaaagggtccatattccacaacataaggttagtaatgttagataagagaatataaataatgagagtttcattaaattcataaagagtactactccatatattttgagcaaccacaatcatgatagccaaacctttgcatttgcataaaaaaaaacacaagtctttcatatgaaaacatcaactcactcatcacagcaaaacaaattataaaagttccctcatcacatgaacactcttaaccaccattccttataatccccagcatagaagttttcagtcaccaacccaaatagaaaaagttctttcaatttcaaaaccagcaaaagtaggctaaaatgaataagaaaacaatatgcaccatttatactaaagattattcagaaacagaaaaagcttcaccaaggtaacagcagctctgcacaatcattcttgccctattttttttttccttatttttttttcttatttttcctttttttgggtatacggatcaaagagaagcccgcctaaatttctcacaagcttcacctagaaaaaaaagcaacaagaaaacctgaaaaaaatgataaatgccaaaagatggtaagaattcacctaaagatgatctgcctcattcaaatatccacattaaaaatgaccacaatctttggtaagaatagaatccctaccgcacattttaatgaggaactgccacctgtcaagctgcaatattgatcttaaactgaatgcagcattgagaggcgtttgccatacaaaactgcaagaataacaacgggacggaatggtgagaagaatgtacagagtaaaatttgttaaaccacctttctatcaaagcaacaaaaggatatttggacatgccataacattacaaataacagtacataaaatcagataacaacaagtacccatagagtatttttcaacaacaaaatattgaaataaaaaacaatgacaaaaaggttttattttaacttgaagagtaccaactctaaagtgattaatttacaccaaagaataaagaaaaaagcattggtataaatacctaacatatgttgtaacacattgcggcccaaagtgccccagaataaagccggaaaacacagaggacctagaggaaggcatgagataccagtttctcacaactcagaagtttccgatgcccaaagtaaagacagttttattcaagcaaaacttttatctgcttattcaaacaagcttcaccctatttaagtacttcattgaccaaagttcatctctgaatatctgcaatttaagggcaaacatatgttaaaatacaaaaaacatagcatatgctctttcaccagagccctctttcacaaatgttctccaaaataagatggagaagataacttgcctgcgaggcttattttgacgctgtccaaattcatcattcactgagtctggatacagaacaactggtcaatatccaataatttaaaaatgtaaaaaagaggctaaggatgtgatatgattaccaggcttttgtggagacttccattcattactggttttgtttgcaatatcttctttgctgagaaacagaacagatacaaaaagttatcgatcaaatcaaattaaggtttcacaaaagataagatgcaaagcttgcagttcaaaaattctaacacaagaaaaaaagatgcgaaaaattagccacattttcttatatgagcagcagcaacatagaagatgaaagaacataagccaaaaaaaaaaatgctggaagggaaaaaaccctttaaaaacacttgcaagtagaaagcgctgcgttaaatgttctttgaagtaagggaaagaagaagaatgagctttatatcataagcatgcagtagataagaaaaaacaacacagcaaataacaacaaagaagatcattttccatatacataataattatgaatcataacatcatgacaacaaattccttaacccagttgaagaccatattattcatacacattaatctagaggctagagatataacactaattagtagcttcagtcttcagatacaaaaatgaacaaattcaccatcaaaaacaaaaaaagtagcagacaatgaataaagcagggtttaacagcaaaaccagttttcaacatgcaaccaaccttgcagcacctccagaagatgactgtccagatgggcgagcatggtaagaaccatcaacagcaagatacggtgaacagtaggctcctgcagcaccggccagaactggtaacctgaaacaattaactttcctatcagagagtagattatagaaaatagctactgaatattttcaaatataaaaatcagtatataatgtaagtctcaaatttattagatggacagcatctatgttataaaaagacaactgtgcagcagtagactagcagttatatattaaaaaagctacataccatgtcatctcagaatttccaagaccaagaccctgtggctgagcaacatatccaggaaatgccatccctacagcaggaaccccaataccaccaggatgctgacctccaaattgcatgactgcccaacaagcaacaatatccatgtaagtcttgcaaattctttgcaaaaagttagaattaataactcaaattctgttcaaaaggatcagataatagtatgttttaacaaacgtaaactaccatctcgacagtagagaccatgaaaaaataactaattatttttctttcacatgagcccaagatgcaatacctggaagaaaggtcggagcaccagggaagttctgatctccatgacttacacccatgctacccgtggccccaatgacctgggccccaccatacatagcagagccccttccattaccttgaataacaccttttcccttcgcaaccagagctgttttagatttatttacctctgaagatgaaaccacttcaccagtttcaaaggaatttaccgacagagctgtgtttggtggagaggaagattgagaaccactaccaggacgctgtcctaattgttgtgcagaaacttgcacaaaagtttgtcctcgaccttgaactggacttcgctgagcagcatgtggttgtgctgataaggaacctcttatggcctgattatgaggacttggttgataagccatctgtccaggaatgacagccctaccgtgaatccttgactgagaagaatgagcagtattaacagtattaggcaacaccgctcctgaaggtgacatttgcgtactaatattactcactgtcttcccagcaactgaactggacgaatcatcaatgttgagtttgtccatgccgacagactctggtatattctttcctcggagcacagcactgtccacactggatgggcgaagattcctgttggtatttccagtttgaacatcccttttctgtgtaaggttgatctctttattggaggatcccgaagggtaaaaaggaggggaagctgaattcaagctcgatgcgaagacatttttcctagacgcaacctgatcaaattcagcattagatgcaggggtgaaagctctggctgaattagaatttgaaggtttctcaaaaggcctcccagatctacaaaggtcaacaaagagaataccaatccataagcattaatattggaaacttcatacagaaaaaataattaattattttcataatctaaactacttttcagcaaaaaacgattatccaatcgataattgattgctcataaaaaggttgcactcactgtttgtttgacattgatggtgactgactgttgttccttgtagcaggttcatacttcctgagcccctttcccctcacacctttcggtacatggccctgattagtactgttgttgtatgctttaggtctgttccctctaccatacccatggtcaacactacggtcaacaccacgatttgaatttcgaccccggcctctataattgctcctagatgatctccttccctgaaaattacatagggtataaaaaccaaaacagaaagaaaggcgtgcagatataaacacttgagcaagtttcataaactgacagtacatattaaaacagtattacctcctgataatgcctgtcctggaaagttatctcttcaaacttgtcatggccccactttctctcatccttggactcccacaacttcctccccccttgagttcgcctacataaacagaaataaattatcactgtatctcattagtcatcaaaaaaagtaaaattgcacttcctttccaaaagaagtttaaagcaaacatctttattaggaaactgacttaaatacgatgtgggaagtgaaaaatcatcatcaaaactctcacaacagaataagaagtgtacgagtcataatgattgtaattaataattaacaaaaaaaatacacatttttatttcattaagattttttaattcgacaatgtcatcccaactcattcagaaaaaaaatcccatacctgtgtcggccaccgttattgtccctaaacctgtcatcatgcatgtaaaaagctcctgccgtaggcacagcaaaaggttcattctctttcttctcctcctctccctccccctccacctctccctcggcctgactccccaattgggcgtcttctgattcttccacaggcctcctaacatcaccaacatgttcctttggaattgcagatatcgaagccggaaccctgccatcacgctcatgggaactcgcttcataaacctcttcttcatcaaattcttcctcttcgtcaatctcaccaccctcatcctcttcatcatctaccaagcccaattcttcttcatcatcatcgtcatcatactcggctgccccaccctgcccatcggattcatcagaatgaataacagccctacgatcaaccctcaacttttcactactaccctctccctctccttcctcatcatcgctcgcttccctcctccgcatcgcaagggatcgcttcgcctcctctggatcactgtcatactcaacctcttccgcaccaccaactgtcgccatctcccaacaacaaaaaccctaaatccccaatccttcaattcaaaaccccaacaaaccaatgccaataacaaaaaccctaaatcccaacacgccaattacctaaaaatcaacaagccccaaatctcacaatcaaaaccaaaaccaaaacttgctcgcgaagcaaactcccaattcgaccaattaagggaaaaaaaatataccgtaacgaataacccgaaatttccgcaagccaaaattagaatattactcaaaatcaaaaccctaaagcacaccgaaaattgaatcaattagagggctttatcaaatgaaactgggatctagggatagtccgtggcgaaaaaaaaaccctagatttttaatgaagagagattatgggagcgtcgtcatcaaatatagaaatggaaatccgatggtattggtaatgacttggaaatttattatttaatttagaaggttgaaacagagttatctagttttataggggtattatgggaaattaaggccagatattggagttggggattggtcatgttttaacacgtgagagattagattttagacttggttttgccattttgggggactcggcacgtgagattttcgaatgaatctcagtctgtgattcgattttaatctgacggtccaacaatggccaaccaatcaaattgtaattgccacgtcagcatactcaaagtagtatgtcaaaactacacatcacagaaaaaaaatatgtattattttttaaaatttgttctagtagacaatcctaaaaattatgaaaagtaaaataaaaagtaatttaattgtttaaataattaaatttaacttttagttttaaaattatttattttgaaattattaaggtcaagcatgctagagcatctccaatggtaatattttttaaggatgctaaaaatttacatgtaatctaaaaatataacattttattttatctctctttcacgttatttttgatactcttactttaaaaaatacttcaatgtataacactctctaaaaatgttataattatgatcttacacattataatttaatatatattttaatttttaactacaataattttttagcttcaattttttatttaaaaatatgaatagcatcaatgacacaacatatcacccatgtaaatttttagaatgacattattttctctccaatgatatagcaccttaatattttgccacataatatgtctacctcaccaaacatcctctaaagttttaccattggagatgctcttaattgtggagttgttttgtgatgggctaccagaaaataaaatgtaccttgttgttcttcaattgtttagtctcatacctatacaatctcagaatcattacatttgaccttcctcaaacgacgtggaattgcacaacttacctggtatttctccttacgaatcacaggattgctgactgtcacactttaccaattccatgctagaaagaattgcaataaaatcatttgataacacttcttcctatttctcaatgatatccaacgatcaagatgattctcgtaaaactctttcatttcattccatttatggccatcaatcaaagcaaatagcattttctattaatttgtctcctagactggacaaattctaattaaattatctaattgtctgttgttatgttgttctggactagcaaaattgaaatagcaaattttttaggtcatctcaatggattcaaaaaccacacgtttctcttaatcatcatagtgtactttcacatatccactaagaggaaagtcttttcgcaatagataaccctcgaaaccgtaatatgttgatatatggcgtaagtctagatgattgatggaagcaatgccaaacatatcccaagcttcttgctctcactggctagctaatgaaatagattgactaccagagatattcgtgttacttcgtttgcagtggtttgtacacgtttgtgagttatacccggtacttaataaattatagatcacttcaaattttcatttttgagaggataatccactccacaaatatcgatcaaaacttgcacccttgtataggtatgcaatttaagaaagcacaacaattgaaatgggtagtctataaacacatttattttatttttatgaaaagttattttcttattacaaaacaaaataataaaacaataaaagatatgttgacatagacggtgtttgatagtggtttcttggcaacaatgtagcacgctgaaacaaagttcaaaaagtctattgaacgcgtaattcttttattttatacacatgtaaaataaattgttcaaaggagaatcatctcatatagtattttctatttttttttattattattatttttacagtttgggttgctctagtgattgttatatgaatttacattgtgatttaagctgctttattggttgctaagtggatttccgtaaaaatgtaaaaataaaaaaactcttatttaaatattacttcctatattataaatttttaaaatttttaaaaatatcttaaattattataacatacctaattaaatcttttttttttttttttaaatgttgaactttaaaagtacaatgtaaaagcgccttgatgtattatttgaaaagataaatataatatgggaaatttacatggtatactaacttttgccatttttttacaaaaatactgttaagcggtattttttacttttttact

SEQ ID NO: 161342 - DNA, 2516 bp, Cannabis sativa
ttttttttttttaattttgagaaatttgttaaaattaatttgtaagatatatgaaattttatctcaaaattaactactgatgggggagtattttataaatcttatatatgggctaatatttccacacgttaataatgactctttaacaaaaatatatataaaagagcattgttattgggtatcagtggtgtccaataccttctatagttagcgtctcacgattagttagcgatattgtctaaaaactatttttttttaagttatatgagaccgatacttaattacaccaataatagtatcagaccaaaaaaggtgcgaggctccaataatatcttttagcaattctctatataaaagtctttgatatcaagtatagtcagtacattaatacagcctcaaatataattcattttgtcattattatctcattatttttgtctccctaacttccaaactaattccgtaaagactacgttaaagtaaaactatcataaaagaccaaaatatatcaaacttaaaatctctaattaacaaaccaataagaaaatatgaattattaattggcatcaagaagttcctaccattagaaattctattaattttgtaagaattatatgatgagagttgatcaatttgttgattgtttgtaaaagttttgattcaaagcaacaaagctagggccggccaaagagtgaggcggtcgaggcctccccatcattttagagctcctaaaaaattaaaatacaaaaaaataatatgatatataaattttagttcaataaagaaagttatagcacattaatgtaagagtatataaatgttaaaaacctttatgtagggttcttttatttatttatttgatataagaatattatattttataatattttcaactcattaattaattacctaaaaaatattatgctatgtatatttttaataaagaacaaatattatatttagttttttttttaatggaattactcaatgtacaatagtattttaatgtgtaaattggtaaaagaaaattgatataatttttgacttttttttttttttttacaacagtgctaaaatatataacactttaatgaagatattgttagtaattaattaaatattacattgtcaagttagcttatatggtgaaaaaattattaatttgttatacggagataaaaataattaaaattaatattatattaaaatttaaataatatttattttaaacttttgtaaaaacaaaatacctcattttaaatttgctctaagcctttcaacactttaggacgggctgcaaagagatggctaacttacccaaaataaagaggaaattatattgtatatccactttactttacttgttttaatttttactttcattttcatatttttttagatatacctacttttatagatgatgtccccaaaataaatgaacaactaaaaaatttaatttcctttatatagaaaatcgttttttacaaaacatgggttgccatatacaataataattctactgcaataatggagttagcagtttctctgcccttgatttttttatttatttatttatttttatttttatgttttagttttgtcttatctcttactttttcttagggctagtgtgaaacgttggaaatatatatttttaggtgtatgtaaagtgaaagaaaatagaaaatatacacatatagagtcaaagtcttttgtggaatgcaaatattttgttgatttttctcttgatatatattcatgatgacttacataaatccaatatatctgccaaataatttattataatctaaagcttattataaaaactactatgtcaagttataagttaacaatgatagaattataagatgtataatgttcgcaatgagaggatattagcccatctattttatatgtattactatctttctacacgttattaatagagattttttaacatctccacactctattaagatcacttagtcaaataaaatagtcaataacatattaaagtttaggaatttttaatcaacagtagctagtgcgattaaccataattcttgtagtgtgagcacaacttttaaccttttacctgcaccatgaagcacctgtgagtcgcaatgactcagcaaaaaaagctattaaatcaaaagcaataaaaatgcaagtattcttatcataacgtaatatacatactcgtcattcattatcattcagcatgcatatgtagtataacgtctatacgaacccgtgtattacccaatataaaaatatcatagcatcttgccgtgaatagctttatcattaaactaatcaaatattcactcaatacacaattacatattttcagtgcctcgtaaagcactctaatcttacatccctgtaaacacgtattcatcacaaagactctgcaagaaaaagaaaaagaaagaaaggaaaaaaagaaagaaaaaaaaaaagaaaattgtttttttatttataatttttttaatttaaaattaattttattttaa

SEQ ID NO: 161343 - DNA, 4334 bp, Cannabis sativa
atttgagcaattggatttcaggaatgccccattggaacttataagaatgtcagtggatctgatagagccctttgttatgcttgtccattttatgaacttccccaccgtgctgtatatgttactgttcgaggtatttctcttaatatataccctgatttgtgctcttcttttctaagaagggtggttttatcattgcttcatgtctctctggctttccctctcttaaaaggttcttacaatggtgcctgctacagtttcatgaattatcacgttgttttttacaggtggtgttactgatactccctgtccatataaatgcactgatgatagatatcacatgccacactgttatacagcacttgaagaggtcgtatacacttttggtgggccatggttatttggttttattcttctaggtattctcatcctgctagctctagtacttagcgttgcacgaatgaagtatgttagtggggacgaggtaccagctattctgcctgctcgccatggttctcaaatagatcattccttccctttcctggaatcattaaatgaggtcaatgttctaatttcatttttgagttgtttgtgcttcttttatatgcaattatgttaaaaatactccttcattttgtgaagtattgtgaacaaatctttactttcttcaggttttggaaacgcacagaaatgaggaatcccgaaatcatgtgcatagaatgtatttcctgggtcctaatacttttagtgaaccttggcatctgactcactctcctccgcaacaagtaaaagaaattgtgtaagctctcctttaatggtctcacctactttttggcttatatagaagaagctgtgtgtgtgataatttagggtttagtttcatatgttgtagaaggttattatacaaacgtatcttgaaatataagtgttttgccttatatggcagccatgaggatgcattcaatagatttgttgatgagattaatggtttagccgcttaccagtggtgggaaggatcaatcttcagcactctttccatccttgcatatccacttgcatggttatggctacagcgatgtcgaaaaagtaaattacagcagcttcgcgaatatgttcgctcagagtatgatcattcttgcttgcgttcgtgtcgttcacgtgctctctatgaaggacttaaggtttctttcttcccaaacttttgaacagcttgttgtccacgttatcttttgtttgtctgtttttagggtgttcgtaatttggttctggaatagcatgttgagatatttgccatatactagtaaggatgatgcatggctcaaaaatatgtgtatgaatcaaaacattttcgcatggatttgtttgataaattaatgtgctctcctagtactcttggtgaaatttcagtcgatgttttagataagatgtgtttactaaatactgtcccaagttattgttacctggaagaactttgtccagtgttttccagctgtatttcatttgagtgatggtgtctatacacttggatttcacccgctgaagccactataaatttatttgttttccgttaaaagtattactagtaaggagaaaagagttgatactgatccaagggtgctatgaaagtggtggtgttgcaggaagtctttggatggaaatggaggttccagaaggtcatttattttctcatttgtcattagggaaaaaagaaattgataaaataaacatgtcagtccttgattgaaattgaaggggcggaatgcatattgtctccttgcaacttgcagtgtatgttagatgttaccaacattgtaaggctattgttgtttttgttgcaggttgctgcgacttctgatttaatgcttgcatacatcgacttttttctaggtggggatgaaaagagagttgatcttcctcttggtcttcatcaacgttttccagtgtctttagtttttggaggagatggaagttacatggctcctttctctctccacagtgataacatcgtaacaagcctcatgagtcaggttggctactaaatcttttgaatttatgatttatttgaagtccccccaatctttctcctttaaatgaagctcccttatttgtaaatttgtcaactttcagtctatcccacctaccatttggtatcgacttgtggctggtttaaatgctcaactgcgcttagtatgttgtggacacttaaaagtaacattgagtcatgtcatcagctggcttgaaacacatgcgaaccctaccttaaaggcgtatggtgtacatgctgatcttgcatggtttcaacacacagcatctgaatattgccaatttggacttgtggtatctgctgctgaaaaggaggatgttgtagaagcacaagaaagtcagcacatctcgctgcttactgggccagaattagggtaacaatatgctcataattatttttgtcatggtgagttataaattgtttagtagttaagataactgctttctactgttcattttacagtgagccaagatttgacagggatgatcaactgggccatttgaatggcgacgaacattttgtgacacataaaaggttttttggagagattttacgaatagagagcttaaaaacgctgaaggaaaagacgtctatattttatctcttttctttcatagtttataacactaaacctgttggacaccaggtatgtaaaattgtgcctcactggatctactaagcatttccatattttgtagtcatgttatgattcttggacactctctgactttctctttctctctctctaattattacaggatcttgttggtttggtcatctcaattctgcttctaggagattttagcttagccttcctcactttgctgcaacagtactcgatctcgttgctcaacttcttctttgtactatttatccttcccctcggtctactttttccctttccagctggaatcagtgctttgtttagtcaaggacctagacggtcagcaggccttgcacgtttgtatgctctttggaatctcacgtccatgataaatgttgtatgttatctcaactcaaatgtcttttcctttcaaagaagttccacattgtataaatacacctgaaatatttcatttggtggacaatttgttgcagaatttgtattaaaattacttgtattgctaatttggatatcatgctctcagtacattcatatgttttgcaattggtctcttttctgcaggtggttgctttcatttgtggactgcttcattatacagctcactcgaatcgaaagcgtcctgactttcagtcctggaattttagcatgtaagtgattattcatcttagcctgccatgtaagttaaggcataatggacgaattataattatgtcagttcatgacaacatacattttggggaatgcagggatgaaagtgaatggtgggtgcttccttctggattggctgtgtgtaaaattatccaagcacggcttatcgatcgccatgtggctaatcaagagattcaggatcactacttgtatagcaatgacccagatgtgttttggcagtcgtgaaagcattcgttgaccgtgtacagaggcaagttagttatccattctttactatagtgttattctttcctagtcgttttgggaaatcaggttggtggtgtataggattaaattaatatagagaagtatagtaattgaacaaactcctatttgtgtcctgttaacatttagctatagtttcttaatacataggagtagcttgtcgttgtggctgctctgctgcctgctcttataaattattattaaaccacagaatgaatacatgcaatctgagctctttcttagccaataaaaccacttcattttctcactcgtttattccctttctatttctctcatttgtagtgtcttgctatttgtgatcattccaatcgatgaaactactatttaaaaattagttaggcaatgggacggccctcaactataactcttttttttttttggttactttggttattcaattaaatagctccaagccttttattagatcacttcgacttgtactatattaacttggaatgtcagttttattctgagtcttttttttaaccactcattagtcagttattaaatgaaaagaaaaacacattatgtaataacacaaatatgttgaattattcatctcatgttcaaacaacaatcacaattttcttaatactagtagaaaattactaaattttatgttaggtattttctattttatataaaagtgatatacttaaaaattaaagaaaaaatattattagtttttaagtgagattatttttatatatattt

SEQ ID NO: 161344 - DNA, 6747 bp, Cannabis sativa
attatttttaatttattattacttttgagagaatggtcggttgatgatgactttgactatatttaaatgattaatttagattcatctgcaattaccaagatgacccgatgaattcaagaaaatgtatcgatcaaaataacattattattatttcttcaaaaaaattaataataataataacataattattagtgaataaaaacaaatgtttaaaaatgataaaaatggagatgcggggtatcgatccccgtacctctcgcatgctaagcgagcgctctaccatctgagctacatccccttattgatgattgtttgaatagttttatatattaacttttttaaggcctcgatagaaaaaacaaccaactatcccaatttgatctgatgtttgcctacccttttgtttcaattttcatcattttaacaaatttcttaaatactgacttcaaaactaatccaaaattgagtgatatactaagttgggaaatggagtcattaacaattctttaaatatttaacgtgtggcttttactggcatcttttcttacttgagtcaaagggttcgaaaccaaccacaacccttcttgtacggattaaaaaaggcttagccctctaaagattagcttggtgtcgtaataataataaagagatctacaccacagattcccttttcttctcagcaaaaaaacacaattctttgaatatttcaaaaatattgtcaagagtgaaaaataacaagcacaacaccaaaagcatgtggttacccatagttaagagaagtggcaataatgaatatttaactaaagaggaaagagatgagataaataattccctgctgctgtgtttttacatctgcctaaaatggtatattacatacaacatgagaattaaccaaccccaccttttcatcatatcctttataaactgcaaatacctttgccccatacaactaatcccattccagttaaaatgcttactactactactactactacaactacaacaacattacacacacatatgtacaccctactaaaggggaggtattaataataaatcaacaacaattgtcagaaggaatgagaaattttcctaaaaaaaaaaaaagaagaaaaaatcgatattgatgatcactccaacctgtccctgtccctgtcccttcctctgttccattctaatggcaactttcttaatttctgctgattgttagtagcaatatccgaaactcttaccactggtgcaggcggcggcatcatacatgattgctttaaaatatttgtatttgtatgtcttgggtaagctgcaattatgtctttgcctgttctgttaggggacgatctacttgatctcggagttgaccatttcaaagtttctttcctaacatgacttggatcctgtttgtggttgatgtttgagagtttcggtttctttgaaggaaagggtactgtttcttcaattcttgccatattctcaggccgaaatacagaagctaatggtgactgagattcttcagttttcccgttatatttcaactttcgagctttcatggtcttctgagacgacttcttcggccatcttatcgtcctatccaggctttgccttggggggttagttgcaatgtcatacagcgttctagctgcagcatatagtctcggacagtgcccagctgtcgcaaaaataaatacgttacaaaacaataaaaaggcaaagaagcatgcagatatcgtaactgtatttcgaaaagctcttaaacaagaaaacatataaccacgacataattcaactaacattttaaccaatcccaacgggtctccaagccctacagattacttaggtttctcatttagtttgtaccgtacttgaatctccatccatactccaatgatcagaaaatcaacaaaggtcaacagcattggcaggtcatttagttagaccctaaacagtaatgtatgcaatgcagagaatttgaaaaatgaagtaaacgttagagacctaataccagactagccaccaatgatatgtttaatataattttgaaaggtaacgtcgtcgtcgtacttttatattccagacttttatatgactgattgctcttctccttttaacatcacttctacaatcctctttggatcctttcaaacatcacttctacaatcctccttccatgggctcccaatacttgaagatgaacaacaacatactatgtatttgtaaaacgcaaatatgcaattatgataaaagaaaccgtaccatttcctggattgttcaccttgcctctggattctgcatttccatgagaataaataaaattataaagcaatatcctagttgaacctccaagaaaaacagtaatagttacaacatgataaagtagaagttatacatgaaccaaatttatgaaaatgccttaccttccaaacatgtcgcttctgaatcacatccacgaccagtaagactagtagtgggttcgtgaagagaagttacattgtctacacaagccacttttagccctgaagggaccaaactctgatcatacttaagagactccaagtctgtaaaattgctagtcacagtatcaatagaactcttaacctctttccctatttttaaccatctaccttggcatgtacccttaattgtggacaacttaactgcatcagaactagttctgcagtgtccacttgaagtatgtgaccattgaaaaggtggcaagcttactcgacgagacatttgcttgcctggacgtagatcagcagtattttttgaagataaagtaggttttgctgcatccaagagcaaagactccaaatcctttggtggaggaagtgccaaccgttgcaaaatttccttaggttgatgcaacagtgactcaggtggattatcaggagcctcagacttgatacaagtgtcctgaagcataaaaactttagatgactaccgacacttaataatttttcggacctacaattattatactttcgaattggcataaaaaataaatggaagacaattagcctttcaactatcaatggcaattttgcagttcacatgtggaattgaaatgcagggacccaacatctagtctactgaatatttgtagaaaattctctaagaccagtaaaatggatacagaagtagccaatgacatatttacagtcatcaaccacaaaatgcatgctttaaatttttccatgacacaattcaccagtatcttagatatgctcatgatactaaccttattactagacgacacatccatcaaggatgaatctcctatctcaccattgacaccactagcttcaacggaaacagaattcaataaccacgcagacatttttctgtttgaacaactgtctatctcaacaatactttgggaaacaagtcttgggaggtgaaggagggagcaagattttctaagggaattcagaaaactttcattcacagttgttgctttcttccctttatccttgcctaggctaggaggttggtaattgccatgaagtagatcgttcaatggaagatcatctacaaactttgtgacgtcatgattatctgacttcagtccataaactcctgaataaatttataaataaatatcactggtaaagagcatatttagaatatagacagttggcatgcagcaaaaaattagtgagaataatagctaccaagcaataaccccatgatagggttctggtaattggataaatgctactttggtgtgattaaatacatcaaaaaagaagaatagtgagaataaatgaactgtaggaaaagttcttacatttactagcaagaaacagattagcataaataaacacagttaacctaccaacgacttaaatataaaaaatgacagttagtaatgacacaaaaagacggtaattattctgccagtttgtgttattttattttattaacacaaaccggtaataaaataaacttcgagatgcaagaagaaaaccagtaatagcacatatcatgtgaaaatatttttcataccaaataagctattccctccggaagccgaaccaaagctggtcgaacctgccttcattgaaaaggaatcatacttggtctttacaggaactctaagacttctcttgtcacctcgcttgctgttaaggttgctcttttgtttcaccaaatgagttttatctagaatgtttaataaagaaagaagataagtatatatcagcccaagctcctacccaatgggccaagaaagtaaaagaactacgaccaatctaataaacttgatgtaaaataattatctcaaaaagaaaaaatacagaacgtgttaatttccaccaaataaaaaacttttgatttcatttccaaaatgtgtatttgtgaaacaattaaaacatgcagaagcattttgaatctttccagaagtgggagacttccccagttcaatctctcttcttcattacccaaggtgaactatccatttttacagaatctcttcagaaacgtaggtcgcacaatcgcagaaaaaagaaaatttgactttctattagacattgcacaccatacttctctaaaatcttcttatcattgggtgtttacctgaataagtgccttttagtgaacatgaggtaagtttatgagacatatcctttaccccttcaactcctgtcggaggaggatcttgcaatttgatcacacgtggtcttttggaacatagattactactacttctagacacttttcctgctttccgttctgactgtacaccttcggccttgggagtcaacaaaagaccattcttagacctatcctgtaagacttctgacaataattcaccctgattgctgagtagctgattatcctgcttacgtagttcaggatataaaaaatcttttactgcagttgtcataatcaaattccaaccattagaataagtactagaatagcagaaaaaaataatgcaattatagaaacttttgtatcaagaatgtaagttaaatccaagggttcgagatgtggtgaggtaactgaaagaaagacatcatcgaagtttactcaaattgaaattgtacatgttcacataactgaacttctttccacattataatatgtgattgagtagcaaaatatgagattagatccataagcaatcaatacatcattagaaagctaaagggaaaattgtaaattgtcttcaaatatttccccaataataactagagatgattaaaacatcatatatcattactgaatgatatataaaaaacagaacatacaaaagtactctaaagaaagtacagagggaaaagcaatataagcaaccagattgacttatcaagttcccactgacgaattatgctaaagaagtgtggcccatatgttagttaccttatgtgccacttatcctggtcatcctgaaaacatccatctcaaaatctggttttcaagatgttataaaaggtccaagtacagcagaacttgaacatctcctttctgtagactgttccctaacggataacattctgcaagtggagttttttcttaacacaagtcatccacttatccttaattcatccaaatatatggtctgaccagatgaaaatatgtggaaaaactaactggcgaataactacaagacaaggaaacctatttatagcctcgtcaaaaacatgaatgaaaaaaaaaaacatgatttttattatccaaagcacataatacatgtttcggacaagtcatagtccgacttctaacgcatacgtatcactgtacatcaaaaatttcccaaatttccctaatttcgtaataacgcagaaatgaaaaataacagttattgtaaccactcaaattattgagaaccactcaaagaaaattgctaaaattcctcccacgcctcaaaaaatctctattcagagcctctaaattgatgcttgaaaatatcgaaaaataaattcacttaaaaaaacatgcttttaaagaaaacaaaagcgataaactcacatttttcactaatatcaatactagaacggtactcaattgaacggctagcgataactgaaacgccatcggaatcgcaaccttctagctcctgaaccgtgactccggttctcgcaaacccttccgatcccatcaactttgaagccgaagccacatccacaggtaaaggcaatttgaccgcatccataactaataacctaagctaaaaactacaaaaagactccgattcataacatctcttcgaaacctaacctttttggcgagaaatcaagcttttatcatatccacgaacaaattgcaacctgaaaatgagctgaggccttgattggagtccaataaagtgaaggaaagttggggtttctggtgaggatgagcatattgcggctatgggtaaaccagagaaagggggttttttttctagggcacgaattggatgaagaaaaataagtatttatacttttcgggaaaagaagagtatgttaggaaacatatcgtcgatagggaatattccggtgaggttaaattcaccgtaatccatatatgacgtggcattatccaataattacacgaaaataatagcaataggagctgtttcacacagctttgctttccaaccaatgatcattcaccacgtggtatttgtttgataatctgtatgttatttgggtttgtgtggttaccaaaataccccttgtggtgactcactagtaatggagttttatttgaaccccataaatttataaatacatctcattattaaaaaaatatataaacttaaat

SEQ ID NO: 161345 - DNA, 2782 bp, Cannabis sativa
tattttttaaggagctcttctttttgtgttggtcgtattattagtgggaatgatattcctattgatttggattccttgctattgcaagatctttgatttaaaataaacgtttgaaccttttattaaaaaaaaaaaaaaaattaaaccataacatatagactctaaatttaatcaattataaaatattgaagtatgagacaccatagcaaaattccaaaattaaaggtatattgacccttgggagtactcattgttcgaccacacactaatatcacgagggctagctcaccctacaaaaactcttctatatgtttcgttgtaatcatgtaatgtatatataagaatgatctaaatctgatttggaaaaataaaaaataaaaaaaagtatatatatgaatatgatctaattttacaagtttatttaccgtcgacaattagtagtacttccttgttttatagcggtctcaagaaattgattgatggatgaagggtcacgtaataaaaggctacactgcccatcgaccaatggtacgacccaaaagccaatggaatctaaagaaggagctcactgcctggaggtgataccggcttccatggaggttcaccgggttgagcaaccgccggcgagaagtttctgccaaaaactcaagaacaagctcttagaaatgtttttcccagatgaccctttacgccaattcaaaggccaatcaactaagcagaagtggattctcggagctcagtacatcctccctattttacagtgggctcctcattacaccttcaagctcttcaaatccgacgtcgtttcaggcctcaccattgcaagcttagccatcccacaggtctcaaacccaaaaagatatatactttattttcgtcttttcttgtcttcagtataaactcattgaaaaaagctctgttttttaatcttaaaacagggaataagctatgctaagcttgcaaatcttccccccattgtcggtctatgtgagtagtttatttctttttttctcttttgggaatttcatactataaagtttatgatctatactgggatttcactatttgttttttttttttcagattcaagctttgtcccaccattgatatatgccgtttttggaagctcaagagacctagcagtgggacctgtttctatagcttctcttatacttggttcaatgctaagcaaagaagtttctcccattaaagatcctgtcttgtttcttcaactggcttttacttcgactttcttcgccggtctgtttcaagcttctctgggattgttaaggtgactattattatcattatgtagtcgtttttgccgttattttcttcatttttcactgtcgttttctcatggagaagcattgcttttcgtttcgattttgtttcatcatccatgcaggcttggattcctcattgattttctgtccaaggcaattcttattgggttcatggctggagctgctgtaatagtttctttacaacagcttaagagtcttcttggaattacccattttacccctcaaatgggtttggttcctgttttagactctgttttccaccatacaaaagaggtaagtgtagcgaaaacatagtgcaagattttgaacttttcaccccaaaaaaatataaatttattttatatatataaatatatatattcattcttcttgaaattcaaaaagtgatttattaactttttaattttatttttatttttttaatgcagtggtcatgggaaactatattaatgggattttgctttcttgtgttactcctactggcaagacacgtcgtacgttattctctttcattaaaaataataataataataataataagtttttgtacataatagtttatttatttcatcctaaggttttttttaacattcagatcttcttcttcacctctcttttttctttctaataatttgcagttcagtaaataaccaataataacataactattattcttttcaattgtatatagagggaaaatctatataaactcacttaaaatttaaacctaccacaattaataatgtgtacttttcaattaccactctaggaagttttttgcttttgcagttcttcttaaatcatgataataataataataacaataataataataataaggttcggtatgtaaggcctgatttcgtgtgtaacaaatatttttggtaatattcgtctcaataaattgagccagaaatggaggtccctttattcaatccaatcttcatacttacttaaacacagatgaagttttacaatttttatgaaacataaaaatattgcatcaatattgctgtgactttgaaaaatatgaattgagtaatttttatgtgcaaattatacaaatacagatagtatatatatatatatactattctaaatatcttaattagtgtaatattaaatgctttaaaaaggtgagatagtattttaactgttttagggaatgagtttttacagagcacaaaaaggccaaagctgttctgggtctcagcaggggccccactggcgtgtgtgatagtctccactatcattgttttcgcattcaaagctcaacaccatggcatcagtgtggtaagcaaagcttttgaatttgattaggtcatccccacacacacttaataatatttgatcaaaatttcattgttggtatgttattatagtgtggctaattaagaatttttttccgaattttgacatgtactaaattatgttttttgaatttttttggctattaaaaattcccctgaactatt

SEQ ID NO: 161346 - DNA, 4070 bp, Cannabis sativa
gcgcttaagagtagaacacgcttcacatctcgctatcagaattaaaaaatatataagggaaaaagaaaaggagaaaaaagaacaaagaaaaggttatataataattgggcccccaatttgaactttagaatttcgctaacactgacggatatttttcttaacttctcattatatatatggtgcttaaacgagcagagagtgatatatatatatcgatagagataagggatagaagctcggctttgacgaattagatagaaccaatcctgtaacctttggtgcaaattaaaagtaacattagtcacagacactactatgcaccaattgatgatattacaggtttttttttttttttgttcgattactcgatcaatcataataatcacacttgaattctgagaaagtggagacatgattggttctggaccccatagaattgtaacctctaaatatactaactgtcggcaatatacaattttacttacgtggcagaatcgggaatcacatgcaagtttttaatattttcacgtcacccatgcaatcttcttgctccaatcggtctaaaatgaaaaccttcagagggagaagtggcatgtgcattgtttacaacaaattggacaattttctataaatatttacatgtatttatatatatttccgttctataaggaattaattatatatattatggtgctctgtctagctatccaattacatgcatgtgtgttactactcttaaatatcctttttagtataatattgcatttaccttctttttcataaatatatatatgctcaatagtgcatatataattataattttataccggttatggaatattttcttatcacttttattttgtttttgtatccaaacttttctaataaaataaataaataagtcatagcatcaacgtggcttgcttattagctgcagcaagtctctctatgttctctccatgtgtaaaagtacgagcacagagcactattatttggcattgagacatgatatcttctaattagttagcagtactaattaaaagttatttaattgttttatgagaaatgttaaggccggggtatattacggtgtcaagcactataagagtgatatattattatattggtgcaaattaatattgagtcccacacaatttgatttactgttcctaaattggtgtgccctccttatcccactaataattttagtacacatcatctatacctatttaacatataataaattctttaacaaactctaaactaaattaatatgtaaaatagttatagatgattgtccagaattaattgatgggaagaggcagcaatttaaggagagcaattttttttcttttatatgacctgtgatactaccaattgaatgttatttttgaggcatattaatcattctaaattacacataattatgtaaaatacacaatcgtaattaaatatatgtatatatataaatgttatttatatttatatattaacagtctagcggtatatagcacaaattaatagggtgctacttctgatcgatgccttttagcattaatcgtaattaaatatatgtatatatataaatgattattgtgttgtgcgtataatataaaaattttacgtattcagtattctacgtatgtttgtatgtacctcctcttctacactagctatccaaacccaaagcatatggcccaacggaacaatactcatttctcgcggccgtgaataattatatttatagtgctacgcgatattaattataaacaatactacgcctactttacattccataaatgttattaattaattatttcaagtatttggatttaattttttactgatataagaaatgtatatatttatatattacctttcttggtataaatatatatatatatatgtacattctagaaatcgaaagtatcttcattaataatgtattacttaattaaataaaataaacgaaactctcacgttgagttaatattactggcacgaatcatcatcatcatatatatgatatggcacaacacatggctgaccctttgatccccaagcagcgataccaaaaacagcccttcttgttggtagaatgggtagtgaaaagagttgtacgtatattatttaagtatacatgtacatatatactgcctgatctataaatataatattaaagtccttctatatatatgttctaattttgtttctggttgattccagaaaaacattaattaaagcatatatagacaattcgtcattgtagcatgaagtagataaattataatatatttaaattgagagaacttagctagaatgtgaccatgtacgtaccagcatcaacattatacaaggctgatttcttttttctttttgtttattaagtgtaaaattaatgagtcaagttatacgttggattatttctaagtacctactgattttttattatagcttaattgtatgtgtggccatcaatcattcttcatctaataacgaaaatatataattaactggtagaattaaatcttatatataaaaatagatcattaaccatttaaacataattgttttccataaaaaaaaaagaataaaaagaagatagaaggtgctggtggagtaggtgtttgacttgtcaatggatgaaaaacgtggggatgggtttcgcaggtcatgtcgtaagatttttttttcttcttcttttttccttaataaaaaaaaacaggaaagtaaaataaaaaatttggtcatgcccaaaaattttaggtccataaattaatgtgcaataaccgacaacaagatacgtggacggtggataatgtcgagtcaggatgagattatgttaaatatattttttactttgtaaatggtgggaccattggacttggcaatgtgaggtatcccgttgacagtcaaagcgaaaagatttttataaataatagaatattgttgttggcaataatctatgttataataatattctttcccaaaatgtagttcaaataatattaatgataattggggaaattatttagtgtcctgtatattaaaataattggagaaaatatgatatgtaatagagcactctactaatttttcttaacatatgcatcagccatagataggaagaggctgaatattcgagattgcagcaagggttaattttactaaaattctatactattatataaaaatttgaattgaattttgttcaaaatatcacaaaagtaattgtattggtgggactaaaagcatacccacaactttttattcctatagtataattataaaaagattagtgggctcaattaaactcaaaaggaaagagtgaagtgaagaggtgaggtgaggtgaggtgaagtgagcagttgagtggggtcacgtaggttctgttggaaggaaaattcagttaatcaatgattgattgtgaggcccaatggattcgaacctttccatatttaagccacattttatttttaaacaatcttaatgattccctcaaaatacatatattaatgattcacacaaaataatgttttgaaatattaatgcattagaaataattgcgaatatttgaagaaaataaaaacttcataattctttttaattgaatgcttttgtggtaatgatgaaatcaatattaataaatggtaacattattgacatgcagagtacttgaccattattagcttagctgttgttatacgtgtagtcccacacccagcctgccaaaactcatgtgcattgttttctactgtacacagtacacacttccttcctcccattcacatatatatactttgttaaaactatgagactgggattaggatatttttttagaaatgaagatggttggagttggagtgagaaagattaaaatgaacaaaagtattattccgctataaacaggggcagagccagcatgaaaagtttggggggcaaaactacattatgaatttaagtgtcaaaaatttaaatatttttattaaattcataattaaaattacaatacagaacgtctttcttgcatatcacgaaaatcatcgataagtgaatctatactaaatttt

SEQ ID NO: 161347 - DNA, 14127 bp, Cannabis sativa
ttcaatacaagagatagcacaacagattcatcaacaaatgcaagaatcattctgagaaatcttacaacaacaatttaagactttcttgaaagtcaagaaatatcaagaactgtccaagaatccaaagaggatgttactgaagttgttggcaaaaaggaaaaggaggaaagcaagggtcttgcaacccccatggcacccaacacagcgcggcaatgctagaacagagaccaacgaccatgtgcatcactcctcaggttttcgcctaaatcggagcttggggcggggattttttgacatgaactaccaagacttgcaactcttaacatgaaaattggctcaagaagttgatgtcgagtattgatggagagaatctggacagattgatactacaagaggaaatatttttctcttgtcatggatacgacaacgacgagaagatttgaggctgctttcatttcattttcaagggatgctctactacagtatcaatgtgagattaaaaagcgagccacattaagctggaaagagatgaaaaaattggtgttgaaagatttcaaaaacacttacataaggtccctttatgaccaatttctggcagtcaagccaaagggttttgtggctgaatataatcaaaattttagcagaattgccacatataaaattgagcacaattttgcgaaaaaagcccactagtttatcgagaagaaatgagaaacatgctcaatatcatttgattgaaaaggggagctatggaatacactattgtggtagttgaaatagcggattctccggccacatgcccaagtaatgattattttggaatgtaccaattgtgttcaaaaccgcaggaataaggaatcaatagacatttcctgatatattactcaaaaaaatcgacataatacacctaaactcacattaatgtggaaaatatactggattagtcaatccaaattggacttaattctcaagtcatctataactatttagtcataaatatatagatacataattttttctttctttatttcctcaattttaaattaagttttattcttactatgtatcggggatgaaggcttaaatttagaggaaatcgttgcttaacatatgttttttaatttattaaaaacattaatgttaaattatttttactatatatagtattttgttaattatcatttactgtatatgtaatatcatactattttattatttaaattattaccctatattttatattaatgttttttctttattattatttatattctttttttaaattaatatctaaagtcatataaattacacttcaaaaactatatttattaacatttttatagaatcatattaattgtattacttatttttattctcattaatgattttgtttactattaattatattatcttataacattttttgattcatttgattaataatatatttttacataaatatttttttattaaattaattataatcattcatatattattatatatttgtatgactaaaagtaattatatacattgttattgttcggttatgttttgttaaagttaaatttttttagttatgaaaaaagtttgatgttgtaataatgttaaagatttattatctatctcaaaaattctaattaagatttgaagatcatgttgatgagataagtttttctattcctctttattaaatcaatttagatttattaattttagtgtatattttactttactggactcttatttttcttataatatttttgtagggactcttacaatcattcaagcagattttatagaagcgagtctggagtaactgtttattgtttggtctacttttacactttaaggttgattgtaaattggcattgagctttgctttctctatgtttacaccgatgtactatcattatatgttttcacaagtttacttaccaattttcctgaagtatctctattccatgacattttatggattagttgtgcatacattcagggtgaataagaaacttaatttgacggatttgttttcatcatttttgtactctctaattattatttgaatgacaagttcatttttcaaaaaaaaatagacttaattgtcaagtcatccatcgtgtttagtcaaaataaccattcactttgatcaaatcgcttaatttcgtttgtttgttacggtatatgttttgtggcttcatttctggcagtcaagccaaagggtttcgtggctgaatataatcaaaattttgtccacctcttagctccattagaaaacatagcgccaaaagttcagttgggcacattttttaatggattagtcaccagtaaaggctgaattaagggtacaacatccaagaaatgcggatgaagcgatagaaatttccctagaatagtcaagaaccattcaagaaccatgagaagaggtgttaaagacatccaacactaagatatggagggaactcgatagcatcaattgaggcaagtacaagtgacatacagttggaacacaaccatagggctgccaaagtgccacctaattcatagatattgatttttctacaaaagatcctttgaacagggaacccattgcagggaactaaatttgccaacatttgactggaaatattcacatggtgtggataataccgttggtaacacaaaaagaacattattctacccgcgcagatggtgcagctgttgaggaaaacccaactgatcagggcagtttgcaaggataaacaacaatagatgaatatagaagagcactcaggctttttggaaggagtcgattttgagagggtatgttataagaaaaagcacttgttcattgcaagaaaggcacatttgtgctctgccacagcaacacctacacaatggacagccaccgcctgaagagaagaagacgccactggtcatgctacaacaactgatgggattttagagtttgatgatattcgttgacaaagaaacttgtacggatagggagcacaatacaccgggggtcttctacattcaatggaaatagagggaaaaccaatattaaaggaaaatacaaactgaaacttggttcatcaccaagttcaatagcaagttttcaccttgagaacaaggtgaaggttttttttgggatattgacaagcctcaatacactttgtttactctaggagactaagagaatagctttggccaggggttattttgtattaaggtattttagtaatttttccctatttttgtatttgtggttgttttaagttgaggggttgcattgtcgttttgtactatgaccgaaccctaaaaaatataaggataagagattcatttcaggtagcttggaaatagaatagacttggtctaaatagagaacaaccctctccaaaggtttattttggagaatcttacctctcgaatatgctagctgaattccttgccacttttatccataaagtattttctttgcgggatttcattgtttgtctttgatttctatgatagaaaatttctaaccaaggaagttctataaatatcatttctaaaaaaaaagaccgtatacttccagtttttatcacaaaaacataaattcactaaaggcgacaagagtcaaggaaaggtcatcacatatcgcacaattgtgtgataaacaatatgaaaaagaaaaaaaaaaacagaaaaaacagagccctcacactcatataacttcaaataatatcttgaccccacagcaaattggaagattactggacctctgtcccttaacctggaggactccatatttaggagtgttttttttttctttggagaaagagagaaaagacaggttgtactttaaacctaatcgctcacaatcgattccactcaacttgaataaacttccaaaagtgtcctcagtttagtagccaatctgctatacatattgtgtaaaggagctcttttctactgtctgtgtttatcttctcagatttctctttctcataagttggctgtactgagccagcaaaattataaaatgattgaggggcaaacaacatccaatttgtgtgggttaaagaatgccagaaggctttccaaagcccaagtgttaaagggtcaactaacttactatgggtaaaaaataatcacctgtgacagagcttcagacatgtagtaatgtgccctaaatgaggagccatcaatctttcgagcattatgacaatctctaatcgccatgtgaccatcatttttccaatttcgctgaaaaatatagttgcaagaatcaaaacctcatttaaaaataataataaaaaataaaaagaatctttgaatcacttcatataaaatatcaagaaccttcagcaacaacgcagcacgcatacagagacaatcatgcttcaatgctggtccaataaattgaccatatccatttaacacgtcatcgcaagcctcaatgccgaaatagtaattcatgtccccctccaaggatctttcagcaatttggagtagcttcttacacatgtcaagctgaaataacaatgttaagataggaaagatcatcttatagaacaaatcaacaaaatatataggaaaatatacataaagacaaaaatatgggcacccttacagcagcacttctctccttagaatgaccctttaggccaacttcagatgtcagttcacctctgtcaagcctagttgtgaagcttgtcagctgagaaacatctgcagggctatactgcatagaactatcacctgctgcaaatttgcaagtacccatcttattgtcctgaacatcctactgatacaggaaggtaaagataccaataacaagaaaagttactgggccaaatttctcacaccaaaaaatacttcaccagaaaaccattgagcatcaacaacaaccaatacagttcaagctgcaaggtatgaagccgcaaccaattgaactaagtccctagtagagttcacacatacatgcaaaatggctatacagtagggctgacaatttttacgccatacgataaaataactcaaaaacgatacaaaacaaatgagtttgtgtgacacgtttaatattgtttcatactcgtatctgagttttcaacacatttaataattgtgtcttgtcgcgttgactttgtttcaattaagcaccagttgtaataatgaaaaaaaaaaatgttactatttatcttactcatgtcatgtcctgatcatcttgaaacgtttaataatcgtctcgtgtcataattgtgttgacacaacaacacaaattaaactataggtttcataattttgtatatagttatgtttaattgtgtcaattacgtgttgtgccatattaaacgtatcataatcgtgttattatgctgtgtgacatgctaaaataattgtgtttgttttcgacacgtttcatgatcgagatgtattcgtctttactttaattgtgtagtgtcattatcgtggcgacacaaacacaagacgataaccacaaccctatccaccaataagagtaagttgaccatccattcaaccctttccaaagataagacccatgtcttgctcaattcaaatcaaatatgtgataaaagtatattgccatgaaatcatagaattattaatgtcttttacatgtaaatccttaatccagtctgtcaaaaagaaagaacagcatgtacgaggcattcaggtgcatatacccaaggtagatatacataccgtgatttatatccatcaaatagacatgctctccactgtaactaagtagaacctcttctccatctggactaaacgcaacatgagttaaatgcaagcttgaatgtgcctggaaaaaatataaagaagaaaggtagttttaaacccccaatacttttgactgtacgtctcagatcatagaaaacagcattacgaaaataaccaaaataacatttcgaggttgtaaaattgaagtcattaaaacaattacaaggttcaaaactgacatggtcagaaagatgcatgggacaaaaatagtcaacacaaggaggaggtggcatctttttctgacttgaagagaacggtggcagcatccttctgtcgtacaaccgtgcaaacgcatcactacaaacattcaagaataagatataagatgaaaagaaaagaaaattcatcgtaaaagtacgagaacattatttaactcaaataaacaaaaatgtacctcccaccaactaggagcaaatgaggcctggtggcactaatatcgcaagactttagagcaaaattttgtcttggaggatcagctagagacctctttgctccacacctcaagtcaatctgcagttgagaaatttatgtaaaataagatctttaatgttggaatcaaattgggcaatggttcaagcagcttaatctttaggattgacaagagaaatacattcaagggggtatactgaaacgcatgcatatcttcctaccgatagtttctttttttgaaaaagagaaggaggcctttgtttagactatcccagtttccatttctcttttcttatgtcgtaaaccacatttttgtcaatgtcgtaaaccctctccccaatcattaaatcactaacatagccatataagatggccctttcccatcatcccgtaaatttgtattattaagtattcattccacccagggttgtctcaacaaatttagaggcctcaggcagaaaattaattgaaggcctttcaaactaataaaaaagattaaaatttaatattttaataaaaaaagagttagtaaattttattatactgaaatttctcctacaaattaaaaggaaaaatacaaaaaacaaaagataaataacataatggtacaattaaaatatatatatatatatatgtatacataacatatacaatacaaattttttaatcttttgaaatatatttgtgtagacatcaataggctgaagggaataaataaataaccttaatagtaattataactttatatttttatgttagtgttagtgttcttctcagaattattttattcgtagttaactgcagataaatttctatagtaacaatttctataaattatttaaaattattatttttaaatcattagtaacataaaatatataaatatattataggccttgctcaaagggagagccttgggccttgccccaccctagagccaacactgattccacccatacaatcataatcaccaattttctataaagttcccccatataatttaatcacatgcagcatgtttctgattttaataaaatcctacatcatattagcactttaacatgtacattttggtaagtttcctatcacaataaagaaggaagttctgtcagaattattatcgcttctttttatataatatgcagattccttcttcgacaagtaataatatcacaatattgttcaatagttttgaccatttttcagaaagcaagtcagttggacataccacccaaacatgaaagtattaaaacatgaagaaaagtgagttctcaaccacaccattgataatggaaacatcctcacgataatatgaacacataaattcaataaatagattcatttaccaaaatattgcgacattcttgatgagaagatccagcaggaggacatgaagagccttctcgaaaatcatgttgcctcaatgtcccatcttcacttgcgctccatacaacgttagggtttccaacttcaacctgcaatagaaagcagcattgtcattgaaactgaggccacaattaagttccaagaacccatcactcttttaaacagaaaatcttacagccaacttcttgactcttcttgtatgacattgatacgtagctgatggagcaatagcactgtcatcagctcctctcccacttaatcgagacaaattaaataaccgaacctgcaaggaaatcagaaattacattttcaacattaaaacaaagtttagatgaagaaaacatctatcagtaagaatttctaatttcaaaacattacttctgcatctcccgctccagaaaccacaagttcgtcaccagtctcaggaataaatttgctacaaaatatatttgcacaatgcccagtctctaaggaatgcaaaaggttcctgccagcatagctccatatattaatctgcagaaaattgtacagaacagaaacattaattacactttctaagctgaaatatgtctactacttatgcttacacagctacagaatagaaaaagttttgagacagcaaatattattaaaattaaagttatggtaaaaccttagcattgttttaaattatatttattttggtaacacgtgtttcacaactataagtgggagaagataactagatccatatgcatcgtaatcgaacatatctcctaccaaaatctttgtttcagataatatataacagtattgttattatgtcgcatcaaatctttaatttattttcctcccatcttgctgtagtctaataggccttcaataaatataacatgacatgaaaaacaggaattctatgcctagtattcaacttatgtattttactctattttgtaatagaatagttagttatattccagctggatcattaggatcataaaaaactatactgtgactgtgagattgtagagggtattggggaattgaagaatagggttgtggagagagaggaaggtctctcaaattacctccaaactttgtgcctgagtttttacctataaaatgcagaaatatctctcttcatctctaatgttcttttagttctttgctactgccatatctagatttagagtcctatcataaccatgctaatgtggccatcagttgtattgctttccacactgaatatattaaggtaccatacccgtgtgtcatctgatccggatatcagaagtgaaccgctggaattccaagcaatagcattaacacaaccttcatgcccctgaagaaaaaaaaactttaagaacaatttttcttcaagcacagaatggtaactagataaattctagaatgcaggagccacattttacaacagactcaaatttagaaattaaagtacacttaataattaacttacaaaaaaaataataattaacttacgggaaaaaagaaaaaaacttgataaatattaatgtctgaccaacataaaagttaaaacaatctacttctcccctcaagttgccttcgagcagaaagcaaactatcgatccctaaacatctgcatccgaagtgacgatttcccagttgataaatacaacaacttcgaacttttactatttcttaaacttttattttctggagcattcttttctaagcttagatattattacctagacgactctgctactcaaacttccaaaacagaaagaaatctatacctctaaatgacaaacttcattttatcactacaactttagcacaagaacatgaaaaaggggaggtcaagaaacattgtcaacggtaggacaggcacaaaaatgttaaagatgaatccccattggtggattatgaattcataatgaactgtctgttatcatactcttatccaattaaagttaccaacctccaactctttttcctgtgaaagccttcgtatcagtgatgaatgaagctgaaaactgcgatttgcatcctacacaaaattgaaaacgagccaaattgtcttcatggaatgactgagcaacctatataacaataataataataacaataacggaatactcccgtagcaacatgatttaacaccacacaactactagtccaccgtaacatatattaaagcaaccaattgaacaatgtaaaataaataaataaacccagaacagcaatcagaagtaaattcataaaccaactcatttaagccattagggaaagaaaccagtttacatttttcatgccagcttagtgtgtagaaaagaacagaaaaaaacatcactgaatattactacgtttaaatttttggtcaaaatattcaaattgcatagctaatgaattaaagtcaaaataatccaagcaacaaaatagagttaaaagagaaatagaagagaaaggggtgtacttgagggccatggaggtatcgtctgtgaagcaaatcgtagatattaccgtcgtgaaaaggccagggttccattgaaaatgaaactccaacaaaaatcaaatgaaatcacagccctaactagtatggattaatagaagagctttcgatccttctacactctcctacccttcttctacccttttctctgtctagtttccttctttttccttttttttttataaataaataaaatataactatatatttggtttcttgcaaaaaaaaaaaaaaaaaaaaaacctatataccaaaacacacggaagcacgatgaacaatatatacttgaaaattctgctaaaaagatattttttttttttttttttgagaaaaagactgttattataaattaaatggagtcatttacaacaacagagaaaatggtagaggaaatttcctcaaatcacatacaatcattatccaacaccaaagcttgtttagccaagccatgagcagcttggttagcatctcgcttaacatgagatacacaaacagaggagagataggataaacgatttttaatatctaaaactaaatcaccaaaagaagaaatagcagtagattgactgttaatggaattaactaaaactagagaatcagattccaaagtagaaaccaacaaattgtggtgagcagcccaatctaatcccgtgagtaaagctttagcttccatttcttgtgacttgtatctacctgtgaatgactttgaataagccgcaacaatttgaccagaagagtttcgaacaataataccaacaccaattttgttacgggaaacatcacaagctgcatcaacattcatttttaattcattcagaggtggccgaatccatttagattgagtagccgcacctgtagagatcataggtgagttctgaatcgtagaatgatgctgaaaattgcagtaataggcagcagatttcgcccatatttgtgatggagagaggaccggtttgccatgtatgtaattgttcctatcagtccataaaaaccacatcgtgcaaaacatttgttccatttcagaagtggttttaagggtggataacaaaaccagacaatcactgaatttcattcgtgcaagcatatcataatcaagagaataaccagcagaatgccaaactttcttggcatgtttacagagaagcagtgcgtgttttatagactcccaggcattagagcaaagactacatgctgcagaatcaattatcttcatgttacataatgaagcagcagtaggaatagctcgatgaaaagctttccacacaaaaattttaactttggaaggcaatttcagattccaaaagtatttccaccatgaatgctgagaagtagaagaagtaggaagctcggattcatcaagttcagttgcaaggtggtagcccgtttgtacagtatactcacttgaattagtaaaatgccatatccattggtctctcacatgagaagaagatagaggaatagaaagaataaaatcaatgtctacagcagaaaagtcacaggtgagtaatggcaagttccattctttgtcttcagtaatatagaacgaaaccagattctgggggtctcccgagtagtagaaaggtgtaaattcagaatgcctaggaatccaagggtctgaagaacatgtaacactagaaccatcaccaatttttaacctcaaacctttcacaagaagatcacgaccccaacaaataccttgccaagtgagagatgaacaaccagatttctaagcttgtagaaaaccattttgagaaaaacaccttcctttcaagacacggctgagaagagagtttggatattgaagaatcctccaagcttgtttagctaatagagcttggttgaaaggaataaatgagcgaaatcccatacctccatccattttggttttacaaagaagtttccattttctccaatgagtctttttcttatctttgtctgaaccccaccaaaagttagccatcatttgctcaagttggtgactgaaagtagatggcaacttgaagcaactcataacataagtaggaattgactgaaccactgccttcaagagaacttctttcccacctatagagaaaagtttgtcattccacgagttcatcaacttccaaatgcgttctttaatatcattaaacagttgcttcttatctcgttcagaataagctagcaatcccaagtatttttcgtgacactcactaataggcataccaagaatattctgaaaagagttctgaacaataggaggagtattgggagaaaaagacatgaccgatttgtctagattgagttcttgaccggaagcgcgatggtatatgtctagagcacgtttaataaacccacaagatcggtcatcagcttggtaaaaaatgaggctgtcatccgcgaagaacaagtgagatatcattggagcctttcgagatacagcatatcctttaagtcgaccgattctttcctcatattgtaataatcgagataacccctcagaacatatgagaaagagatatggagaaagcgggtcaccttgacgtagtccacgctgaggagtaatggaaccaaccacagaaccattgagattgaaagaaaaggatgtagtatgcagacatctcatgataagggagatccatcgaatgttgaaacccattttacccattaccgcagccaaaaaagaccattcaacacgatcaaaggctttgctcatatccaatttaatagcagcatagcccttagaacctttcttacgatgtttcagagaatgaatcatttcaaaagcaactaaaacattatccgtaattaagcggttgggtagaaaagcactctgtgtttcagatatgaccaaaggaagaacatccttaaacctgaaaacaatcattttggaaacaagcttgtacacaacattacagaggctaatagggcgaaagtctttcatagagctcggcttcttaactttgggaatcaaagtaagaagagttttattgaaaatagtaggatctccattgtcattaaggatatttaggaccaccgaggaaacaagatccccaacaatgtgccaatgatggtgataaaacatagccgacataccatccaaacccggacttttatcagaagccatatatttcagagcaaaaaagacatcttctcttgtaaaatcacgaagcagaaattcattttggtcatcattgatcgtagttgggatagtagagagaacatgagagagtgcccaatgatcttcctctttggcagtaaaagttcttgaaagtattgacaaataatgtttgaaatcccatctcgatcagtgacagtattaccatcagcatccttcaaagatttaatcttattggtggagtttctagcactagctttggcatgaaaaaatttggtgttgcgatcgcccgattgcaaccaatcaatacgagacctttgctgccaatattgttcttcttttgctaacagatcatcaagaatagactcggctgtgttaagagtgtgagaatgtaataaagttggagaaggtaaattattgatatggttcacacgtgattgagcttgagaaatatcactctttaattgtccaaactttcgggtgtgccagctctgtaaattatcagcaacattttacaagttggaatgaagattagaagccatgtcacaatcgggttgaagcagccaggtattggaaataatctcagcacattcagcatcagataaccagagtttttcaaagcgaaaacgagaccttcttggtgtgatagaatcagtagtggctggtgaaaaaatattgaccaagagagcacggtgatcagagccaaaataatcaagatgagtgagctttgggatcattaaaccatcggtccatttctgattaataaggcaccaatccaatctttcttttaaagctgaaggatttttcctatttttagcacatgtgaattcatcaccatcaaaaggaaagtcttgcagaaaacatctatccagtgtagttcgaaaggcagccatttggttattgtagaaaatagtgaatcgaattatatgtgtatttcatagaatagtacatatttatatacaaa

SEQ ID NO: 161348 - DNA, 3056 bp, Cannabis sativa
ttagcaagaacagaagaacaagctggggcttgatctgatggcttaagaaccactgcatttcctgctgatattgctccaatcaatgggtccaatgccaaagctattttgtacgaacaaacatgtatattcatattatgctcaattctctatcttaagaaaaataaatttatacatataatggactcacatacatataggaaagttccaacaagaaaatattagaataacgccaagtggttcaggctgcaattctccttttgcagggaaaaaaaccagcggaattggacactgttacaatacaaaatgcccaaagtcaacaatataccttaatttcactactaaaacccaaaaaagattcattggcatattcaacagattaattatgattttttatcctcaaattattgagatggttgatttcaaagtatttcaatcaattctgtttaattttactaaccaatatctaatgtaaaaattttctaaacactaaattctacctctcaaactgtcttgtacttgtgttagtaaaattaaaaaaaaatctttaaatttaacaatctcaattgtttaaagaaaaaaatttaaccattacaacatataatttagggacataacatgtaaaagttcttaaattttaaaaaaaaatactaattgaccttttgaaaaaattaaaatttcaataaaaattctgataggattagaatttgagataaagtggatagagtttcatcttaaaactaattgacaatagaaagttcagatagtgttatatattttattattttttcacacattaacaatgtgaaattctcgtagtaagaaagtgagtacctttttaggagcaacccatttctctacgttgctcaaagtatagtctgcagatttcaacactaccccaatctaacaaaaaaaaaacatttttattttattagaaattaattaattaatcaaagtgtttttatatcatatatagttacctcatctctgtaagcttcagcagggtgtttaccaagatcatgaaagagagctttagagagcttttgttcattatcttggataagattaatgagtgctgtgagttgtttttttctccattctaaacttcgagttttgccacttttgaaactctcccttacttctcccaaaattatttccattgacgactatcctttttccaatactttttcttgggggtaatggtgagactaagaggttggatttttgtcacttattaaattttaatacctaatctcatccattataatgacaactgacaaccattaaataactcaaccaattcatcttacaacaacattatttttggttttgcatttaatgtgtacagagacttaatttagtagatgaatggtgttaagtttgttatcaattctggcaataaataccatttctaggtctcacaatagatatgataatttcaaatttgttaaatgaatagaaatttttattttaacagtttgtttagtaaaactttttataagtcaaatacactcacaataaaatgagaggtttacaatatagagaaatcaattgactaaatcaaccattcatgtcttccttgcgacaattgagtgtgtaaagacttttgtattatatatttttaggatattgactaaaattatttcaactaaataatttgtgtacaaacttcacttttactatgttattttcacttccgttaaaataatattgttaaatactaacatatattgctgatgtgtaaacaaaattatacgttgtaaaatttaagtggtctacatcattttaaaattaaaataattttaaaaaataaataataaaattacaaaaataaatatttataatttaaaaaaccgtagctcatttcttctatgtcatccacctcccactctctctcgattcaaacaaaagaccaggcgcatggttaaatcctaactacggtgatcgaatatgatcataaaattacgatctctatccttaactcacactttctcttcgacacctccctctctctctttgtttctctctctcggcctaggcgaacgaccaaatcttggccacgatggttggatataaccataaaaccacgatctctcaaaaaaaaatcccatatctctctctctctctcaaagaagatggtggcgtccacaacttagtggctggtatatgttggatcttattttatcaagatcctatttactgttggtactaaaaataaactcacaagtgcacgaatctttaaaaatataattgagagtatcaacaagaaagtgaaatattgacaacattacacatacatatatgtgtcgtggaaagttattttattttagtagaattcgtctaaagtaaatatgattagtgtgtgtgaaattttagtgtaaacaatttatggctatttagaattttttttccgcgaattatgacttatgtaagtatgtatattctatctcttgaattttttagtcctttaaaaatagtctcgaactattataatattgtaaatcggtcattctatcaagttttatcatacgtggcaaacaaaatgatgatataattgtttagacaattgttatgcaacaccacgtgtataattaatttttaaaaataatttaaaacttttttaatttagtttcacgtaatttttttaattattaattaatttttagtttaatgatcttttaaaaatacatatttttttatttttttttaattttaaattatacaagtagcgctaatatggcaactagctaaccaatcaagtcattatttatttgtcacatgtaataaaatttaacagaaggatcaatttacaacactatgaataattcaaggactatttttaactgctataaaattcaagggcacaataatacataagtcacattttgagagaaaaatcataaataaccaaaatttattactattttgaaattaactagttgcctgcccatgaaggcatgaaacactaccttcattgtcaacgaataatgataagggaaagaattttgagacatctaccgtccgatgataactctataaaatagagttttttttttttt

SEQ ID NO: 161349 - DNA, 12714 bp, Cannabis sativa
aaaaaaaaaaaaaaaaggtcaaaagaagcgcaattaccagaatgaaaacaattatgaatcctcccggccatcaccaaattctccatcttcaagatcaccacttctacgagaactatgccgatgatctctcctatgtcttctactcctgctttcttgatcggattcagaagcagatgtatgctacaagaggacaagacagagcttataagcattccaagtttgtatggatcacacatgagacaaaggaataacaaggattaattctacacatcgtcaacatacccgtcttgatttcttgtggctgctactagaaccatgtgatttctttaactgatcgttctcgttttcatctgcaccgtcgtcataattgtgatgtcgcttcctatgcttcctactactgtctttccctgaccttttgttatctttgttcaaatgaccttcagcatcaaaattttcattgtcagatacatctttctccaagtgctcctctttttcccttctgtgcttgaacttgcttcgttctccttcatttctctccttttccttccttgtctgcagagtgtaagaatgagaaaagtacaccaactgaaccaagtggaaactgacatatatataactatttgttgtaactaattaaaataccttttcttcctttcttttctgctccttcactttcgcctgctctctctcttttgcccgctctttaagttgtgttacatgcttctcaaatatctgctggcagagattctcatcaccaatggaactacacaagaatgttcaataaaatcaagcatttattaccagaagggtgacttggtaattcagcaaccagacaaacattaataacactcaatccaacagagcaactattgtcagaaaccctacgggtagcataaacccaagaatgttctagacgcatttagcaaaaaaaaacaatgttctagacacaaaaccatccatcagacaaccaattctattgtgagaatcaatttaaatgagtagctgaatcagaaccaattgattatggttccaacttttaacaagcaatacctgtactcttgactattttcaaaaagctgtttgcagtcctcccatccagacaatgctgttatatcctgtaagagatcaaaccaactagacagtaaatttctcagaaggggaactttatcccattcactcacataagaaagtgagagctataacttgcagtaagctcaaccttagtagaagacagcagatcagaaaaatcttccatacagcgtttacgctttttagcctctttatcctccttttctctgaccctttcaagtaactcatcaaaaacaaactgcatggaaatcgcaaatcacatcagatcactgaaacaatcgtctccaaagaagtcatttttaaacacataaccaccaagtactcttcctaggaaaaatgcctgttaattgactaaacctactaaaaacacttaaaaaattatccatgaagaattttagtaaacatcttattattttaataatcaatttttgcacccagaaatctcaaccgaaaaatgatgaaaaaagaaaacctagctcagcatgaaataacagctactgttatttgcaaagcatggcaaattcaaaattgatgctccctaccctacttaatcctataatatttgcaaagcctgaaataacagctacagttatccaagtagatgccaagcccataagggactcggcgggagaaaacagcaatccaatccaaagatgatcataataaataagccatggaatcttcactgttgcatcatataattcaatagcatcagagcggtaaacagtaaatcatataccctcaaattgaaatcagatactggcggcgagctaatctctcctgtaatcatgtgtttgaagtcgtcaaatgttgaggttgatgaaagcataatctgaaaaatgacagctattaggtccttaaacatattttaaggtctgtcaaatagaaaatgttaataaatgatacctttcctgacttgactgcatcctttattcgagttctatcatcatgatactgcacaaaaagtaatagtggacaatttttactttctttttggaagcacattttagaaaagtaaaaactcaaaaacaagtacaatgataaggctctttatataacaaaaaccattagatctaagtctaaaatatataatttaaaagcattcacattattgatcacaagagcgtactgaacccatttttttttttttttttgaaaacttactgaaacccaattattgctatgcaagaaataacatcaactgctcaattccattcaagtaactatataaaacaaccagaagcatggaaatatggattaattatttgatttccaatcaccattagatcgtcttataagtataagaattgagaatttgagagtttttcttactgcccaagactagtcactagcatttcataacaatttgggtatcaatcacataacagtcccaaaatttctaattcccttaacattattgttattatgtttcccttgcacattaccaattaaggttaagtatcgtatcagctaaataaatgtctttcaaacttttagtttgtcagactctacttccacatatttgcattaagaataagaagtaaaaaagaaagggtataaacaaggagatgtcatacaaaaatcaactgaagagaccgaaaaaggcaaaatagatatgaaacagattatgttggcaacaggacaatcggttatgctcaaccagaagactgtaaaaaggaaagcaaaatggtatagttaacatacttgtttctgaagctcctccaaagcatcttcaaataaatcttttgcagttgagccagaggtgtttgatgaaactgccacatatgcaggcaagtccttaacctaaaaatatataacaatcctcagacctcacaaagaaaaatactaaattaagggtcaagacaaaacacatgacaactagtatttgaatataaaaacccagacttcatagttcatacaagttctactaagaaaaatccaaggcacatatattaaccttcatgaaataatcacgccagtgagtttttattgtaagagtgccatcaacaacatgatcttccatcattttacgaaactcatcacgatttttgcgctctgcctttcttaattcctcctgaatgacataaaattgagatcagacatcaaccaagagagcagaaagtaaaaaaaaaaaaggcaacgcaaataaacaattaaccttctgtatcttcctctgctcttcctcttccttctctaaatcacgtatatattcctgaacaacaaaataaaataagaactggctctggttcaatctacagctaatgaggagaatataaattacctgaaagacatccagtcgatcaattttttcaagacatgaacacctctcatcagcttctaagcgatcttgaagttttcgccactggctgtttacctaaacaggaaagtaatgtcaaaacgtgaacgcaataatgagactggtgagtaaaaccaagtatatgacaattatgctaaacagtaaacaagtaccttgataaagtcacaagactccaaaaactgcctgtattccattatatggcgcttacgttgctccatagccttttctcgttcctaaccaacattacagtattatttttaaacttcacataagatccataaagttcagatataactactgatgaatttcaaaagtaatccaccacaaacatttgataatacaaaaaataccttctttaggagttcctcaatatggctctcaagcagctccctccggtctctatctcgttcaactgctttaaaccgcacatcattttcaaataagctctccaatttactgcgtagtccatatatcccgattagcaaaagagtaatgaccacgacaagactgaaaaactaaccggacaaatttttaaagaaggccatatgccaggaaagacaaacctccatcgtgtagatggtgtaatatctgttgattcctgcaattgaatcaataaaaaataaacaaagtaaaatacatgtatgtacatctgaccatagattacaagaagcttccaactcagtagaaaacatacctccaacatttttttaaattcttctcgtgcctttttgtgcttcatccgtctttcttctgcatccagctttttcctttgattcaagaactgcagcacaaagcaatgaaataagaccaaatattttttttttctagcatatatatgtgtgtgtgtgtgtgtgattgtgtaaaaaaatgacaaattttgacaatgaataaaataaaatgttgctcttcaaaccaacccaataactcttagctttaccaataacttggacataagactatcaataaatatttaaatcataattatatagaacactgttttatgattaactgtagagtatagaatgaaaaattactaaactgaaaaaatattttattcatgattttaatattttgtaaatttaagtaacaataatgtggaattttatctctgataaattttaaaatgaagaaaaatagcttctacataagctgagaacagggaatgcaaaacgaataaggtttcccttggtaaaaaataccaaaattttcaaaaaaaaaattctcaattaaaaatataaatgtaaacataagaaatggtttctattttttcttgttatttctatttatgataaaacaatatgaatattttaattaaattacatttttaagaatcaggttttatatagaataagaatacataataaaaattaatcactctataattacaaaaaagcttaataaaaaacaaagcaatgactaatgtctcactatttttttttaagtttatatatttactaatatctaaataaattcaaattgtttgagaggttgaattagatttttttcattctatcaaattttttaattattagttgtctcaaattttttaattatattagttcatagtgtaggttatagtggccttataggcctctaggaaagggaagtcagaattttgtgtagattttgggagagatccaaacctctcgaagtaatttcagaattaatttaagatttgcaattgatagagaaaatatcgtatcaaatttggtaccagagacaggtctagcaatggccaaattagcatcatctttcagcaacaatacgcaattacagcagctttctaagactcaagagaagaccagcaagaatctagaggaatccttcaaggagacttacagcagtttggcaattccatctactattccaaaaccagttgcaaaaattctttaaatcgcaagtcaagtcgaccaacaattttccaaaatcatcgaaggatgctgaaaagtcaatcaagaaccagcaatcatcttcaatgcccagtaactatcaatattttttctcaaaacagaactgattttcgagtaaagaaatcggatttgtcaaattctgatggggaaggaaaatcaacaaagaaagtcctcgtcttcaaaaataagcaactgttcgttacaagaaactccaaaattatgaccacagcaacatcaagtctttttccaaaggtgtcgctgctcgacagagaacaaccacctgaagagagaagaagccaactacataaaacccatgtgatgaaaaattattgtgcttcactaacaaattagcctaagcgaccatcataaatttcatggctcaaaaggcaacctaatgggcccaagaaaacagcagacccaacctaatgtttgggaccagactttcaaacccaatcatcacctattttaacatcggtaagagcaagccctatattccaaagagtagcattttctcttgataagttagggattcatgatccagatgaggatgacatgttggacagattgggtttggttactccacatgggcatttttctaaaggagatggcttgtttacaatgatgggtcttcgacagagggagaaaaaatggagttggaagacacaaccaaatactccccaagaagaccggagatatcaaatttgggtttgcattttttcaaactaaatttggttgcgaggagaattccacagtaacttttggtcgtacgaccatgagaaggatactcaaaatgacagtgcgaataggtggagtactgaagggagtgcttctgaaatccgttccgtaccttggtgtgcaactactcccaaacagattctcttctatgacagagctggaacccacattactttaaagagaggaaatcggactaacaatcagcatgttcaagagctcagctatccacatagacatcttcttgttctgtctaataaaagctaggagaacaacattgaaggaatggtttttcaaaagagtttgatgtgattaggtggtggcattcaaaacatagcaagaaaacactatgctctttgaaaagtcctataggtttgagactctaaccaaattgattacgtcttcaccttgaaggccattcttttagccttgaggtgtaaaactcaacttttataactgaaaaaatatttatagagcacctaaagaagaagcagcttcagttcagctatgatttttttttaatttcgtttctttctcccagaaagtgaagtactgattgagggagaaggaaggagaggggaacggctggcactgtggctaaccctacatgatatattatgagtgtttttattgggcatttttttgatgagtttgagttttgttaggcatttttaagttagcaagctaaaatcacatcgttttgggcttaaaaagcacacattgtttttttcctcaggcgtgcgcctcacctttttcaacgcctcaagccctcagtgccattagaagtgcctcaccaatgtgaagcatacgcctcagtcatccttgttaagaggcacacgccttagtgcaaattttttctacctcggtgtgaggtgcgcctcacaaacgcaatttcacattgttgaggataaggtgaaacttcgaacgggcaataatgataatgataagccccatgtcagattcacgtgtcataggaggaggagaatatagacttattactagtcatttaattaactgtacaattgtcatttaagctaaagtggcatacactaatttgtacattaggatatgcaaggattaggtatttttgagagggaaagaaaaatagcaattagattcatttttgtggacaactgcaatcttctcgaataatgggtacaagagagaacaagcctctgaaagcttgtgaccgtaatattctatttcaatatgaatagagatatcttagagggatttaagccatttgtgtgtaggttcaaaagataagagtttccttcaaagaaaaagacttattaaggtagacatccacaatagagtaaaatagaaaattgttacaaagatgtagtgttggggcatattggtctatgttgggtaaaaaaagtcgggtatcccaatggaagcaccctcgtgacaaatactgcaagtggctcgggaaggtcctatagaaggtgctttctcgggatacatagcattggttctcagaaaattagtagtgaggagttctgataatattgttcttttaggttaatggttatattttgttagtcatagagggtatgggcttagtatatatattagatgagcctctctaaggaaaggggaagtcagaattttgtgtagattatgggagagcagtagctctagttgagagaactttattcgtaatttcagattttccaataagagaagtaatttcagatttaattcatgatttttgattgaagaaatttctatcaattatatcattatatagttatatccttcattataaatagtaatggaacactttcaagaaaatatagagaccattttcaatattactatattatatatatataataagcagaggcataaaaatgcaaatcaaaataaatgatacaaaaaaaatcatctatgcaaagtatactttctgttaattttgatataaagtggtgttgaatcattagccaattattatagttaaggataaagatattgatagaaatacgtaatatattacatggcatagacaagggaagagatattacctcattaaaagcttgttttcgctctccaagtgatttcagagcaccataccttttgtcattaattattactctcatggcctaatacaataagtgttttgtcaggaacttaactacatacagacttattaaaaggaaaaagaaaaaaaaaagttagaactatggcgcttacccgatcccatgtccagtcagatccaacattaaaagattccaacagcgacataaatacattttttgcctcctaggaagaagaaaatagtaaaaatattgcacaacaccaagaaagtaaaaacagactacaagactcgaaattctaatttgtaccagcttagttgcgtaaaccaatggttctggttcaactgttttatcttctgcggcaatttctttactcatctctactgttacatcttttaatgcttcctgcaatgcttaaatgtgtcaagttgctaagaatttatatcaagcatttgttaccatacaaaataaactaaggaatacctctttatgtgcagatactccagctgaagcagtaaaatcctgagctgaattatcactattattcctacaaaatatgcattcataaattttttaacttatagaagccaattgtagcaacacagctatttataaaaaaaaataataaaaaaaaaacatagaacaatacattggttctgtgactgcagtggtgacagcaccaatgccttcagtcgaagtgttagatgtagaaggaacactaatagagctatgatatccatcaacacttgcttttgtagtgggagctgcaacaggggaggaagatgatcttgaaaccaccacagcttgctgttcaccagcagatgaaataggttccactgaaacaggacttgatgctattccttgggctttggaggatgtatcgacatagggtgcagattcaacctttggagaagaaacagtatcagaggcaggccaactttctttctctcgtggatccttgagtgatacatttgctttatcttgtgattccttgagagatacattcgctagttgctcacgcgccaacttgatttgcagagaagggtagtaaagaaaatataagaaaaaaagaaataggagcaaaaaggattttgtaattgaacatcacagggtttaaacattcacgcacacaccaaaaaaaaaaaaatcccctaccttcagctcctcaggcatcacccattttgactctttggtgactttgttgtagtaatacctgaaacacagataaaataaatgttcaaatgtcaccattggccacaaaaattgcaaaccatataagagattggcttataagagaccaagagtggaccaacttttttccatcagggctagtaaattccttccagttagttgatgcatctgccctctgtcaaagccacaaatttggtatcaaaattccattagttaaggaatttgcagacaaaaatactagagggaggagaaatcattataggtcagaaaggatactggtcagatatatatttaggctgatcaaagagtaataaatagtgtagaaaattctctaacaaaaaacattcataccctcaaccagaaatattattttaatatagaccaaaaaacaaaaacaaaaaaaataattaaattaagtaaaatataacaaatagtaatatacttcaccaagcaacagtattaatgtggtaaaccatgaaaaaagactgaagttaacacacaagtcagtgttaatatcaaatgatacaaatgacagagttaccaacattaaggctacacagtgggtagaccaagcagcaaagacccacggcacatcctacctctcaacaaagtggcacagcatgtacctgtaagcatctttatggctatggaagtcacacaaggtcataatacctcggaggtccttacgtaaagagaataccttcgagtacatcaataaacaaataagaatgaaacaaccagatgtgacgagtaaaaaattcatcagtaccaactcaagtaccacaaaatgatgaccaagtaaggtaatgaactggtaaaagctattaaatacaaaaaggatggattttgattcaaccaaaagtgatatgtcagcaatgaaattgcttaaaaatgttagataatacaacaaaccatccacaataaactagattattgcgataaaaatgggggaaagcaaaagtttcacaaaaatacagactaaaggagaaacgtaaaaacttatgtatattgccaaatgcagtgtttgacatcgctggactaacaaagtcatttacggaaaccagtgaaaatagcaacaaaaaagaaaactacacacaactctacaataaagattgggagcaaacatggcaatgtgagctttgaagcttgatttaacaaattaaaatagtacttcagatttatatcaagaaaatgaattcacttgtatgactcacctcaatgggggtcattaaatccaccggcttctcccaactggaaagttttgtcctcctattgtagtagtatctgaaccattcattaaaaagttatctacttcagtaaacgagacaagtacacaatcactaagaaaaaaaaaatcattgaaaacaaattggaataactactattccatttatttttactggatgaaatgctacgttgatgattaacactaattattaaaaatcatgacaaggacagggaacagcaatcaaaattattactttcttccatcaggagacgtgtgttctaaccactctgattggatgaggttgagctgaacattggatacctgatatttttacataaattttaataacatcaatgaaaaaagaccgttaagatagcaaaggaattaaatttggcaagcacataggaggagaaaaatataaaactcttactggagcactgatgtttgtcattgaaggcttttcaatagtctgatgctgggatgtaacaggaacactgctttggctttgagctgataacataggctgcccttctgaagaaacatttaccacatgcatttgtattgattgatactgggtggaatcactgaaacctctttgcatttgaccataggaagcggcgaactgcaattcaagcaagttacctcaagaaaaaaaaaaaaaaaaagataatcaacccaacaactaaatcatcaaccaggagagagtaactagtgaaacttacagtatatgatgaagagagaggtgtccctgggccaactatattaggagtgaaattgtttggagtttgagcactatgctgaggatgaccaactgggaagagatgattgtttggatgagcaactggcaaggggtggctgttcggatgagcaattggcaatggcattggttgtggtggaaactgctgcacttgttgggaataaaagggctgaggagcttgaggaggaccaggaggcattgcaacgttcatgggtggaacacctcgcccaacaggctgaaaatgctgagaagtcacaggaatgaattgttgtgactgctgtgcgggaacaggaggccggaactgcatcaaaagaaattaaacattgattatttgttgctgttgtttctttccccttataaaggaaaaaagggaaaagatttataagatttatattgaaacaactggaaactttatataaaatatttgtgaaagagaaaatatgcattacttgaaaaggcatggcaggcaaactttgaggatccatggtacaacctaagggagaccgaacagactatccacacaaaacaaaaaaccaatcagcattagcaatgaatgaaaaggaacaaaaaaaatgcttgcctatttggtttttcttttagcacaaaatgttaacagaagaatgcaagtcttgtctagtctttggacatggtctcgtttgaggggttcaggttcatgaaatacagcgttgttttatgtctgaacgagttcttaagaattgggaattatgttgctagttacgtgaaatcgtatcctaatgcggaagaaaggggggactggttctggtgcaatctcaattctgaacgagttcataagaattgggaatcatcgattttacgcgatcgttggtttgacaaacctgttttagagaaagtgaaagcttaacatgatttggcaataggtggtatggggattaactgattaagtcgggttctaatcaagtgaatgtatcacaggagagagaattatggagaagatcggggaagaataggcttttaggcagaatttaaaaataaaaaagaatctacctatctacttgcagcggctgttcacgccggccgttcaccgaagactgaacaggacggcgactgttgacggagaaagtggggaggtagactgaagaggtttcgtccgtttgcttagggcagcttcacgggatgagagaatgagaaaagaaactttctttattccgtgtttggtaggggtgaaagaaaataggaaggagagaaacagtgaaagatagaaaagaaaagcatcttctttcttggtaaagaaaagagaatcaaaatcattttgtactttgtttggtatttctcgaaaattgattgcaaagaaattaattttgatgtttttactttttttaaataaaaatgttctttttgaaattccgtattttaatattcccagtttgattatttaattaaatgattaattaaatgcggaataataaaac

SEQ ID NO: 161350 - DNA, 3204 bp, Cannabis sativa
aaaaaaaaaaaaaaaaactctgttgaaattttagagagaaaaatttcaataaaaattgaaaatgggaggaaaaatgaagtgagatcaattcgtatcccatgggcttaaatacaaatcaacctcatccgttaggatctagacacgtggaattcaaaaaccaaaggtcatttaatccaacagttatctcaaacaacgcctgcacaaactccgtatggtttgatgacatggcatcttgggaaaataaagaaataaatacaactgccttttcaaaacactcgaaaagataaccaagagttaccgtcatatgactgaacaactcgcatgtccctcataaatagtttttctatttaacaaacaattgtcattgcaaaactaggggcatgtgttatagtgcgaagtttttgcctaaaaatgcgagtacagtctcataaaaaattgacacatggacacagttcccgatagaaaatatgatgtgttaataaatagctctagtagagatgtaaactttcgagaagatgcgaccaagataaagtctaatcgcatactatgtctcgcatagttgtaaaaaataagcaaggtcgagaggagttaatactggttgcgcatatactgattatatgtgatgaccaagtatacctcttctacgattgataaagattgtttttctacataggtttagtctggttgactagtatgatcgacgactcgtcaagaactcgcatgtttcacgctgtcaacacataaaatgtctaactatgcgatcaaagttgaacgcagacattcagacaataggcccaaagtccatacttcgagtataaacaccaaagagcctgcgagctcgtgcgttggaatatgaacaagcaactcgcaacttttcaagtcgcatatgttacttctcttaatttaaaaaaatgatgaaattattcttcatttattctgtaaacatttactttgattaaatactttcatttattaaaaaaaaaaaagattctacaccgatcagttatgtaatcctaaaggacatttgctttctatataaaggagtgatcaaatcaaataaaccaagctgaaatcattgcaaaagtggactaagcagaccaatctctaactgaaccactataattctcttgttatctctttatttctgcttttgttttgtctatttagtagcctatagttcgagtattcgctattttaagtgaatactcgtgtatatgcaattgagtattctaattttctttgaatactggtgtaaatttagtgttgtctaaattcttacgacaacaattatcgtggggttgggttttttcttattatttttagttgttttatagttaatttttatttgttgtgaggttgatttctcgttgtttttttagttgttttctatctttttgctgaaaattttgtatttttgttattttgaaattgttaaattatattttttgtaaataaaaattctaagttgtaaaattgtaaataaaacataatttatttatttattgaaagaacccctaaatttaatttgctctactgaatttaataaaaataataaatttactttatatttcgtgtaggatattgattttgttaaataaataatttaattttataaaacatgatccaattatgtgttgctccattggttctcgttggcacttaacgactctggaccatccattattacaacacttttgaaacagaagaacaattagtgctataaaaaaacaaccatgaaataataagacatggagccatatcccaaagataagtatactttacatcgcaccaaatttcattattatagataaagtttgttgttacctagaagtggagccaattagttaataagcttccattttaattttgaattttcttagtttatttctactagaagttatatatattatgatttatgatcatgtcatgatgatgaaatgtgacaatattaacatgtgtcacacgtgttgactagtgtatttttactttgtgtgattgttattaagtttaggttaatttaaatttttactcttagaattttgatatgtactaaattatgttttttaaatttcgctaaaaattctccctgaattaatgaaattgttgaatttaaagacttttgtctaattttactaaagaaagtctgacatagatgaaaatttaggagctcaatttagtacatgttaaaattcagatggtatgatttaatagatattaaagtttgggggtataacttagtatatggataattactacattagcaaaattaaataaaaatggaccgaagtctttaaatctaataattttaatagttcaaggagaatttttaacagcttaaaaagtctaatgagcataatttaatacatgtcaaaatttatgaagtaaaaatcttaattagccttaagtttagttatggtgataataattttaagttatgaattggacaagtattccatggccggttggttgcactgttgggaggtccttacctaaaaagcagtacaggaaattgactaccacaagtagatcatataagagtaattaattagcactaaatatattgttaatttatttcagtacatgcatatcttattcttgatttaaatacttcattaatggacaaacttaaaactaatggtttgtttatccagttgcatgaaaatcagtattcctaaatagaattttaagtaatggagtggtacggcatctaatagaaaataatataataacatttttttaaaggtggctctaaattttataatggggggaccataactagttgaagaaaataattaattaaatattggcaattcaaaattgcctagtattgccaaattgtggtagctaagagtatgtaaaggataaaacttgtagatccttaaagtaattgggtggacatggattccaacaagaatatgcattagatattccaagctagcatttatgtatttatgtgtatatattgttttataaatataaaatggaagctaatataataagtattgtattttttacctattgatatgtataataatttatagttattggttaattaaattgtttaaattaattcttgaaaactacaatataattaataattttttattcataataaattttaaatattaataattagatccaactaataatattccaaaactaactccaaacttataatttttaggggttttttcaatattatac

SEQ ID NO: 161351 - DNA, 3656 bp, Cannabis sativa
ttaatggcctcactaccatttccatcgccaaaactaagctcactgatccaccaaaacagaggaaccagattccttatcccaaaaacatggaacaatcatcttcttaaatggtgcaacaacagtcatgatagtccaacttttggactcacccttccttctaatcctcactctcgtcctctttattatcctctttcgtttcgtcatcatcttcgtctttcttgctgtcctctttcacctctgttcagaccaaattcacctacttttcgatattctctctcctccatgaccactcctcctcaagccacctccgactcgacccaatccacctccaccaaaacggtgcgtttttaaactaatgggtctgtttcgtcgattaaagcgtaaatttgagatttttcgagtaatggattttgtgtacttgcaggtgagggttgtgatcaagggtcgtgttcagggagttttttacaggaactggactattgaaaacgcaaaccagttgggtttgaagggttgggttcggaataggagagatgggtccgtggaagctcttttttctgggaaccctgactcggtccaagagatggaacagaggtgtcgccggggccctccatcggcggtggttactggattagaggtgtctcctagcactgatgaccctggcactggcttccagcgcaagcccacggtttgatatgatcaaattactataatgaaaattataacttttgtaataaaattaacatggtataagaacttggttactgtatttactgagaatcttgatgacagtaaaatctgtgcttgtcattgctaattgtacttttctgtactgatatgaaatgtttactatctttgtcatgattttgtgaaatgcaagaaagttttctgctttggaataagaaacctatgcatgtgatcttaaggaaaatttataacaattgtatctaaaaaaaaaaaaagaaaacgaaaagcacaagcacaatgtctattcaaggcagccccactgtcacaaatgctacaacacaaaacagaagttttttttttttatttttgtaggactaagtcccattctttggtctatcaagatctggtggtagatggttataaaatggggcttaccatgaaaatttattgttgaaaatactaattttaagatatgagaattttaatggctgtaaaatctgtgtttgtcatggccaaatgccaattgtacttttctgtactgatatgaaatatttaccatcctgtgttcttggcttttgaaatacaaggaagttttctgctttggagattacattcacatagatttggattaagaagaaacatatgcatgtgatctgaaagacgatgttagcagaaatatttgaaagggctaaaagtctcattctttgaaacttcatatgtgtggttgattaaagatcaggtgaattatggtaagaaaaaaaatggaacctatcgttgaaaatataaatttttaagatatgggaactttgttatgtggacacttgaaatgtgattctttgacacaaggcacttataacagccacatgactgacattaccatctacagctagattagaccgtgtaatgagatatgaaataggtgcaaggaaacaactttttcactggcaatgtttatttaaacccgttattgcaagtaaaggaaattgtacatcaaaaccaaccagcctagaattcgactcaggttgagttaaattgattattaacgaaacaccacaataccacatggaaaatggccctacctcatcttccttttaggaataggatcacatctccaatctgttttcatgtactaagctctttctatatataccttatacaaatgttctattattctagccgaaagccaaaagttcaacaacaaaaaataataatatcgttttatttttcattttggtgttcattttgagcatggcaaaggctataaaccataagggaacaaggaggggaagccttggaattcttaggtctatagtgggaaagcttcagtcaagtcttttgtccagaggagtgaaacaaggccattttgttgtaatagctacagaaggtcggaagccaaagaggtttgttgttgaacttggttatctcaataatcccgagttcttgaagttgctaaagcaagccgaagaagagttcgggttttcgcatgagggagctctagccattccttgtagaccggatgacttgcaaagaatcctggaaatgagaaagctctgaaagagtgtcgttttactacttgctagccagctagaataaaataaggaagagaatatgtaatgcaaaaaacaattgcaaaaatgaaaagtactgcattgcagtgttcatgctcttattttactatatttatatacatgtgtttgtgtgcatgtttttgtctctggtgcttttgttcactgacatctttaaacttcggccaaatcttatggcctcacatatggaaacttacaagaattatataatctgcaaatgtaccaagtggcattactgatgttaaaaatgtaagaagaatgtgtggcagtgtaaaaaatagatagaattttgaacagaacattatgttgatctttcatcaaatatctttagaaatcactggcagtaaattttttcattgtcaaatgagatattagcagatcaaaagtagctcaatcttcctagacaaatgaccactggaatttggagttgggagatgggcaaagctaatgagccatcaatattaatggtttctagtccctatcaccacagaggtagataagggaaaatttcaaaagcgcagctaacgatgaaataatgcagcacgtgaaaatgcctcccatctaaaatctcatactcgtgatgtcatcatgcaaatcattgaaaaaaaaaagaacaatacttctttttgtgttttatatttaaattagtaaatattgaatattacttcacaaattcattctgttagaagagacagcatatgcaacatttaacccttgttagaagtacaacatgtatttatggttagccaaaactataccatttcttaatttagacttgagcattaaacatatggcctcttgagtcaacatgttaccaagtttaagaaaaggattgtccccacttggtagccaagaacattaatgtctcttattatttcttacttagaagttattaaactggaacaatttgattgaccatgtacatgagacttgactaaaatcttaatgaccgactatagattgactaatcaaacatgactctcaaactagaaaaacaaaaaaaaaaacttgatgattagtaaagagtaataagaggttgttgtctctagttatagtactctgtttttttaccaacggatctactaaaactacaaaacaattaaccaaatgaaattttccccacttctcaccgacattgtaagaaatcctagttagtcaaacgagagaaccgtcaattataaatgtacacaagctaagtcctacataccaattctgacactgttcccctttaccggtcaccattcaccaagtgccgcaactaatgactttagtggaactccatgtacaaaatggttaaaaaaaaaaaaacaagttcgtttggtacgccgtattacaccgtattgtattgtattatattcaattatattttatacaatatttttatgt

SEQ ID NO: 161352 - DNA, 3110 bp, Cannabis sativa
ccagtagaagtagcctttcacatttactccattcctacatataaaaatatcaaacattgatataaattaacaatatttatagggagtttgtaagaatatatacattttttttttaattttaaaaatgtccatatgttcttatgatatcctattgaaaagataaaaaaattattaattaaaagatcattttaatagatgaacatataaagccagtcagctctgagatttgtggaattttaggccccttaaacatataatatttttaaaaattaaaaatataatatatatgtgtaatttaaaaggaaaactttaatttttgggtcattaggttgagtaggtcctaagcgcagacttaattaaggtcggtcgacccaataaacatagacattattttaatatctttctaaaatattctttcaatttctgcaaaaggggcggaatgtgtcttaaagagtaataatatatgtaggcacaaatttaacatacttatgtgacaacaaattttaataaatcatagtgtaaaataactgaaaaacctattttgtcaatctcttaaaggaaaataagtctatactgatattaacttacttgatagcttggttgacatagtatagatgttgaagaatgaacataattcgatagtcatcattgacataatcctccaaatggcgatctggaacacttgcctcaggaattccttgatagaaaacaaaggggtttaattatataaattagttaccattttgcattaagtttaaactaatattggaaacaaaatgagcaaccaatctaaccattttcagtgatgtaaatagtgatattttgatacttttgactcatgaactccaaaagtttctgcaacccttgagggtaactataaatattgttagttcctgtagcctgcaaggacatagtaaaatgagaatttaattagtaagtaaatcaataaataaattagaatataattgatgaataaatggaggcataaatatattacctttggaccaattggaattccatttttctccactgcaagtttgaaacaataattttctcttaattaagaagaagagattaaataaataaattgaaatggtgttgatttatttatgttaagtacctgaagtctttactgaaaagtcacctaggtagtgggttggttccatgggttttgcattagtaccatattttgaggtatagtagttcaacccaataaaatcaacagatcccttaaccaagtttttatcttttgaagtgaaagtgggcaatctctctgctactatcgttctcattgttaatggatattctccaaataccaatggttccacaaacctaaccaagttacaaaatcaccaaagatatcatcattattagttgttcaatagtacattttagaggtgtttgataaaatagtctcttttcttcctatatagtcacttgatgtaataactttaataagagggtttttttttttttttttttttttccgattaaaccctctcaattattactctacttgcacttaattttttaagttcaaattttaacggtagtgatacttaactggatgacaccttaaatttactaccagttcagtagtttggaaggttttaccgctaaaatttaaacttaaaaagttaaatgcaagtgaaacgtcaattgaaaggatttaaccgccaaaaactcaataattaattatttgcaaaatgactttctagacactcatcttgtttaaaattatattaaattttcgaaaacgacatttaaaataagttattttaacaaaaatactttacattttcaacactaattagtactaatgaacctaccatccaaggagaaaatccacatatctttctgcggccgctttatcttccaaacattcaggatttaaaggctctataaattctccaacaagggtgattccaatttggccatcttgtagagcctttaaaagtgggaaaaagtgatggagattaattataagagagatgttggtattgtaaatgaggcataattgaaatttgagtagtagataagcttacttgaaacttctttttgtagagcttagcagctctagcatgagcaaggatgagattatgggcaataatgtaaggttctatggatgagttaccagccttacatggaccaatgggtggtggcaatgagcatctactagtaggtgctagccctatgtcatatccaagtgcaaccacaaatggttcatttattgtgatccaattttttactctatctccatatgttttgaacaaaagttcacaatagtccttgaaatcatccctaaatgaccaaataatgacaagctttatcaaagcatgaatcaatgtaagtgaggaaattacacattttatgagtttttatacaatgtgtgtaaaatatgtttttttttttcgtgaaaaaattaataaaataataaaaatataaaaaaaatatataggaaaaattgctaaagttaaccttcataagacaatcaattatcttatactatttttttttttaaaaaaaaaaatcccataaaataaccttttctcttttgaaaaaaaggtcatatttttgcaaaagaaaaaaaaaatgttaataatgaactaataaacttacacaattgaaccattcaagaagcctccatatctgtcttctagagcttgtggggtgtcaaagtgtaatattgtcacaaagggtgtaatgcctacatttcaaaccattttgttaactttcctaaattagactttagcaaataataataataataataataataataataataattcaccaaccaaataaatgaatttcttaccattactaatcaattcatcaattagattgttgtagtgatcaatgccttctttgtttactccacctcttagtgaaccctctgaaaattttcaagctttaaaaataagtctttgttttagcaccattatttttagacatcacattcatacattataattttgggtgagggtaaatattattttggaccttgtgttttgcaaaagttattaattggaccctctatttggttaaactatttcgttaaatgacaaaatagaccctgtattttttaaaattatacaaataggaccctg

SEQ ID NO: 161353 - DNA, 5105 bp, Cannabis sativa
ataaccctaggccattaaaccgctgactttaggataataaccctaatcattgtttctaattactcacaaatataatattcagcataagtgccgccgtgcataactctacgtgttaactactgtcttacctaatatcctgcaaatgtggagattccgaatccccgggtattccttagtgtcggtagtcctagtcacacattctcggaatttcacaaatagggttaatcccaaaacacaatttcaataatcacataattacatttacagattaacataaagagctcgaaacaagctttctaacgatataaagaacgtccaaaacagagttccaagtcaaaagttatgggcaaaacaatattcggaaaaacagtcattcccactgccaaacctagtcgcggcgattgggtttagaacaccttcaaatcctcttttttaggcctaaaaatagccaaacacaaacctaatttcacctaagtcatacacaaacaaaaaccatgctaaacaaatgttttttcaggcattagaaacacaaaatataagctcatacataaaagcatgttccaaaaatcaataccaattctccatttcacaagcttgaacaaccaacttcaaagcttcaaagaaatcccagaattcaaggccaaacctagaaattaatcaacatcaacaaccataaaatgtcacacaaatagtctagatgcaataacatgtaatcttataagctcaactacacaaaatcaccatattttacttcacaattaacaacatgcatcgaaactcataagaacttcaagaacacaatcaagcattaacaacaagtatttatattcaaaaattaatcaagaactaattcaaaataactacctcaaatcctcaaaactcccaaataagcaagatcacactacaaattcaaagcttttcttcagagttgggtgatattggaaaagatgaggaagataaagagaaagggttgtctatggggttcaaatccagaaatggtgatttttcaattaacaataatctaattttacccttttgtagaaaatagaataggtggtcaaatgaccaaaatgctcccaaggaataaataatgtcataaataattattaagggtataattgtcattcaaatcacacatacataatacatgcatttcagatttctcatttatcaaaaccataccataaataaatcctaaaaatgcattttgggcctcgaacccggttcggcccaaaatacccggttgtgactataccgcgttgacttgtcataaagtacctgcagatagacagaataaacatactatataataatatagtccaaaagtacgatatatcatgtaaattacgattttacccttctcgggtcaaaattataaaaaatgccctagctcacaaacggggtcttaacatgtcatttattggtataaatcatatatattgaattatataataacataattccacattattacacatttaactagttagagtcttgctaatctgattctttaatgtgtgggcattacaattactagtgtgataatctcaccatctctctacaaattatttctcacaattttgtaagaactctctttttctctctctcttagatttctctcattaaaaggtattctctatattttttctcttaagagcatcactcttcactcttggaatagcttgtgatgattgtgatggaacaaatgaaagggatggagctctatttataggcctctttgaatgtatgaacaagacagaaaatgaatcttgcattaaatgcatagttgtatgtatgcatattcctcaagtaaaaaaattaccattgtaattgttacatggttgaaaaacacaactatattttcacatggttgaaaatcaaccattacccatcaggagactcctgcttgtattgttggtcttatgagtaaaggtgggaggatgaagaggaagttagttattaaatttgctatagtatcctcgttagtatttgtaatttttcaaagggtaattttagtattaggtgtgtatattttatctttttctctaatctttcctaaaatgaggtattaaaaatttaaaatttagtgggagaaagtctccttccacctctcctctcccgtcctttcttcctcttatcaaacaatggattatttctctcttttcaactctctctctccacccctctccattcacacatccctcgttaccaaacatagtgtaaataaagagagttaattacttttcgagaaaaaaaaataaagtggcattactaaatgaatgtttagtaacatttaattatattgatcacacgtcagaagtaaagtcctcatcaaaaaatatcaagattaaaaaatttaacaatatttagatgcttttaataatgatttacgaatttatgaagatatatttgaattctaagtgtgttatttatgttatgtataaaattttatatttttcatattttatgctcaataataatggaacgcgacgtttggccgatagagccacattttatcaaggtttagtattttagtaatagcgggctatttaaatagatattgggaatatcaagaatattggtggtcttagatttgacctaaatgccctttggtagtaagtaatgctttttggcttaggcaagagtaatgtagtcttttaccatatattctcttttgtcctctagtagataaatattaggcttgattaatctaattttatttgtatatgatacaagataataccatagataaagattaagtctattaaattagaaattagacaaaccaactttctcttttcaaccctctcttcctctcgacctctttggaaaaactaggaaggaaataggatttttcagctccatttttggtgttctagcaagatttggaatagataccttggaagatttggaatgatttagggtcgaattggattgcttagaagagttttggtggttcctatactgaatcggtcgactggttaagtatggacctgtaggaaccggtctcggttcgtccccaggcagaccccacagaactggttttccggttgggaaccggtctaccggttggggcattttagggcatcctagatttttccatttttacgatatttaggatattgccatgttatccatcgataaggaaatttttaattttaattttaagttcccaaaaagtaatttagtctttcactcattagtttacaaatattgtgacttaggggcccgtaaatcgttgagcagctgttccacccaaattgaccggtacacctgtactcaaaaacaaggtaagattagtataatgattacatatatatacacatgtttagtgtacatattagttgttatcagaataacatatcaggatatcattcaggtgtacatagagttgtacagacgtaccaataaatatatgttagacaaatcagtggccatcaaattagcatatcagggtatcagtgaagtgtacatagagttgcacagagatgtcatatgctagacctctaaatagtattaattaactgctaccacaacagtaccactagaatactgagtatagactggattcgtagttagtcatactttgtcaagaacattctacacctagttatcggatcatgattaggtgtaagggtgcttgattacagtctagatatatgtttatgattatgattatgattttcttactgagtctgttgactcatagttattgcttacatgtgtaggtaagggcgaagctaaggcggaacaacagtgagtgcaagtgaatgaagattgtatatgttagggtaattaggcctggagcgtattatttttgggacagcatgctatattttgaatggtcgctaggtgacaacttttttattgaatattttgtattacgattttgaatattttatgtatgggatcccagttatataaaagatatttattttaattttaagagtaattaaataaaagttttaattaatcacgatttttaataaacccattgattagcaatggattgcacaattaatataaaattgcgataacacgcctaaactagtagggtgttataatttggtatcaaagtcgccaggttttctttcgaagatcgtcatgacatgtacaatcatcatcagagataagctcgactcacgatttagtaagcttttattgctttactagcttattttattagtatgttataagaaaagtctgataggaagcatgttagtaacttgatagctgaataggcacatgttttaatttcttaagtaggcggtaaatagtaatttattcttgaccgcgatcagaccaggctaattcttgggtttgcgggctgttctatttaaatgaatgtcgggcaaaaagctaggataattcggtcgaatccaatggacccgaagccggacctcgactttggccccatccccacaccccgcatcctgaccctagccctggccccacctcagaaccgacttaaataaaatcaaaaaataaaattaaatttacataaaacacttttctgttgttaaaattgaaaaataaaagtggttatagaacatatttttgtttttaaaaaaaaaaattgaaaaaaaaaaatttctttcatttttgtgattataaaatttaaaaataaaattgttaccaaacgttactttaattaattaaattatttacttattttaagggtctacagattattttattataagattatattatgttatttggtatatatatgtgcgcgagactatgactattttgttttattgatttttcgttttgattacttttttttaatttagatttaattacattatagtagcatttatatcacacaacaataatatgggcctttagcttcccttttttcaacccattttataaaaagggaagctaaagggtgtgaaatacccgcctgattcgaaattgacatttagaggcagtttcttggtaaaaaccgtaggtatagatatttaatataccctttacagtcggttgggggttagaaaatttttaggattttttatataccctatggtgtcggttattaagaaataaccgacggcataggtgcacatgtgtcaataaagtgtgcacctatgccgtcggtt

SEQ ID NO: 161354 - DNA, 4878 bp, Cannabis sativa
ataccatatttataaaaactttccattttttcccataattttataaatgtcccaaataaatattcttttgtgtaagtctaatcgaagaatgatttttcctaaatttttttatttcatactaaaattatgaaccattatttattattttttttttttttataatgaaccatttaaacttaaaagtgtattatcacttaaaatagcatgtatctttttctatcttttttttttaatataataaccaatttattgctgagagacacagcaggaggaatttcttccaatcaagaaaactcgttttctatctgtagtgcatatcaaactcatgtgttgcggtattaccatttcgcattacatgtagaagatatacaccaggaaaaacaaataataaggacctaataaaactaaaaaacaacccaaatcagagacactcttagaaaaaaaaatgaacggaaacgacaacaactacaacaacaacactctctacaaaggaaacgaaaaatcctagcaaggagtcactcttggcaggaggaaaatcttagcagcataaatggaagaattgtgtacttgttgtgagaatggacttccttaaaaagagataatgtttgaatctacaaataaataaaaaatacattagtaagaaaataaataaaaattataacaaataaataaacattattacaaagttcataataaatttttactacaattaaagataaatagcatcaattttcattttaagtagaaaatgagaacagttatcttgtgaaatgcaagataaggaaatagcatgtattttgaaaatatatattttttcaatatattggtaaggaaggaatgaatgagaaaaggaccaattctcctcaccgtatttagccactgaagtcagagagggatataagaaagcgtttactatagtggccacttcaccactattctcactcatcactacataataataaatttataaagaagacaatataacagcgtcttctaacggcgctagcattaaaccagaaaaataaaaaaaacaaaaaaatcagttaacgtgatcaagaattcttcagtgtcacacggctttacaagttctcatcatcacgtctatcgttctcaaacaatcttcctctttttctcgacaggtattttatttgtgaaggggttttgcttcatctcaaagatttcttctttctctctttcttttcctttttcccaggtaaattgctaggcagttttcttgattgcttatcaaacttttgataggttcagtatgggcgattgtaccaacagtgacgatgattctgtttaccacgattacgattctggagatgatgaagatcaatatgttgagcttcagcgtcttgaatacgatacttttatatcaaaagaccccgttattacggtacgactagtattgatttatagggttttctttgtatttctgtttttcgttttgtctattgttcgatcacacattgagttaggctcttttttgtgaaactccatggctgttatttgaaaggttgttccttttttcatcacactaagcactcccaagactgtctttatttcattctttaaaatacattactaaaacaacattttctttattttttatgttacaccagtttctctattttattttttacttcatttaaatattatattttaacatatttttaatattaaacaattagaagaaataataaaaaaataaaaataaacaaacaaacatccaattgaagagagaaattgaaaaaataataatattaaaatgatttaaagaagctcttaggaatagagctgatgtataatagctcacaatataaagcatctgttggagtaggattttgggaccaattcttcatatttttaaattttctttattttaaagaagcagctgtgactgctagaaatgtgtttgtctagtgtttataatggtgattcagattgtaaaaacttttattttattttatattcgaaaaaaaaactgtaaaatcttttgaagtgatatgaaacattaagttggatgcctacaactaaccttaagttttacaaaagagtgtggccacattctacacctactctttttctgtctttgcaattaaggaaatttgttttatttctcttttgcaggtcattacaaaagagtctctattagctgctcaggtaattccagcactttgattatctttatgttatgtacttgttgctgtgcactagacttttgtgataaactttggtattgaattgtgtagagggaggatttgagcaatgtgatggaagtcctatcattgaaagagcaccacgcacgaaccttactcattcactactgctgggatgttgacaagctgctcgcaattcttgtggagaaagggaaagatgagttataccgtaaagcaggtgtgacctcagtggagcatgacaaccctgcctcatcaaagctctcatcaatggttagttgcaatgtttgcattgaagaagttcctgcagataatgtgacaaccatggattgtggacactatttttgcaacgattgtgagtactacttaatctgtttcctatgtagtctgattttctttttctattcttcagagtaagaacaatctgcaactttaatatatgcatgatttttttttcattggagcgactttaccaaataatgatatgctgaaattcttagggaaaatattttctgttgtatttgatagcatacggggttgattggctgtgtctatattgacttttataactttctttcaagtatgatgattttttttcccttggggtggtggtgatttgctctgctcaggttggacagagcattttattgtaaagataaatgagggacagagcaggcgtattacatgtatggaataccagtgtgatgctatttgcgatgaagagaaagttagaactttagtcaatgcaagagatcctaacctggctgagaaatttgaccgctttcttctggaatcatatattgaggacaatagaaaggttaagtggtgtccaagtgttccccattgtggaaatgccattcgtattgaagatgatgtagtgtgtgaggttcaatgtacatgtggtgtgcagttttgttttaattgcttatctgaaacacactcaccttgtccgtgtttcatgtgggcattatgggttaagaagtgccaggatgattcagaaacacttaactatatttcatttcatacaaagcactgcccaaaatgtcacaagttggttgaaaagaatggaggatgcaacttagtaaactgcatctgtggacaaccattttggtgagtattatcatctttcatatttcgtacacattcgatctactaatatagttactagggagttaaaacttgaaatacatgagaaccgcatacaaattgtaatattgtaatatatttcaacatgttccccttaagactgtcaaataaaattgtccttgatttgtagtgtgaatagtgttttccatttgttatctgttttccttttttttttatatttctttctcttctgcaagcttggtttgcgctttgatgtgagatgttttatcgaactttttaataaaatacaatatggagttggcaccaattatttatgttcaagattttgttccataaggacttagttttaactaaatgcattgttttttttccctttatttgattgtttgtttgtttgttttttgtgagaacatataacaatttatgttaaactgacttgtattactcataccgtcaaatgaactttaaattgaatagctgaagcatacgtgtatattttaattggatgccatatattgattctcttatagcttgattagtttaaatggggtagtatcctcttatacaacttaggtttcatatggatttgtcgtgtagtgtattaatgattccttcatatgtttttggcacactgatgtattcttatttatttacctgttttatgcctatctcgcagttggctttgtggtgaagcaactggcaggacccatacgtatgcatttatagaaggccatagttgtggacgatttaaagaagaaactaaagagaaaaatgagcgtgcaaagaaagatctatttcgtcacattcactaccacaatcgttacaaagctcacatggattctttaaaacttgaaatgaagctacagacaagcttagaagggaagatattagctttggaagaaagagactcgacaaatagagaatttgattggttaactaaaggtctctttaggctctccaggtcaaggaagattctcgcctattcatatgcatttgcattttacatgttcggtgaagaaaatttcaacaggaatctgtctgcagaggagaaactgataaagctgaacttgtttgagaatcagcagcagcagcttgaggcaaatgttgaagttctttcttcatttctagaggagccttttgatacgtacccgtcacataaacttatgctagtgaaaattaaaatcctcgatttatcaagaactgttgataatatctgcaaaaaattgtaagttcaccttagataccctgaagtgcatcctttctctgttagattttgactctttttctcttcttttatgataaagtggcattacaagcatgcctaaatgaactaacttgacatcagttgctgggaaatttatgctgatggattttccaacccttttcttctttttcaagaaatgactaatttacagtgaatactaaactcttttagttgcatcatttaaaataagtagattattgaataccctcatgatttagtttttcattaatttcatttattttatgtagaccatgtgatctttctcttttcatatatatatatataaatattttatgccgattacttcatgtgatttatactactgct

SEQ ID NO: 161355 - DNA, 3342 bp, Cannabis sativa
gagagagagagagagaggtgttaaaatgggcatattaaggtatagcttggtataagttattttgccgggggtgttattagttgttggttaatgttttgaaacaatagaaatttcctctatctatctaagcattacactattttttttaacaaagattacaataatctctctctaccgtacctggaaaaaggaacgtgataaaaattaatggtacttgtgaaatgaaaattagcccttaaaaaaattcttgacctcaagtaatattaaataacaaaagatatacataggggaaagaaaaagaaaaaatgaacgcaaagacatacttaaccacacccatagtttacatctggtttggtagcagctgaagaaaatgggacttcaactctctctttcacaaggcatcgtgcctccccattttccactactaggattctccccgggggacaatcagcgtttgatcgtttttcttcactcactggttgatggaaagagcttgaaatcttcaaagaagtgtctctataaaaaaatttaggcccaaaaccagagagactcaacacagataccacacctacaatagtgaaaacagttttggctgctgcacccagaaagaacccaagccctcttgaactcttattctgctctgaatcactcgtgtttttctttcctccattttctggttcaacagacactaccccattttgaacaaacttttgcatggacgagaattggggcaaatagctgtttcctctgcgcagagagtgtggagcacgagttggataaggaggaagcaaaagatcattgttctgatccacagtttcaccagcaaaagcagaagcctcatttataacttccaactcgtcacccttgtattccttcaacttatcaagtaacgccttacggctctgctcaatctcagtaagggcaacttccctttcataccgttgctgctgttgcaaagcctggtgataaaacaaacacttcttaagttgaaaagctgaagtccagcatgttcgattttataaatatagatataaaacaggttcaatatgagctagaccaagttcaggactagaacactgttatccctgaaaaaatccaaaaactcaacaagtacttgttacaatgaatatgtattggcaccaaatgagtaagataaaactttcaaaacatgtattcagagtgaagaatgatgttttactgatcccattccttattcccaagctgaacgaagtcaaaaaaatggtagatactttatttagagatccagaaagagttctttttttattataatactattaaggcatcataaagcagtaaaagaaagaaagtgtgatgaacacaacaattctgcggaagaccttcaatgaaatccatagaaatatcctcccatacttggtcaagaatgggtagaggttggagcaaccccgccggagattgagccagatatttattttgttggcaaacagaacactcagccacaaacttctgacctcacagcagaccttgagtggttgttggaacctgaagcattgcttgccatccgacctagtactcataaaaccagccctcaagctctaatcaagtggaagcatctccctgaattcgaagctacttgggaagattttgctgtcatccaagctcaatttccacacttccaccttgaggacaaggtgaaacttcaggtcggcggtattgataagcctcccattacttttgtctatgctagaaaaaggactaggggacctaagggtggtgctgccacaggggataacttggctgtgtaattgtggttgtgggttagtgtgtggctgtggggtgagtcacaggggattatagctgtatgtgatataaataatgtaagtggtggattttaaggggtattgagtgatttctttagcaactgtaaggagagaccaggctctagaagacctgggattttaatagcaaaccattgttcttctcattcttcttcttaattttatttctgaaattaattgataggagattcctatcactccattctgtgattgcatttctagtgcttggtttgggcatgtatccaagcatctgtcgcccggaatgggagggtgattagacaatcaccaatgactgtatcatcgaataagtgtgtgtgcttaactaattcaattagatataaaatgaggattttcattgagttcgagaaaactattatttagcttacaacttcattattcattattgtttccaggtacaccaagtcatttttgcttagtctagaaaaaaatgtttgtaatgtttattctatgtgatattaccatgtaaaaggcatgtgtttataatccagatatggacatattcaatattattttactgttgctttttttaattaaaaaaaaattgagtaatcatggaaagtattagtaaagaaagcataatgaccaaacatatttacgaaaaccctgagaaacggcatcacacacacacacacacaatactaaagccgaaataacttgccatatgtacacacacttcgtaattggagcttatcgaagaaaaccctaataagaaaaggagtttcaataagcaaacctgtaaggacgagagctgggtctcaagggattcaagggcatcgcaaatactcaaaagcctctgcgcttcttcttcttctccttcttcctcttcttcttctccaagccctccgccatggactccattctctttctccagtaataggtcatcttgaaatttgcgaggagaggttgccttgtggatgcagttcccgatctttagccgtagctcagtggccctagccagtaccaaccctatgccctcttcctccatccctctctgtctctctctctatctacttcttggagcgagaaatgtgacaaaaatgactgcaaggaaaggaaaggaaagggagaagtttgcccctaaccgccaaaaggagctgctcactgcttctgactttacaccgatttgttgctttttgagtaaaatctttttatatcataataaaatttctatgactctggtgctctcttctttctcaaaaacgccattattattgtttttccatcaaattttacattttctttcatttttaaaaatgggaaaaagtagatgtgtgggtcttcgtgggtattgttgtggttcacatacaaactaaatacttatttgttttattcagaaaaataaataaataattattttttaatttaataatgggatatttgaggctaaccgtttatcatttctaatgggaaatttgaatttttatgcatgcattagggaataattttttccctaaactaatacttttttacattgaaaatgtatgactactttttcaaaacccca

SEQ ID NO: 161356 - DNA, 3540 bp, Cannabis sativa
aaaaaatcaaataatttataatatggaaattaaaatttaaatattttgttacatgcatacttattttttcttatacacgtgataaataaatatttttttcattataaattatttaaaattttataaatatttacaattgaactaaaaacttcttcaaactacaaatttcaataaataacaaaattctcataatatttattaaatgaaaatgcacacgacacacaatactcaaatgagaaatacaaagtaccaacacaacacttgtctaagttttacttaatcatgacttttcatggtgaccggcaaaaatgtccaaataccataaaaaatgtcaaaaaccatttgattcccatcaacatggccggctttgcatttgtcaccattcattcattcattcatgttcttttctattcttttatgtcccctcaacccttcattcctcttcctaatccctttcctttccaacaatggaaatcaccattccattcccattcctttacatatttttactactaccaactctcatcttggctctctcacaatcatcatcaccaatatgcatttccaattccggacatgtaaaccccacaacccctttactcaactttcttcaaaccctccaagaaacagctttcctcactttcaaaaaccccaaatttgacccaaagctctatgtggatttatccctaaagtacaatttgtcttattcccaaaagggttttgataagcttgtgaaatactcaaatgggtcagtttctgttaaggatttgagtgagtatatagagagttattttgagggtgcaggggaggatttggtgggtagtaaaccagaggattttgtgtctgagccaaaggggtttcttccaaaggtgaagaatggagaagttaggagttgggcattgaaaattcattccctttggaagaatttgagtagagaagtttctgatgaggtgaggaaacagcctcagttgcatactttgattcctcttcctaaacctgtaatcattcctgggtcaaggtttagagaggtctattattgggattcttattgggtaatcaggttagtttcattcttttttatttcatgaaaattcacactttgatataaatgacactaaaaattgtgacttttcttggattggtgtgtaaaaaagtttactttcttctttgttaagttagttaattattaggattcttattagttattttggaaaagttcacactttcatatttctttttaacaaataacactaaaaatagtgactttctatttctagtatttgtgtgtaaaaagattacttttttttttctttatggagtaaatattatgaaagcatggctcttttacatttgtttgaagcacttaaacaagctcataatagattaaaaatgggatcttttttaactatttatgtagaatagatcctactcttaatataggtttcactgtttcatgaaaaagaaaaaaaattattgctttaggactctttctctctacaacatctcataagtgtttaacattaatcatttttttttttcaaaattggatatgaggaatcaatttataatttggaataagaagaattatatataattaaacaatttattgttatacacaggggattagtagcaagtaaaatgtatgatacagcaaaagcaattgtgaataatctcatttcacttcttcaacaatatggtcatgttcttaatggtgccagaacatattacattaatagaaggtatatatatatacactaaaataatcctttatttttatgagtaatacatatttttttcttttggggtctgaaaaagtttgaatttttgttcaatgtagtcagcctcctctccttagtgcaatggttactgaaatatacaagaggactggagatttagaatttgctaaaaactctctccctgcactaatcaaagaacataagttctggacttcaggtactatatatatatataatataataaataaatatgtattttatacctgaaaagatcatgtaccaaactattactgatgctaaatattccctctgaactattataatataggactttcgttaaatagttagtaattttatcctttacaacaacatattttgtctcctgaatcttcactaccctttttattaaaacaaatagatttggcagtggtaaaagttcgggaagcaaaatatgattgaaaaggactttttaacgtagctaatcttttggagggcacaatcttattagtgacaaagttcaggatcgaaataccaatttattctaatatatacataatatatgtgtatgcattgatagcctactttgctttcttacttcagtttcagttgggtattaagtcctatgttttgttgttttaggaatacataaagtgatcattaaggatggtgatcaagctcataatcatactttaactcgatattatgcaatgtggaataagcccaggcctgaatcttccacccttgtaagtcatttcatttcacattactatttttagctgataatcataacaatttagttatcaattatattttgcttcttaattaggacaaagaacttgcttcaaatatctcatctcttactaagaaacaaaagttttaccgcgaggtcgcatcaactgctgagtctggatgggattttagtacgagatggatgaggtgaaaactaatcttaattatgtgattgtttatagaatgagttgacaagattcctatacaggcaccatgtcgattttacaacattggctacaacatcaatcttaccagttgatttaaatgcattcatactcggggtattatttcttatcttcgaggaagaatcctcgaagatcacttttcttttttttttttttccttttttcgattagcatgtgacaaagatgtgttttacttttcgatttagatggaactcgatatttccttcttggcaaatgttacaggagattacacaatctctaagcgattctcgaaagcttctcgagttagaaagaaggcaatagaatctgtgttttggaacgaaaagacagggcaatggcatgattactggctcagcaataatagcaattgcatggtattattttacttcaatctatcatggggttaaggcttggtaactttcggttttacttaaatttctcttttgacacttagataaatgaaacatgggaagctaggaaccagaatcagaaagtgtttgcttcaaatttcattcctttatggattgaatcatttcactcaggtttgttcctcatctgacttatgttatttgagctgatttttcaaactcaaagttgtggtagaagagtgtgaacataagaaaaaattatcgggataagttgagaactaccttatttattatatattaattaaatataactttaaaataattttaaatgataaatataacctcacatagctaattaaaattagagtctctaatgcacatattagagatacagaccttacctataacattgagtttgagtatatattaaagagtaataaaaaaaagataaaaattaaaata

SEQ ID NO: 161357 - DNA, 3719 bp, Cannabis sativa
ctctctctctctctctctttataatcgatccaaccccaccatgcacagcctcctccgatcgtctcgacatcgcctccttcgatcatctcgtgctaagttcttctccatttctttatctcgtctcgacaccgactctaccacccacacgccgacgagccaaataggccatgaatggcctcttcccctctctttcgtctcgacaccatgccaattaccatgtaagttttctctgctctctctttctttcaatctcgtgggcgaacaccttctttgtacaaatttttgagttggggacgaagacgaagaggacgaccattatctatttttgggtttagattttatgatgatggctattgtctttcgtatttggatctgttttaaattttctttgcatgtttatttgtgtagatctctatatttgtatatttctattttagatctgtaaaattaaaatgaacataaaatttgggtatttgctttagattttggtgtgatctcgggatgaatatctaaatcttttttttttgttgtgtcggtacaaaactgacgggaatgttgtaaaaaaatttctttacactattagcgattgttttcaagtgtcgctaatttttggtaccgactgttgaatactcacgcaaaataatgtagtttttgcgtctacagtatatacgtcagttttaacaaccaacgctaaaagaatatatgtcagttgtaaaccgacgaaaaataccatatttgtagtagtggaaagatgggagggtgaggacccattcgagtgcgtgggcaaggttcaaggatctcaaattctattaatctcggtgcttaaggcaagagatttgttatgggatggaggtgtcagtttcttatctagtgttatggatattacaaaagaaatactaatgtgatcggaacacgttccggtggtttgagaatttctgtgagtctttccagagaagctaccagggttaccaccaaaatgggagattggctttgagttagatttgattccaggggcagagtttgtgtttaaagctccgtatcagatggcacctgcagagctgaaaaagtgaagattcggttacagggaatgtaaacttgaaatttactagatcgagtacctcaccttggggtgcaccaattttgacagtaaagaacaagtatcctttgccaaggatagatgatatgtttgatcaattacagggaaataccatcttctctaagatcgatctttgatcttgttattaccaaatgaggattcgagagaggatattcccaagataggttttcgtaccgatatggacactagtttcttgtaatgttcttcaaattgacaaattgccccaacgacattcatgggttaatgaactgagtatttaagaaatttttagatgaggttgtaattgtctccattgatgatatttgaatcttttctgattcagaagaggcatatgagagacatctatggatggtgtttcaatatctcttggagcataaatttatgctaaatgcaagaaacacgagttgtgactggtttcatagggcatggggtgaagaaagataggatcttagtagatttagtaaagaaaaaagtagtccagaattggccttaacccaggtctgcaaccgaggttagaagtttcctaggattagcaggatactacaggaagtttgtttaaggatttgccaagatctctacatccttaatagaattaactcgaaagaattgtaagtttatttggactggaaactgggaaaatagtttttttaggcaattgaaggattatgaacaatggtatcttacacataatatggaattggcagtgacgatggttggaactggataaagaatattactaagagttcctttaccattctggtaaagtaaatgcggtagtaaatgctctaggttggaagggtccgagtcaagactatgaattgaattttgtcctttttggcattatgttaagctaaaagggattagtataagaattagattatatacttaagtatagaaaatctaaaaacttaagaattgcacaacatcacctttctttcttcttctcttccttcgaatcctaagatctagcagcacaagaagatttcttaatcaaattcgttcactttctgttggtttagcaagggttagaggctgtccaaactttgaggtaagctttctccatgtttgtttaaggatttttcaagatttaaattaggttatagggtaggtttgtctgacttcgggctagggtataaattgaagttagaacatgtttttaggttagaattaaagtttttttaagcattaattaattagaaataggagttggttgacttaaatttgtaaaatgagggttagtaagctaaacttctactcaaccatggttttttgtttaaattgatatagttgttattatgagttgctatgatttctttattatgtgtaatatatgtatttgtgtttacttacttttcttgatgagtctttgtgactcacaggtgctttgtggtgcaggtaagatggaaagaatctgtgttcaaccatgagtcagaggtctcccagcgatgtacatatcaaccgcggagttttgacttccagtggacaggatccttccattaattatgtattaaattgtaatcctattttcgtaataccgattttgagacaaaaatgtaaaagtttgcaaataggtgatcccaaatccattagtattttgaatgaaaatttatgttttagtttaatctaaaatttttaactaaaccacacttttcttaacctgattagattaattataaaatttattcgtaaaagcacacacacgtggcgttcctgtgagacagggcgttacaagatacatcactttggtcctagttttatttcacttgtctcctatctctaatattagtgagaattcctaatatatctacttgagttatgctttatgccttttttgttgtgttgatgttattcataatctagagatgtcactgtgaatgttaatttctcattttcttctagttttgaatttgcgatctcctctctatacttaattgttgtatcaaccactgcgaagttgtatttatagtgtcttagttgttaagttgtgactcgctctaagtatttgttctcttcattgtctctcatccatattttatccaaatctttaggtgtgcctaatcgtcatttgtctgccttctttataatttttttgttgaacaatactcattttattccattatttcttccttaaagtatatgactttgagtttgaagtttaccaccttcatcggcaatctacaatttttggaaactttgcttatttctttatgtcggacatttcttcataatgctctatttcgagctattttgaaagatctctttttattctttgactgtattttacatgttacactcctttctatattatgacattgtcctccctagactagtctttatgaccaatttatctcaaaagtatttacataccataatcttacttttaccatctaacttaggacagtccaacctgacagtatgcaacacgatagtatttgttccctagagatatattttttcatccttcattagtgcatgagttacatagaatactttgcgtaatggccgctttagtaatttggattagtaaagacaattagcactaatttctgacatttttataattatttatgaaattaattatttgtggaccccattattagaa

SEQ ID NO: 161358 - DNA, 5236 bp, Cannabis sativa
  modified_base (4262)..(4266): a, c, t, g, unknown or other
ctcaggcttgggggcgggggcgggggccgctgcgggctgatgagaagggaagaatgaggacatgttgggcgctgtcacgtacggtaacactgctggagaggctgagattgcaggcacaccactgcttgttgaacatgttgcattgccaaggaatatggctatggttatggctattaaggctaatgaaaacttgtatgatgataaaatggccatttgagagaatgaaagatagaaatagagagagttttgagttgagttgagatgagagaatgagagaatgagaggataaaaggggttatgtatagtgtggttgtgtgagtgtttatagtgttgtttagttcactcggtgggtatcacgggatagcagtgctagtgttaattttttagtgtcttctttatggttttttgtgacatatttgagagtaggacaaacaggtctctctctctctctcccctagattatctgcattcataagaaaaataaggtaaaaaaaaagaaaagggtattatatatatagatatataatgctaaaggggtctagatttttggagtgagtgtgagacacttgtttgatccgatctctctacccccatgtgagttatgacccatgttggctgttatagtttcatttggtggtggcacgtgtgatgtgagagtagagtaccatctcttgcctcaaaatcttctatattgttttatgggtatgctctaacttcttgtgctacaaataaaccatgatcacctacctaattagatatcgaaagggtcaaaatatttgagttaatattaaataatctactcctcaaagatggattgaactatgaaatgtggccaaaatatgatttttctagtgttatgatctttaccttgtcttaaaaattttgttatttggtggatttgatttcacatgaatgtttatggctactgttatactaatcatacatttacaatacataatatttttcttaataccctactccacaaagattgattaaaggtaatggaaattaagtacggaaaataatgaactagaaaaagtggggaaggattctctcttattttgaaataaagtgttaaactttgcaagaaactaacatgacttatttcttttttcttttcatcttttgtcttaatgtgccttatcatattgcatacatcaagaaaggttatgttccctaaacccctctgatttttttttcccagaaaataacaaatgaatattccaaataaaaagaaaacatatcaagtacataaaaatttcaggtgaagattcagattgattcctttatgaaaaaaaaaagtccaagctattgaaactgtgaattaagagtaataaaatataagagtcacatggaggcccagttatttccactagcacagattgaagcactgaaatcataataatctaatttaatgtaacaatgcccaaatctatacaatgaataacacaccctttaaagcatgagaatttgcttttaaagggaaaaaaacaagaagtaaatgactgccataagctcataaaagttttcccattttaaataataataataacaacttattttctttctattacagctatagttactccatgaaattgctacaaatcaaaagaatcaccccatataaaaataatcccaactcccacaacaatttgggagctagttaatttagaaacaacaagtattgcaaagatggtaacaaaagaagtgcaaaatgtagtgcaacttcatccaacatcatgagttgcagcatacatgtttagttcagaaaccaaaccgatgccattgctgggctttggtcgatgaatccattgcggaaaattttcaggctatatgctctgactagagcagtctaaggtgtgcggtatcgttcaacttttttatctgccaaccagttttccatgaatgctgcaacatcgttactgaagaatcgtctatgcacatcttattggacattagcgggctgcagccaaggatgccagtgaggagacacttaattggtactgaatggctaaaaataccaatacaagttggggcataagaggagctcctgccgcttatatcatgtagggagtttcgatgattggactcttgaggggaaatttcttcttcaacctcatgatctccagttgtggtcataaactgtagcctactttttccggactttttccttagtagcccagttccctggcgctgctgcctctgaagcgcatcccagggaggtgctgcgagtgaagacccttctcggtcatggattgaattcgataaagagtgaggattatggagtggaaaaccttggttctccatcggatggagtgacgagaaatctgatcttaacttttcaggcagccccaacacagtcccatttagaaaactaaccattcgaaactccacttgcctaagcgattcccctgagggtggacaaaaatcaggctgaacattgtcaataaagctcaacatttcagcagagtatatctctgaccgaaggcatccctcccaatgcccctgactcatctccacaagagcatcagaagtttgaatctgttcctctgcaaagttcatttcctgcagaattttttagttgtacacaaattttcaactttcaacagacagccaatttaaacatactataatttcccgaattctacactaagacagaattaaattttggttgaatcttcttcacaatcgttgtctcaaaaaaaatcaatattatgagattaaaggcatgattattagaatcaatgatatcatgatcagaatcagatatgaagaattatgtaagtagctcaaatggtctcccccccataatagcacttgctataatattctgattctcaaatatatatataaataattgggttaaatgggatcctattttccaaaaatgtaaacaatggatacttccaactttgtctcgatcgaatccgactgcattaatgtgatcaacaccatcaagaagaattctattgacaactcccaccttggttggattgctagagattattggtttatgtaatctttttagtgatttttcttttttttattgtcctaggctaggtaagagcgttgcacattcattagctaagttaacactttccactttccaatgaatatcatatatttggtgagctggctaccctcattgttgaagtatagaaaaatcaactacaatgtattgcctattctaaccaacaatttgagcttaatctgggaccaactataacattaggattaaggttattctataattcaatatcacatcacatcaaactaccaaaaatgggaaagaatccacattcttacattccaattcaagctctaatcattcatttcacagacccaacaacaaagaacattttttttttcaactatataattattcaaaaagctgatttaaatgtcagaaaacaaacaaagttgaataacaaataatagtaataataatacctgacaagctgagacagccatggatcgagcccgatccaacggcgatgagtaaaccgcattgaaccgaatcccttgtgaattcaagaacaccgccaaagcccttgcttgacgcttcccattggtggtgagtgcagcctcagggcaccgtcccccaaccaaatcaggcctcagactcaactgacactcgccgtgactaatcaaaaacacttcgaacatcacccgatcctcctccatggcattagacgaaaaacttcgcgagaagacgggaggaggcggaagcggtgggggcggagcgagcacattgtaagggtcccaaaccttgatggaaggtccgagacgaggcgtacctaatgaagatagctgaggagagagaggcgatgccgatgcataacaaggtaacatctccggttcttgttgaagaaccttcttcaccaaatgattatccatttcgttcctccttctcctgtcgagctcgccattgtggtcttcttcttcttctgcttcttctactccttcgtcgtcgtcttcttcttcgtcgtcgtcttcttcttcgccatcttcttgttgttgttgttcgtgttcttcttcttcgtcactattttctggaacttgtatggattgagaggaacccatttgaagatgaggtgaaatccccaattgaaatcaatcaaaatcaaaatctagaggaattgagattgagaagggaattggaatttgaatctgccattgttagagcataattgaatctgaattgagaagatctattcagttgtgtgggagagaagagtgagtttattattattattattatnnnnnttattattattattagggtaattactataaatactattttttttaatttttttttttaaatttagggttgagtttctaaagtagtttcttatgtgtgtttttacatgctgttatataattttttgcattaggagttttactgtaaaattctgtaaaaatatatatataaaaaaaaattattttaaagtgtaaaaataaaaaaattctattattattattaacttgaaaattagctcaaagtcataaaaggtatgtttttatgagatttactgtgttccaaagaaattgtgtgaagagaatgaatgtgaaaatgtgatatagacatataaaatttaggtttatggattgattttgttgtttttcttaattactaagtggatctaatagttgtaaattattacaaaactaaagtacatcaaaataagtttatagtatatttttttataaagtaatgtcaaaatttataatagctaagttggtttttgtctattttgagttcatgtgttgtgggtagaggctgatatgtgtcatggtggctagttatgcaagaaaataacattgaccaattattttatatttgaacgttgaactcttcctttgattttgagtttgtcataaacaaaagggaacggactagaaaactactctggcttgcctcaaatcaaaacactttaattctagggattgttacacaaatacacaaaaataatattcttataattattttataattattttacgaaattttaaatattcttataattatttttatttacacaaaatatagtttttttatattgtatttttattaatttattgctgattttttgttattcatatgttattttgatattatatttatatagttttctttattatgaaatattagtattatgtaatattataatttagagaaagaaaatagagaagagatgagaattttctgagtgttttattccaataggtgatc

SEQ ID NO: 161359 - DNA, 6603 bp, Cannabis sativa
aaaaaaaaaaaaaaaaaagcacgaagatggtgaaacagtacacctattttttgacagacaccctaaaaattctcaaaaattaattacaaaataaactaattaaattgcttttattagtaaaaatgttaaacccatttcccaagtaggtcgataaaagaacgcactagacaaacccaaatttgggtcttaaaatagtcacttgtatgaaattgttcacctacttggaggaagctttgatcaaagagccacgaaccaactgtgtgagtgagccataagcttcaaaaaaaaaattatcacatttccgaacagagacaaaactatatttgaactgaaaaaaaaaaaaaaaaactaccaaattaaattttcttgtgtgaatcaaaatgcatggacaactcactagtacagcctgcacaccattacataccactttaatgtacaaaagaaattaaatacaatatggcaaataggatggaggaaccaatttaggagacaagggagggcaaacatttccctgaaacaatagctgtttgactatcgtctattgcacaggatggaactcaaaaatttcaattcaaaaatgccaaaaaagcggaccgggaccgtctgacatttctagcagctgcatgttattgttggcacaaacaagcccattgcagactagaaaccttctgttctcaccaataataaaatttacgatgaaaccgaaggctggggggtgactaagtccaaatcatcttgagcaatagcttaatcacttgaaatagtcaggttgtaggatcgtgaagaaattcggagatgtcccgtcttcatctttctgcttccattctccattcccttgaatgcaccatgatacttttggagataatggtgtgtacaagtctgcaggtttacatcattcacaaaaatgttcacaatttcgaagtggaaagtagatgaacatcacacacatttaagggttgtactagagctacatacttctttctcaaagagattacaaagtacaaacaccattttctaattctaatcacatatttaacgaaagcttgttatatgattttagcatcatgcaactcccaaagttttctactctaaaatgcttctcccattacagcaaaggccgtagctttgccatggaataaaactatatgaactattataccaatgcgcaattaacaagatataactctgttgcaaatagattctacttactacctatttgtattgccctatgtaaattgaaacttctctatttaaagcagataaaggcaggttcctagggaatgtcatgataataaatttaaaataagaattccattatataataaagaagtcacttgtcagctgggcacaaaatttacctacatatgtacatcatgctaaattaatttctaaaccgaaacaacacgtgaaataagaacaggcaacaaaatttcaatttaaagaagagaatctgctttaaagcattccattcttctccatgaaaaagacaacagataactaaatattgaagaactgccattatgaagtcaatgtctacctttattaacctttcaatttaaatttattacccttctaaatttaatgttatgaattctgaattcatttctgtaattcattaacgttttaatttcaagctagaatctaccattcaaaaagaaaaaaaataaaatctagagcataaggcgagggggtttaaagtgttttttttttccttggaaattgcttcttcctgccatatgaactgtcgtttaaatggacggccacatgaaaataaaaaggaataattgttgcataagtacccaaaattttgtgtttgtaacaggcataatcccaataatttttcttttagcagcatacttacccaatgttagtacaactttaatttttatccagcttcgtcaatacaaatttcatttggaatttattaaaagaagagttagaagtaacccatactacattttttcatccagacccaaatgatttagaatatggatcttacatgtgtgtcctgtttaaggcattcacgaagtctactgacaaaactggacgaaaattgcacttttattaacattggatacttaaatcgctaaaaaaaattattgagtttataccgcttacaaactcaattctttggatatttatgccgctatttacctaaataaaaataacaatatttattttttatttttgggacaaacaaaagatgaacttttgacatctttgttcctagttttaaggttgttccactgatttagctaattaataataaaagcatggctacagaaccttaaatctgccaatgttagctagttcccactctttcattttgtttttttgttctcctcatgcttagggaagctcacactccatcattttaattttgtatcttctacatgtatacttttaaattagttttgttcaggacccatctgaatattgatttttccttctagaaaaaatggtaaaattcataagaatactactctagacagttcaattttgtctaagttatttttcaacaatgattgcattatcaattaaacaagcatattatgagacctaggtaagcaaatgcaatagagatacacaagagttgaggttccttttacaaacatgttatttgaatcccaattatgccaatgctatgaaaagtagtaatgaatcgtaagcatactaacaaacctgcaatggctggtggatctggatctcttgtactgtgcaaaatagaagtcccagataatacagtgatgagcccacaaagttctgatgctatgctgcttgcactttgaccagaatagtcctaaaaatatttaaaaacaaattcctaatcattatagtcccagataataagaaattgtccctacccacacacagggcacatcatttctcatcaccatgtgtgagagaggataccttaaacatgatcgcactggccaatattgtagaagatgtgaacatagcataatagataggagaaacaattgctgtattgaaagtatccaatgcctgcaaatgcccaaggagtcagatgcttggagaaagtttagctggttcggaacaatggatgatttcacagaacatttgaaccagcaactaaatgtcaactttcaacccttaacagaaatagttgcattcacatacagatttgctagcaaagtaaaacaagaaaagtgaaacaagggagaaacgtataggtgagatattttgataccagctatgattgaaacctctttcatacacatagcacaagggaataggaatttgaaggaattgtggatggcaaacttgccaaaaagtgttttgtattcacgaaattaaatagtgtccagtactgattatttttttgtatacaagaaggaaaagccacgccttcgtttcaattttaactaattatatttcaattgataaccaaagaaaaaagatataaaatataataagtgacaagaggacttcctatgcaatcacagtaagagagaaagcaaattacactgttgtattatctttcttgcaagaccaggattcattatcctaagatgagaaaaacccaaaaagaaacaaaagagctagacaaaatcacaactaacttagcttagcttctttaagctctttattaacttctaggattaaaaaaatgcttctcagagtgttaagataaaaaataatctttttatttttaattcagaagtcctatagggagaagctaagaccctgtttggcttagctttcataagcactattttggtttttagatttttttttttttgacgtattagcttttagaattaaaaaagtccttctagggatgtttggataaaaaatgaaaattctctttttaatttaaaagtccttttggaagaagcttgaatttgtagcttctcccaaaaggacttttgagatgctattttcaaaattagaataatttatataattcataatttactcacaagagatctcttttaaatgatatccaaaaactttgaaaagtatttttcactaaaaaaatcttcatacaatagttatccaaactgtaaaaataagtcaaaacatataattatcttatacttctacctataagtaaaagtagaagcttagccaaacaggactgtaacttctcttaaaaagacttttgagaagttatttttaaaattagaataatttacttacttccatatttacacagaggatctttttttaatgaagcgcaaacactttgaaaagaattttaaataaaaaaaatatatttatataatcattatctaaacaattaaaaaaaagtcgaaatttttgcttcttatacttttagctataagcaaaaataaaattttagtcaaacgagatatgaagaaaagttaggctatcaacctcaatcacatcttccaaatcagaagaaggccttaaagtaaggccgcatcaaacatattctaaatttgtaaatctcttagttgtttaaactagcataaactataccgcctaaaacatacttattggcagaaatgcatcataatgcagacaatatttctcctcacttttcacccacaacactttctttcacatttactttctccaacatcattttcactctcatcacactctcttatatcgttctatttcctcagtttctcttctaactttctatcacatcagttctctctaactttctcttttacatctctttctatctcctaattttctattctaccttttttgcacatcattttatcactcatttttgcttacatcactttctgttttctcatatcactttagctcatttattctttaatcacttctacacttgaaataatttgcaattgttaattttatttaaaatgttaattattaataagttgaaacagaaaatgtgacattctaatacactttaaaacaaagatatagttatatatgtaaataacacaatataatgcaatactacgcgatatagtgcaatataataaggtgtaacatgaccataagtttaactgacgtattactatgcactaaccatgttaagataatttaattgagttatgatacaggtgacggcaaccattgcaaaaatccatgtctgaaagtatatcaactggtttatgccctccaatgtaagttttatagaaataccaatggcttttatgctcatgacctggaaatgggagaacaaatcacagaagatatcaggttccataaatagtaaagtgaaagcacaagggagaagccgcatttggctagaatgataaagtaacttaccgttaatgatccaaccacagagcatatcccaatatagatcattatattggtttggccatagcggggagaataatacaaaataagaactaatgtcagtgctaccactgacgctgtgtataaaagaaatgctgcaagcaagaggtaagaatacatcagatcaattaccatataaagaaagggaaagaagaaaccatttcactagtaatgaataataggtatctacctggttgaatagccaattcccagatttcttccacggaggtaagagaaagttcttgaggagcatgaaggacaatcatagtagagcctacgacacatagaaggcagcccaccatccccattctctgaagcttctctttcaacaagaaatgagctaaaacagcactgccatatccattcccagatcaatatatcagattactaacctaagcataacgctagaaagattaaatgagaagaaaaagaggaagggaagcagttttgataagaaaaaaacagaatggcagaatgtacctaacaataatactcagtgcaccaagcggtgtcacaagcacagcaggggcataaacatatgctacaaagtttaaaatttctccaacaatcactgccaagtattaaaaatcattaatatgtagtatcacatcctctaaagtgtaaaaatcaaggaaattcaatatccgggaaagaaaagctaagaaacgcaattgcctatttggttgtagacgttcccaaattgaattgacaagttataataaatagcagagcaaaatcattattgatttggttatttggtttctgaaaaagggcatactcaaataccaacatcattatttttctcatactaactactgaaaaaacagcagccaaagtagaggaagagagctaaaacacttacttgtaaccattcccagccaccaaagaggttccaaaaggtaaccataccctccaacacctaattcaacgcacataattagacaccaaaaaaataacaataattgaaaattgaataaacaaatcaagagaacgtactggcactggggccatttacgccagcccttcggagaccctttttcttgatgatgaagctggaaccaatgaaggcgctagagacgaccgccaagataaatcccgtgagattactcgagtacatctattattatcaatcactatgtacaacaacaatagcaccaccaaaaacgacaatttcgaagacccgaagatgaaaggctacgactcatatcacaaactgagatttgtggtgtgaaattttcagtcgtagaatgagattggaataagatttgcagttttttttttcagaaaaaaaaaaaaaaaaagaataaaaagaaaaaaaaaaaaaaa

SEQ ID NO: 161360 - DNA, 3828 bp, Cannabis sativa
agtcgaattactcgatgtaattcttatggacatacttgaccgacccacgattaatcgtgaagaaaccacttggatgactctaataatcaattatctaaaaactggcaaactccttgacgacaagattgaagccaaaagactatgttattgagctactcgatacgttatctatgacgggaagctatatcatagaagttttaatacaaccactcttcatatgtatagatggtgataaatgcgattacatccttcaagaattccatagagggatatgcaacaaccacacaggagggaactccttagccttaaatgtcatgcgacaagggtattattggccgagtctacgtgcaaatgcgatcaactttgacaaaagatgtgaaaaatgtcaataaatcgctacatatgtcaataaaccactaagcaatcttacttttatcactagcccatggccatttgcaatacggggcatagatttaattagtgagcaaccaaagggcaagggaggagttaaatatgcagtgttcgctatagattattttaccaaataggtcgagccagaagctcttacagtaataatagttgtaaaagtatgcgagtttgtgtatcgagccaatatatgcaggtttgcattccttacaagctaatttcagataacatcaagcaattcaactgcaaagaaatatggaagctatgcgacgacttatggatacaaaaagcattttcaacagtcgcatatccccaaagtaatggacaaattgaaatagttaatcagatcatcaaacacaccatcaaaatgaaacttgaagagcgaaaggacgtctggccagaggagtagccacaagtatcatggtcatacaataccactactcgatcaattgaatagtgaaactcccttctcgctctcctatagatgtgaagccatggttcccatagaagtacgggcagactccctttgtcgtgatgcttttaacattgaagataatgaattgggacaacttctctaattagatttattggaagaaaggcgcgatcaagctcaggtaaagaataaggtctatcaacaaagaacatcacgctatatcaactttaaattcaaggaaagaagtctgtgagtaggagatttggtattacataaagtcatgcataatacctgcaactcagcacatggggtttttggcgaaaacttggagggtccataccttatcactgaaaatataggtaatgcaacatactgactttttgatcttaacgactcaatctttgaccgagcatggaatggtaaactcttgaagttttattatgaataatactttcatgtatatacttagccaattttaattgttcaaaattacctaagtataaggaggatatgtaccattattacaattaacaaattacactactgattatgaataatattgcacaattttcaaattttttatccttgcagttatgttttttattttttttattacttgttcagtaattctaacattatgaacaccaagaacttcgtaaagcacaaatcgcatgaataaatgttacaccaagctgtaagaataagtcgcaataatatcttcgcaccaagttgtagctatgatcatgataaatactatagctatgaatatgccaagatgtatttgtaactgtaggaaacaaacaaaaccacatttaaaaacacttagaaattttaacgaaaaattatccccaaaggatacattgttccaaacattgccagaaataatatgcaaaaggtgcgatgcacaattttcttaaaagttgattacaaaacatgagtacccatgtactgctattaaaaattcaaacaagaaaatattatttctaagtggcagtggcattaatgttctctgcgaccttttcagcagcaactacaacgttagctccagcaacattcctgacttcaatccaagtgatggcctccttagggaaaaggttaatgcttagaccttgattctcagtaggagacacagtgtgaaatgcatttgccatttcgactgcctctagaccaaaaatagcaatgtcaaaatcaagcaattttgttagggtagatgtagtcattgacagcctagtcataagctttcttcttttcttctttttcattattgaagtcgcgggtaagagtgacgacttgatcctccaatttcatgactatctcctatgcttgatttttagctttgtcgagatcctcgatcttcttgttcttatctactgcctcaaggtttactttcctgatcccctcttgaaacaccattctttttcttcaaaagctcattatctttgagaacctattgattcacagtaatggctcgggagaaaatagtcaccccaaggatcatggactcgacacagtgagtctaaagatcattgacaggcattccctcaatatgggtaacaaggtcatcacttacatatttctcctacagagccatgaagtcatgagcctgagcttctagtttcatcatgggtttcttccccttctcttggacatttttttgatgctttttggacaagtcaatgactaggggtcaacaacatcacttttcctcttttaagcaggattcacagaagatggagtcggaacatctttcttagtctttgatttgcaattgaggatcagagcattcttcaagaacttcatgtctgcataatggatattttctaagtacaagtaaatcgtgtaaactcacataaaattattagtacaagcaaagttgtgttacctaagatttgcctcggggtctgcttcggaagacacttgtcaatcttcactttttgcttctcagaaggatctttgtataccgattcttgctgaagtctaacgttagggaaaattaattaatgttctcacaacttaggagatgtgcaaagaagatgccaatctcgatccctaactagaagattagttaaagcttcagcaattcccgcgtgatctggagctaactcaaatagagctggtctacctacgagtacaaacaaatgagcatttgtgaaacagacaagaaaaagactaagtatggaaattagcaacatacgaagatgatgattaaagtctatcctaattcctgatagtgagaacgcataaaaccactttgatttttaatctcccatactggatactataccttctactccattgagttcagaattagaccatttgctaaaacaatagaaatttttgtcgtgaccaacattttaatgtcataaaagtagcagagtcctcaatcgtgggttccccttgcgtgtattccatatacatcgcataggatccaagaactatcctataactgttgggagtaagttgaaatagagatacatcataatatgtcaaaatatctttgataaagggatggaaaagaacaacaacaccacaacgaacaatggatattgaaataatgaccacttaagatcttatgattgtgggattagtataaggacgatgaggatgctgaatcgatattggcttcgtgtattcaatgtttatcagtttcaatctctagaacgttgtcaggtcagatttcataacctgtgaaacaaggtcctcacaggaaaagggttcatcaagaggcgcatcctcaacccagtccgcatcatcctcatcgtcacccctttcttccccacaatcaggtaaattgaaatcttgtgccatttccacgacttttgcatttgggacaacccttggatgaataaagctcccctgagccgatatcctaatatgaatttctaaaacgatgaatataaacacataaaaggtatgagaaactttacagtggttgcagcggaattaaatgactccttccgctcagatct

SEQ ID NO: 161361 - DNA, 3011 bp, Cannabis sativa
tcgaattgggctgggctaacaagaaatgttgatagccttgtattatcctaattctttcatcgaattggtcatggaatgtgtcactacccaaaaatttctctcttatggttattgactgattaaatggctactttaactcaaaaaaaagaggtcttaggcaggaatctccttttttatttgtactactaatggagtatatcttccccatttattaaccaatatttcgaagaggactgaatctaagcatcatcatgtatgtaagcattcgaagttgaatcatttatgttttgttgaggacttgttgatgttctcaagaggggatattacttctataatgactctcgctagaactttaaataggttttcgaacatattaacattacaggctaataatagcagtacattatttattgttagggaatgaatagggcatatgagcaattcagtttggagagctcaagttatgtcaagagtagcttgccttttaagtactttagaattcctatttagtaaaaaaaaaaaaaaatttgagtgtgatagcattatttaaaagatggctagtaggattaaccataatcaattctactttgatagtagttcacatttattgggcacaattaatgataattcctaaatttattttaaagaataatagtatttgtaaatctttgttgtggaaaagctcttatttttttgaatgttgcaggttttgtttctaaccagttttatttaacaaaagacttcgatggtttgggttttaggaatattgaccaatggaatgtggatgctttgagaaggtatgtgtgggacgtttctttaaagaaagattgttgatgataaaaatattatcaaaatcaaaatggaacgtggctaagttaagtaggaaattcaacatttcttaactttgtttgaaaatttcatcaagggaccacttacacaaagtttggtatatgagtatatttggaataaattttgccgccaaaaacacaagttcataacttggctgatttttcttcaaaaatttcatattagggcttggctggttcgacactattataattaacacatttatattcagtttctttattaaaaaaaaatcaaagacataggtctacataggcttgtttcatcaatttttgctcgactcgcaataaaattttagcttgatctttgaattttttttttttaaaaaaaaaaaacaaaaataaaaggaaggagggtgattttcgaaggcttgcacgaagagatgagaagcctcaaataatgaaagacctatgtcattggttatttaggaataacctatgacataggtgctttataatgtcttctgtggcctttcctcttcactttctctctcctccccttcactctctcaactaaaaattttaaaaaccctaaagaaaccaccttgaccataccaactttcacaactctagattgttttctaccatttttttcgcatcttcaattcttcaagcaataattcaatgtagagtagcaaaaataaattattttaagatttaatggaaaaacttgaaggtttacgtgacagttttaggtgagtgatggtgtgattagaaaatgctattctaagttatttggcattaagtaatgtaaatgtgtatttatttaactttttttaatttaatttttatttatacttattatatataatttatatttaatttaaatatattaataatgaaataatatacatgtggaaaaaataaaattagattttaataataaattataatttgcacaaaattaattctaaagttgaaaaaatcacagaaagcccctatgctgacagttattgtgtaataactgacggcataggaacactatgttgtcgattatttgaaaataacctacgccataggatccttatatcgtcagttatttttctctcatacagcgtcgctttgaacaatgttgatagcgaattttgttaaaattaacgctgtaaatcccaaaaaatggcctctaaagcctattttctggtagtgtcaaacttggcccaataatggcacttttcgattcttcgtgtaattgttgtgtttaagttttggaatatgttaattattttgtatattgatgttctagaaagttcggtagcatttgagattgattggaccaagttgtggtggtttgaatattggaaatctcgtgtttcttgctgcctaggaaactgaaatactggatggtacaaagctgtacaacctggaattctgtttgggcaatatttgggaaacattgatttttatattttggccataatttttcacttggctgttcgttttggacgttctatatatcattattaagcttatgatgagctctacagtatggtatatattttacagctaaagtataagttttattttaaggtatttttatcatgtaattcaatagaagaccctagagtctttttgggcattagggagtgttccagagtaagaacttactagtctttcataaatgtgatatagcacctccaattgtcagacggtatttctattcaggttgaccaacacacttgaatttgaaaataaggtaagactagtataacacacacgtatatacatgtttatgtttaccagtaatatagtatatcaattagagcgatagttggtgtacatgagattgcatctatatatcgtttgaatatatatttggcaattctagaaagtacgaattggtatcatagcggtatgacaatagtgtcaggtcagcaatacgagcatagtactggttatgacttatcttcaattctaaaagtataaactgacactatcatagctgtacgatcatagtacttagccagcaatacacgcatagtactgattaagagtgatattatggtcaattgtactattggatatatattgatgctatcatagcggtacgatcatagtgccaggtctgcagtactgtaacatccctgcttcaagcctccattaggcccttacagtcacggaatgatggctcttatacacgagcacgtcact

SEQ ID NO: 161362 - DNA, 2649 bp, Cannabis sativa
ggttagtgtagtgtaccgaaaagatcctgttagatcggatacacctggccatagaagtgtttgtgcaaggacatttgctccccgactcgttagtttgcgcattagggtccatccgtggacgccaccacccttaacgtaacgggttccggtaactatactagcaccagtctccgattgtttcctaatgaaaaaaaataagtcttggaaatcgggtttcagatattctgtttctgttctacaattaagaatcacaagctgggaaattcttacttgatgaagctaggcaaatactttggctacatataaaaaaagcaagcaaaagatcaatcgatcaatataactctatagacaaattgattcataaaatttaggtcaaaagtacttacatggtgagataaatcagcatccataatcacaacaaaattaccggtagcgtgtttcagaccgtgaatataagccgtccctgagattcattttagaaaaagaaacatcagtggacggatttgaaaatagaaaacactgaaaacacgtacatacatacctaacccaagcttctttggtctcggtcttaacaactacaaacaaaagcatagcatatagtcaaaatcagttatctaatataaaattttggaatagttaaatatcgatacttacaattcgttcctcgccataaaccttctgcaattgcttgacgatttcttgagtaccatcaggactaccatcgtcgacgacaatcacttcaaagtccacatccctaaacccgaaaaattctcaggagtcattcaaattgaattcagagcacaaaattgaaaaaaaaaatgagaaaaaagagaatgttcacctaagatgcttgaagatgaggtagacaatgagggcaatgttgaggcgctcgttgtaggttgggacaattatgctgtatttattttttggattatcgccaatctccattgaaatccaaccctagaatctccacttgctctctctctcacacacagagatctgaaaatgaccatcagaaagatgcataatgtaaacaacaatatgaggtaaagtcatacacaacttggagcctaccaaaccaaactcatctcaatagctaattaaacttaacaaaaaggcaaaacataaaagcttttactaaaactattgtgtggaattaccactgcagatcatcttgggacataacaaccaaccaatgcacacatagatattagtttatcacttcaactgtcgtaccaaatgcaactagttcataacttacacttactaatcaatactgagagtgagtccactttgcaaaccacaaattgttcttctcaatgctacaaacaaaagtaatggtaccaaatcaacttatatcactgctctaattattttaataacatgaaacaattacaataaagatacttatatatagagagaatgcatcatcttaaaattaaatccaaatcaaagaaattacaacttagaactataaaagctctacaagtgtaagacattaatgtttttcacacatttacgttctctgcagaagtgttcatacattatatacatgtgtattatctctgataagaacctccctgtgaactcagtaaaaaagtagcaaaagccaataaaccagcacaaatagtaatgatcttaatgagacagtagccgaaatcgactagaattgttgagctattattgaataaaggcaaaagtagactaaagtcactacaagggtggagacccaaagctctctaaagatgctaagaatgaccaagttctagcaatgcccacaaccaattatatctatatgaaatctgatatttctcaatatatgatgcatttgaacaaacacagtgtgggcaaccaaggagaaaaaagaatgatcagatctttattacatagaacaatcaatcaatcactaagaaccatacctaattttgatcaactttatagaatcgaaacaaaaacaaaaatgtaatgaatcttgagattccagattgcgaaattgaagaaacacacacaatcgaataactcgaatcagaaataaactaattaaaatcaaaatcgaacttagaaatgaatcgaaaacgcacaataaatttaccgtgatcgtgttggtcgcttgatggtgttgttgtcctcttcgggcggcggtcgtgtttggtggcggcgacggcgggtcagtggctgagcgatcacggcgtgtaattggctcctcagaatggttttggaagagagagaaagaaagaaatgaagaaatggtattgggttgggctggtatgggctttctaggttgggctgggcccaaaaagtacaatcgtaagcccaacttgaaacattcgctgatggagactatgtagcgtttgtttacaaaaataaccaattttgggggaatttttattaacattgtttatatagtagaatctccatggttgttactagaaaaaaaaaattgctgtctctaaattggtgtgccctttctatcccaccaataattttattccacatcatcaatatctatttagcatataatgaatttcttaacaaactttaaagtttaaactaaggtggcatttagtaacacttttttaatcaattttctgtttctaaaattgaaagagtgaaaatatttttcaaaaacatgttctataaagctgtttt

SEQ ID NO: 161363 - DNA, 7011 bp, Cannabis sativa
ttgatattgggctgatttttacagatcttcagcttgttcgatgcccagtctgtgacctcaatacatgcgatggtaaggattttttttactataaaacataaatgaaaagacccattaaatttgtgtgagtcaatcaatttgggagatgacattagcaatttatgcaaatggtcatagaatagaattaattacattgtgaattcagttagaaattgccttataggacataaacaaatcctactcctgagctacagaatatggttgggtggtagtacaaaggacttgtcctcttgacttgcttagttttccttctcctcaaaccgtaactgtctaggatattttgcttatttttgcaggaacaatgcagactttagatgcaaggcacatagagctatttttgaacaaggaataccgcaatgggagctggaaatacgaactggtaggatctcatgataaccaaatgcatgcagatggagcttcgggggcaatttttgatgttgagcacctccgagactgttcaacatctggtaagatttgacggtctctgcgctaactaatttctttaatatggacattttactattgggttgctgtcatactcattcagaattcgtatacctgatggacaatgtctagtagaggagagaattacctttgtagcattaatgcatgaaaaagatagagcttcaaataaaaaatgcttaatgttttcttgaaaacgtattttctgaatgtggtcaatgaagaggtctaagagactaagactgtgatgttagttttgatcaaaataaaataaaatttgataaggaaagaccctattgctttgtttccttgtcagttgtttccttctttgaagcttaacaaattatttggtcttatttccaaataaaatggcagcggtgtttaatctcaaatcatgggtcggtaaaccaatggactggcaacccagagctgtgattactctccatgctgttgctgtcaacaccaatttacaaaaaaatgaaggtgtattattacttctcgtgcttttaatatcctttacgtgtttaagctatggaaatttagcctttggactaccgccaaaccgggcttcttcactaaacttcatttaagatttgtttcagccttttaggtgattattagagacctgagttccatttatgttaactctttctcttttcactttgttttacatttgcatcttcttaatgacaggaattcatgtcaagtaccacgccatgagagctggacctgatggcgaagttgtttcaattagaatctcccaacagctcctgtgatttttccaagttttgttctggaaacagaaaataaaggaagaataaaaacaaaaggggaaaatcggctatctgatttagagatatactcgcaccacgaaaaaaaatagtttcgctttcgtgcaccattcaatcaaatttagattacagaatagagtctctagagacactagtgagtttggtttggttattatctttgtcctgttcttgttgtatgaacgtggcatatcattctttgatgtatttacataaccaaatttgtacctaaaagaatattatagcaaagtgtaagtaaatgtacggatattcagatctaaaaaacatactgagttgagatattctcgttatgtcacgaaaaagtccatgcagtaaccaaatttgttcctaaaagaatattaataccaagtagacgtacggacattcaaatctaaaatcatagtgagctgagataatctcgttaaaatccatgcagtgacgactaattaattaatgtgctttacaagttataatgcagatgattaagcccattaagctttgtggccgatcagggaggtaaagttagttgcatgatttcatattaaaattagtttggtgtaatgacccatttggatattccactattaaatcttattttatttgcaaatcttattttctgttggtcttctctaagggcatctggcgtacaagttaataatgctataaaagcattgaccactcttaaatcatattatatttcctctacactggttgcaccactattctatacattttgactttataactcatatattatatttaacgagattaaatatatgccatcactattatacattaactctccccaaactttagattcaggattttaacaaaaatatgggttcccctaaaatcctcttgtttcttctcttcttcctatttcccactttaaacgcacaaaagcattgccaaatctccatgtgtggcaataaatacatccctattcgattcccttttcggctaaaatctcatcagcctcgaagaaactgtggctacccaggtttcgacctgagttgcaataagcagaacacaacagttttgaaactccctttttctggggaattttttgttcgagagatcaactacataactcaagaagtacttctctatgatcctcttaagtgtcttcctcgtaggcttttgagcttcaatcttgcagggtctcctttcatatctgctttttatcagaactacaccttcctcagttgcccatcttcctacaccaagtctcgttttgctcccatagattgtcttagcaactcaactcattctgttttagctacctcttcaatgactcttgctaaccaaatattggccgagtcgtgtaagcttatgaaaactataacagttccggttaaaagacctgttcagttcaatgaaggattctccaacagccttaataatgatctccatttgacatggtatgaacccgattgtagtatttgtgaattacaaggaggcatctgtggtttcaagagtaacaccagcaaagaaatcggctgcttcttcaatcgtgaaaatagtaagaaaaacttgttcctttctttctattttggttttttatattccagttttgcgtactttggtaattgacatccccagaaccagtccgaaggtgcggtaagtttctgactgggtcacatgttagaagtataatttaatgaataatgacataagaatcttgaatattacggtatatactatatgtattttaacctgtataagattaatagttcgttgacctgtaaaaaaccaaaatgtcaactcaatgaaactgtgataaggtgttattatataaagtaccactgtaagctgtaacgtgcccagcatgtgtattaatttgtataggcgaattagtcaaaaaaatatatatatgtagatgatctactcctgttgctaaattgatttttagctgtttgtttaacactgccatctatttccacctaataggaaatgaggattcattaggtcctcgtgttcaacctatcaaattaatttagtagttaaaatgtagttaccggtcacaggtccaccaagcgtatttggtcagtgactgcaaaaacagtcaattggattaaatctaactggtgagcggaaaaggtttggtaagatgggtaagaagattggtaagaggttgatggaaaagaagggaatgctcagcttaaatgtgaagtaaaacaatgacacttgtgttctaagtaaactaattctgaataacccgattaggaaaacattggaggatgagcaaaggtcatggttgatgggttcatcccaccattatacctttgaaacatcacattaatggctttttcaactttcaggtcgatcaaacgatggtctccaaatattcagaatcatttgcttggccattgccgtgccagccatgacatgcgcaattgggatagcctgtttcgcttgccttgtagataggtcacatcgaggtcatgcacggcggagaccaacagcagtagtggcggcaccagatggtcttgaacacagcattgtcatggtgggcctggatgactccaccatagaatcatatgaaaaggttgttcttggtgagagcaggcgggtaccgggtcgaaatgataccacttgtcctatatgcttatctgagtactgcagcaaagagactctgagatgtatacctgagtgcaaacactgctttcatgctgagtgtatagacgaatggctccggttgaacggaacttgtccagtttgcagaaacaccccatctccatcccctgctcatgttaactcggattcagatcgtgctaactcagaaactttctgataaagtagtaatttttgtgccgtctccgatcacacataggtctttttttttcttttactgtacatttgtattttaaagatttttttttaagagaaaaatcacatcgatatattgctaccaacaagcatgtgtaacatacctttcaagagacaaaaatactatgattgcactctaaagaaatgggaacttactataagcgttacattacacgcatatgtatatatttgtccaaaaaacattgatacagaaaatagaagaggatagtgtaattataacatgcttagatcagttacataacactgttgaaaattacatctgactgaagtattaaaatattaatccatctgcaatataatatagaggtgatctagagtcagaactaggccagttctacatatacacttcaaatttccagtcacatttggaaggaaaattggttggccacaaagacaacaacaaacactcattttttggcaagcaactttttgggaagcttctctaaaggggtagactttagcaggaaaagcctagctgctcgctcctggagagtgcctccacattttaatccacgagtttggagttcagtctttaatctttccaagccaagagcctaacataccaaggaaatgaataataaatcaaaactcataatggatgccgtagagctactaagccaacatttataaagttaagataaaggctatggtgacattagtagaaagctaaccaaaaaatgttcataaggtggacattaccgaaagaaggaataagaaagattagtttgacagaaaaataagaataagtaaaattaattagcaacgagacataaaaagagcaaaaaaagcatgagaaaaacatactatccttaacttatttacataataatggagaacagagaataaacacaaaagattattcaacagtatggagtataccacgacacctatgaagaacatagcaagaaagaactttataaaaatacctctagttcagcagccgaattgatttgatcaaagtccaggggagtttctgtaattccagcatttccacttgaacttgcctcaacttgaactcctggatcggattcaattggacgggattcagaagtcgatagtaaggtttcaacaacattcccacagcttgatgtgggaacattgtccaccacaggatccttttcatcttgtacagcttcagtttcagaattatcagggaattcggaacaagatacagtcaaagtctgatccatcttctctttctgactagctgtttcatacacatcatttccctcacaaggaatagaatttacaattggggttttactagattctttcgtttcctgcatattactagccttttcttcttcctccgggccactctcggatgagctccctccagaaaattctccaacttgtttcgcaccagttacagagccagaactatcatcgccatccttactagaatcagaatgattcccattattcaaaacagtggatttctcactctcctttcctacgtcactctcatcatcttcatctgaatcatcactatcacttacacccatttggcgctttcccatcctaatcaatttaaaatgttcagatatcaatatcaatgagcttaaaatatttagcaggagccagcaaagaataacgatagcatggatgcataaggaaaaatatgaacaaaaaggaacaaaattgaagcaagaaaatttaccatattttcaatcgcttagcgtcagcagcatcgcccttaaaggcccctttacgcttccctttcaaaccctcttcacgctttcccttcacggcctctctaactgaatctaaaacctcagacacacagcgttcggactcttccctatacttagcgacatacttctcggccgcaccatccccagcgcccttctttcctttcttcgcaactttctttagaaagtcatgggccttcttctccagcttcctctcctcctccgtagctttccactcctccagcctcttctctgcgttcacgtgtctcagccttctcccactcatatcgcgacacgcgtcgaagttgttcgtcttcttcaagtttcttgtccccgcgcctcgaagcagcgaaccaaaccctcccttcccgccgcgaagacgaagagttagatgcaccgtcggaaagctcagatcctcgtcggcacacgaaagcacggaatcatcgtcgagatggcgcgatccggtgatcaaccgctggagatgcgagggtattttggtgatttcctggaggcggtgcttgacatcgttagcgtaaacttgtggggttgtgtacctcaaaattagggttttcctctgcagaagcatgaccatcagctggtagatcctgggctcaccggaaattgcagtgacatccatgatcacagatggaaagcgctgtttctagggtttggaatcagtaggggatcaaaatcttaagccaggagagaatggatgtaattgtaaacaatcttatatatttattggggtcactctatttattctatggatttttccttttctttttttttttttgaaaaaaattctaatgcaaatttaaataatgttttaatattctttttttcttcttggaatatttttttataaaattcatatttgatagtatttttaataatatcttatatttttaaattgtacaattttagtatcttaaagtaattttttttttaagaaattttccatattattattatcttaaagtaaatttaatcaatacaattttaacaatttaatcaaagagatcttaactatatataattaaataattaaatttgaatttaaaattcataaaattttaagcaatttaattgtattgataaaattttattaaaaaaattacatttagaatactaaatatgta

SEQ ID NO: 161364 - DNA, 3394 bp, Cannabis sativa
taaaatatttccaacagtttcttccttggaaataaattggtttcttggcatagtaagaaataaaattctatttccttgtctactgctgaggctgagtacatagctgatggtagttgttgtactcaattgttatggatgaaacaaatgttgattgattgtagattaagttgggtgttttaaaaaaaaaaaaattgtgataacacttgtaccataaatatttctaaaaatcatgttcaacattctcgaacaaaacatattgatataagacatcactttattagggaacttgttgacagcaaaacattgcagttagaatatgttgatactaaaaaataattagctgatattttcaaccaaggtactagactcaagtctctttgctcttctaagaaataagagaatcttccaaaaagatacaaaaaaatagtgacaaatttttgggtataaactgggttcgggtcatcccaaaaaaataaataatacaactaataaacaagtcttatataggaaactcacgtaaaagattaaactgatagaaaagacttaaataatcctaattaattatttaacaggatgagggaaatgttggaattgatgtatgtattgtctttcaattaatttttcatgatgtctttgtactttaaaatctgaatgaaacaaggtccgctttgaaattatacgagtcctagaaaaaaattaaaataaataggcctttacttaaaagatatgtgatgcatagtttcaaaaattattaaaaaaatgtataatttaaaattgaggaaaatttaagggtccttgagttgggtgagccctaccatcttagtccaacttgatcatgaaagtttattattactcaaaaaaataaattcatttttgatactaggaataactctcaaaaccttgtttatatattatccatgaacaccaaacaacatgaaagataatttattttattaatattgcattgctaagatttaaaggccatcacttattttaaatttaaaccctacacacatgtatacaaattataaaaacataaataggaagtgttgaatgatctcacataaattgaggaaatggatcaagcctaaccacagggtaacaaaccaaaggcttggcccttggaattgacaacccaaagccttcatccaagtccacatcggtaccattccaatcaaagcactgaaccaaagctgctactgtcgctggaatcatcaaaagagccaaatttgcaccaggacaacctctcctcccactcccaaagggtaacaactcaaagttttggcctcttacatccacatccttcttctcctccgtcatgaacctctcgggtatgaaccggtttgggtcatcccaattggctgggtctcgattaatggcccatgtgttaacgaacacacgagttttcgctggcacatggtatccaccaataatacagtccttggatgactcccgggctgtgaaggctcctccagggtggagtcttagggtttcctttattatggctcccatgtatggaaggtttggaaggtctgactcttctactattctcttgtttcccaccacttgttctatttcttttcttgctttctctatgattgttggatgggtcattaactcggatattgcccattctattgttactgattgagtttctgtcccagctccaaacatgttctgccaaaatatatgacaagttacactttcaagaccatatttattaaattaaaatgtatggtccaatattaaattgtattatatcaagtgcccgttaacaatattctttttttgtgatggcattgttataatatactactatttattttgattggtataattgaataaaatactgcatagtttactttaaattataaaatttgtgagatttaatattaaattacattaatatcgatatctcataaaagtaagcataacaaaatgggataatgaatcaagttagaggcccaacccaagaggacaactttaatctaatataactagttatgtgtgtgttgtttttattaaactaaaaactttcaatacccaaaatcaaaagttttggctcactaacttctctaaaactagctccaatttaagatttaaaaattgtgctaaatttagtaaaaaaaaataaacaaatgtatttgaagtcataatttttttttgagtgtagcgtaatggtattacaatcattttcatatcttaaaaattttgggttcgaacccataatctctccctttttcctaaccctccctcaccactaaactaaccctagtggctttttaaagtcataatttagatataaagagtctcatgtatttacgtaagaagcttggaagttgatggatccttcttttcacataaaaataaaaggagttttatttgcaactttctatcacaatcactttttcaatttttgtgatcgaaaataaatggaaagattttttttttttctaatttttttcataacaatattttttatagttacaacattatccttataaatttttgaaatttttgaaataatttataataccgacaacagagtttctaatttaagtttaccacgtttagtgttcaaaaaaatttaaatttattttcaacactgtaagctatttgaactttttaaaaatctatataaataatattgtaactataatgactatcacactactaacaaaataattcaaataataaatgaatgaggtcatctaatatactacctaaaagatactttgattactatattgatatatttcacctacaacttttttgtaattaatttttttaaaataacaataatataaattagaaaaattataagaaaagtgaagtgaatcaaataaggtcaataatttgttataaaagtaggctctcttgagtgggatgaggaagttcttcacgatttatttattcaaaaggatattgatttgatctgttgtatttcgttgtcttcgtcttcggttgagaatgcttggtttcggatgttggagactcatggggattattctgtcaaaagtgcttatcgcgccttccaagtaaacaatggtaggtggaatacgcaagacaattcgggtttttggaggatgttttggaaacttgaaattgcctcataagggaagaattttctttggcggggtcttactaattgtctccctactcttgtgtctctgcggtctaaaagggtccacgtgagcggattgtgttcgatgtgtaatcgggaggatgagacaatttttcatataatagttagctgcacttttactaagagttgtctagacagaaggctgggaggaacggttggagggggtgaagttgctatgtttggcggctgatttgataatgtttgtaaggttcagcctatggatcgtattgagaggcttgctatgcttct

SEQ ID NO: 161365 - DNA, 1738 bp, Cannabis sativa
tcaacccatatatattaatgtaaaaataagagtttttttttatttatttgattaggtaataaaattaaatataaaaattcaatttttttaattatacttattaatgaggtacaccaattaaatttagaaggcaaataaatgttacaagctgataatttataacctcacataattcttcaggttggctttattaaagagagacaatgtcgccaaagcttatcccttacagtttaaataagcaactaatcttgcttgtcaaactaaatttgaagacgcgttatctatttttccgggtgtaaaacagtctgacttacgatacctttgcttggaccttgtttaccaatattccttacttgttgatggtttcggtaagtttcacttctattaattcgcggttaaaaaaattaaactaaatgtaatttctttaactagtttcattacaaaatattaattacttatgacatactaagaagtatatattttttgtagtgatcaaaatcacacataattaataatgcagcaatctacgatgataaaattatttagtcataaattatttattatttataaggataaaatttgttgtgattgaaaatataattagtcacaaataattatgttttgataactaatagtttttagtaaaaacttttagtgataatatagatattgtatgacatatatttttttagtaataaggacaaatatgtagtgtattgtaacaaacaatacaccaaatatccttatatttatatttatatttttttagtatgatttttggtattatagttaaaatgaaaaagaaatataatagtttatttagtgtgggtgtaacaccaaatatgcttaataagtgagatgagtttattgattttgttgttgtaattaataggcttggacccaacacaagagattactttgatgaagcaaattaactatcaagatgggttgaagcacaatggacactaggaagtgccatagaagctatctcatcagcatcattaatagctaaactttgagcatgaatttaaacacaaaaattagtctatatatgattaataatatgtttggtataagatctatgtgtgtagtgatacaattgggcttgttaattaactaattaaagactattgcttgatgtaactatctatcttgtgcaaatctcctataaaattattgagatgcatttcttaatctattaattcttgtaccttgttatttttgtgtttttaaaaagaggacacatgtaatttcataagcttaattattttaatataggccctgatgtcgcttgattaattacagtgatgtcgtgttagtaaacaggttatatgtctcatatctataagaagataaaatcgcactcgaaaggagagttagtgagtcgagaaaaataaaacaaggaacttgaaaatgatgaaatacgaagaagataattttgaaaaatttaacaagtaattaaaatgagaagtgatcaaaaaatggatatagtaagacacaagtttcatctatgtaattatatttccctaataaaattgattgtttaaatacaactataattttacaccattaattatagttgaaaaatgtgtatgataaacctcacttgaaaaatatgtttttaattaaatcaacactatctctaaaagtactatcacattatataatttaaatctataaaatatcactggcagaatgcagtaaaaattatataatataatataataaatactttaat

SEQ ID NO: 161366 - DNA, 3989 bp, Cannabis sativa
gagagagagagagagagtgaaagcggatgagacagaaaggggttgattagggattctttgtttttttaattttgttatttaaaaataaaattctgattactaaaaagaaaagagaaaaaaatatttgttttatttatctttaattttaaaatatttttttttatatatttaaattaataaaattatttaggtcaataaaaatatgtcacgtgcacacatgtgtatacagtggcaaattcaaatggcacttaagagctaaatttaacaaagatatcaaagttgtaaacaaaattgaacataaaattaaaatatatgggggttcgccgcaaatttctcattttaaaaataaaaaactaattaaaaaaatattaccaaacgtacccctattaaacaaacactgtttttattatggcatttttatttttgttcttatcctttttattaattgaaattttaaagtaatgatctgtttacacataaattacacacaaatttgacacacccttatgtaacaagtaattttaattaattatcttcatttaagatgtgtctcatctattaaaagtaacttgggacccaaatcgtctatctaaaattgctgtcaattttcctatccaaccaattaaaacactccacattctcaaagaattaacagttgcaattttcgtttgttaactgcatgttttccttctaatgcaattctaaattttaatacttatttaataataaatgctaaaatatttttaatacacattaatacagtggaacccatttatatttttttttgaaagacaagatatattgcaacattaataaaagcgataatagtacaagttacaatatatttaaacttaaatttagaatatttccattctaaatgacctctctctcatgtcctaaagctgttcttgccaaattgtgagagaaaacattaagatgccttggaacatgatgaacagacattgaaagaaaattagagataaaggaaacaacctgatccaccaaatcagacaaaattgacttatccttccatctatgcttaaccttattgaaaagaatttgacaatcactttcaataaaatccaaagggaaccttacagtcgcacaccagttaaggacctagaccaatgctttagcttcagccaaaagaggagacactttgccatcaaaagaagtagacaaagcagccactacttctcccctatgattcctcattgctgcttcaatcccgatcttatgtctgcggtcattcatggcaacatcaacacttaatttgtaacaacctggtctaggaacagttccaacaaactcgccagtatcccaaccaatttcaacaccatgcaaaggctcgactttatgatcttgagcattgtcaaagccttgtgatagagccaaaacctgaaaatgggcaaaggaaataataaccttacgttaaacaatttaatattacgtctattccaaatttctcaaattatgtcgagaaaaattcgaagttcttctattgacaaattttcgaagcctctgagaatgaattccttaatatcatcgcacttattagataaatgaaaagctttaaatctaaagtctctccactcattcgaagctctggaacactctattaaagcatgagaagtagattcaatacacttagagcaaaaagagcaaagaggactaggcaaaaaattttgatgaaaaaggtttaaggcagtaggaagagcatggttaaaagccctccaaataaaatgtttgattttctaaggtatttgaagattccagagaattttctactagagaaccataaggtaattattagaagaagctaatttggcaaggtgatatgctgaatcaacagtaaaagatctagaatagtaatgctctcaaatgaggaaatgaggatgtcttccagggaagtatcacaataggaacaacaagaatggcaaaaacaacatcatcatcaaagtaattcgacaacctatccctattccaacaaccattgttatcgatgaaaaaggagacagtaggatcagggggtgaaacattatctttaaaggaaataaatctccaaccaggaatccaataagaattaagagttattgacttaccgtttactactttccacaaaagacctctcttaagaagatccctaccccaatgcagactttgcaaagtaaaggaagcacagtggcctttagaagcagtaagaaacgaattttgacaaaaatatttagctttgaacaatttggcaacaagagaatcaggcatggtaagcacacgccaagcttgtttagcaagaaaagcttgattgtggtggataaaagaacaaaacccaagaccactcgagaacttgactgacataaactatcccaagctttctagtgtatttttcctttgtttcccaaagaatcccaccagaaatgagccataaggccttcaattttcctataaactgaaacaaggattctaaaacatgacatagcataagaggggatagcttgaataacaactttgaggagaacctctttccctaccttataaaataaaagactattccatgtactcatcctagagctaaccttttgcaaaatataagtgaattgattcttcttagacctgccaaaacattgaggaatacataaatacttactgataaaaggcttatcctcaagaaccaaggtagtaaagaaaaacttagaatcagcaggggtagtattaggagagaaaaggacagaagacttggaataattgactaactgactagtggctttatgataatgatcaagggcatgtttaatagctaagcaagaacaagcagtagtcgtagagaaaattaaactatcatctacaaaaaaaaaggtggcatatagtaggggcagaacgacaaatagcaataccttgaaagtgatgattcgattcttgaaatctaatggcagcagacaaagcttcagagacaagaagaaaaatataaggggaaagaggatccccttgcctaaaacccatagtagaagtaaagcaatctgataaagtaccattaatgagcaacctaaaggaaacagaggaaatacatttaaggactaaagaaataaatctagctagaaagtgaaaatgatacataatagcctcgacaaaactccactctacacggtcaaaagcttttcccatgtctaacttaatagcagcctaacctactttgcctgatttcttatggttaatggcattaactaactcattaacaataaaaatattatcaaaaaaaattctactttgaataaaagtactttaattaggagagataataacatgcaaaacactccttaatatattagctaagaatttagaaacagctttatataaagtagaacaaagacttatgggtctaaaatccctaatccaattggcattctttttcttaagaataacaacaataacagtctcgttaattaaggaaataccaacattatcattaacaatagcaagaacagcagtacacaaatcaggacctacaggtaaccaattcttttgatagaataaggtgctcacaccatccatacttggggatttatccctagccatttgaataagagcaactttaacttcctcgacagtataaggctcattaagcatatgaaaatgaaattcattaatatgattgtgaacacaactcaaactttgctcaatcgcctcagaatcagtacctttagaagtaaacaaattgctattgttatcccaatttttgcactctaacgtggcatcacatgatggtgacacgtggaatcgactctaggtatctgctcgcaatacacaggccggacaaggcacctcacacattttctcggacgaggtcctctagaccgagcatggagcaatccgcgcagaacaccgacacttagccaatttagctttcgcatcgtgagtcatcaaggaaatcctataactctgggatcagattacagagatatggcaagctatccaaatcccatgattggtgtatt

SEQ ID NO: 161367 - DNA, 5951 bp, Cannabis sativa
agagagagagagagaggttaagaacaaaatgtgaatcttggctgaaatgggtagtggggaaaggtagggttagagctggagagcttcggcttcaacagaaatatcgtgcaaaaaaaaaaaaagagagaaaaaatggttacggagaagtggagagagaagacgtgtgagagagaaataaagggaaatcaaatggtgcgctgacatcatcagtttagtatttttgtaattataacattttttttaaaatttaaaaaggtaaaaatagttttgaaaaaatgtttaaaaaaccgagtataattaaaaatgtaaaacagtagccaaatttggcacttagtatgaaaatctcaacaatatttgtcttgggtagagattcgtgttggtaacgtgttataagataatataaattatagaaagaaatgggagactagagaagacaaagagaagaagagaataagagagtggacgcgaatttctactcccttattttaataagatgaactcctatttatacaataaaatacaacttaggaaatcaagtaattaagactatagtagataattgattctcaattattatgttcatccatatatatatatatgtgagataatttcaataaaaatacaaaaacaacaaaataattacaaaaatacagttgtacttaattttaaatatttttacgatttttatgatttatttactgaaaatacggtcttttgatgtatttttatgttatactcttattaaattattgtttattttttgttatttgtatttttttttatgttatatttatgtaattcttttattatttttgtattatttttacataacactctaaaagtataaaataattctttgaacgtaaaaatataaaaattttacaaaaaaaaaaattgtacgtttatgtaattatccatatatattatataacagtttacaacaagcagcttttttagcatttctagatatattaatacaatatactttttattattattattattattattattattttttaatttggctatgttacttagcttaaccatgttgtcacgtacgtatggcttgatcttgaaattacagttatatagctctttagtaggtcgggaaagcgaatgaagcagctgttgtgcattgattaacatggctttttgtcgataataaaccaactacggagtcatggaccacaccacaaatgtcaccatggtttctgtgaaagtgtgtgtaccttttttgactaggacatttcagcctcactagctgtttgttggaaatggaatgcctgccttaccactaagtctaactatttctactcatcttcaaccaattcttttgataatatctgttaaattttctaaacacagtaaaattatctattggttcatctttaacatctttcacctaaattcttagataccccttttcaactttcatacatacataatatatgagtgcctataaataaagtagcatgattctgatgatgtcagaaggaaattgctctcagtagaactctattatctttttatattgttcttaaaagcattttgaaatgattaagatgctatgtttttttttttaaaatgattaagatgctatttagttatatttggcttcgcacaattcaacactcgaaagtatcattaggaaaactgatcactcaataaatcaaaacaatatgtagagctaattatacacaaatattatagtaattacaatacttacaatggagaacagattatcaatgtatatttaatttcaagattttattgatttgtacaatagtaaaactgtaacgccacccccattactcttttataaccatataaaccaaaattttgaatgaatcacgatataagctatgcgtatagaaggtacctaaaactaaactcatagggcataatctggacaaactgagaaagagtctggttttttcctttctctagacacttgagagcttctttaccaagttcactaggtagctgaagacaaatccaatcaagaagtgactctaagtcctttgcaaagtcaagcaaataccaatctaatagctttgggattgcaaactcgtctgatgagattcccactgcagcttgtaagtactccctctttgctactaccagttcattctcaacatgagctgcagtgtatactctcacctagatccatttaacacggaccaaatattagcattcagaagaaaaataacgaacaaaaaaaaaaatcataattattaagcaaaggtggtggctactgaccagtgagtacatacattatcattaatgctaagctataccataataagcttggaatcattgaaggaatttattataaagaaactcaactacttttatccagaaacttacagcaggagaggaccagcttccgcaggacaatgcaaaagtcaccaatggttcagataactccagtccaaatatgcttctggctgttttctcatcaattttggtacccttggaaaatgcctggtgggcactaaggaataagaaaactaaatgatattcatagtttttacactactgtatatagaagttgagtggaccacttacatatttcgagtggtaaggcaatctcaagataaaatgttctatagttattgcatttaacaggtgtccccccacatttactgttgcctaattcacaggaaacataatcatatacatcattggcgattatagataatgtttgtatatttggtttgaaagaaacaaaacaatgagaaggaaagtctttgataccttttgcatcagggcaacaaccatttcagggttctctggtatcccatgctctaggaatgcctgcaagtatagtaaaatggtagtttatttactcatgtaacagaattagaaaatctacataaaaagtatattaaacagaaagaagctactaaaactagataaagtccatatacttacattcatcatgcaagaattatagatattgatccagaaagcaagcttttcctgatgtgtgaggttctgtaacttgagagaagtaagtttcccaaagaggagcctaaaaattcaaaaccaagaacaatgtgactcctatctcttatggacataaacatcaagtagaaaaaaaacaaacagttcctgtttcagaggaaaacatactttaatcttcgtagcaggaacaaagagtttgctgtccgatttagactgattgagcaagcttcaatagagaacaactgcttgtatttaccaatgtccctctttccaaactctgaacagatgccatatggatctccaaattctgttttatcattgctttcttggttacctagattggagaatgttggtaagcattctgcactaccgcgattcttaaccgaactcattcttaagaaaatgctggacaagcacttcaatatattttcggaaattttgtttgggccatcatcttctgaaggcttatgttctggaacagaagtacaagatcttgcttcggcattttcaagatcccttactctggattctaactgcacattgaggaaaacaagaacatgttcatttcccctcatatcaatttgcacaaacaccttgtcaccctttggtaaactaaaaacaacatacatgcaacttgtgtatatctgaactcttctctggtgatttcggattagttggcggcctcttcggtgatattttaaccgttggaggggttttgtggatcaacggtccatttttgtttctcttcgaattgatgctagattggttctccttcccctgcctatcatctttaaaaagccaaaaaagaaaaaagaaaaaagagttttccttattgactattccataattaataccaatttgacacaaaaacaagaaatgggatttacagaattgatccaatttagttaaaaacaaaaaaaaagctcaccagaatgtgatcgaaaatgctttgtccgcgtcgccatgttaagagctagacacttgggaagctctagcgtaggacttttaaccatcatagaatcataaagctcagtagaattctccatgtttctcttggaggaagaaatgtacacagcttcttggtatagatcttgcctgaaatggacaatctgtttttcgagccgaaccacctcctcttccaacacagccacttcggcaagaagttctagtgtctaaacaagattaaaatgtcactgtatctgttagcccacttctacagtctcattaatatgtgtgtacaaatagtagtactgaaagaaagaagattattattattatgaataattgaatacacttacgttaggagggagataaggaggaagacgaggtagagcacccaatggcctattgaaagccctttcaagagctcggtgaacattctcctcgtgccgaagtttcttcttcagtttatcgacctgaatccaatagaatataatctcagacaagaggggaacaaaaatggagaatgttgtttaacgattcagaagaagaaaaaagggtgctccaagaaatgaaatattttttttttctttcttacatcttgttgtaatgcaaactttctctctcttctggaagctcggccattaatggatgctttcagggtatctctaagcttggtctcttgcatctctggcttcttctgtaaggccaaaaacagaggttacagagtaagtaaaattagcttccacaacacaaaatatatcacaagacaaaagaatttgatcgaaataataaaacaaaaaaaacatgagagtgaactgaaaaagctagacacttgctgatatggatcaaagaagctaactttttttgtgtctgaaaatgtaaaccacaatctgggaatctgggagagaaggaagaatgggaaagaaaagaatctacttttcccggaaaatttgcgaactcggaggattcggaaaacaaaacacttgtgcaatctgggaaaataattgcagaggaaaaatatataaatactgttttctttttcttttttccattatcggagagaatacgaagactcaaattttggctttctgtcccatacgtcagcaatctgagaatttttcggaaacttcagcatttggagccttgtcactgaatttggaaccataatttttctaatagaaactgataagattaataattatagagctccaatggattataatatcctacagtagaaaccgtttttcaaaatatatatttattatattaaaaagaattaacaggaccccatttgagatttgagactaatattatcatcatcattacgttttcactcttcaatggagttttccctggcttttgtagcctagtcgtccttactctagtattcatcttccaaatttggcttattgaaatctgcgaagaccatgacaaaaaagacgaacccaattcaataataatgatgataacaacttcattaaatttaacattagaaaacaaacaagaaaggttttaagagaaagcaaacacctccaaatactagtataaaacaaaggttaataaatacactacccctgttctatacattgccataaatggagatcgatcaagaagccttaccacataaaaaccaaacgaaatctctcaatgtgtagaaaacaaaagatcactccaccaatccaatccagtcacagaaattttcatgctccatttcaaaactctctgtttaaacagccaaaacccagataagaaattgctttttgattgaagctagaacacagaaactgtacacagaagcatgacaggtagataagatacagataaaagcccaaaagaaactgggttagttagaattgagttgagggttgtatgcgttaaaatccaccacttcgttttaaaaataaataaattatattcatataaatatgtattggaagggaaatttgattttctatgcttagaaaatcaaaaaatttgatttataaaccaataattaaaaccctaaaaaaactataccttttttttcaaaaccccaaaaa

SEQ ID NO: 161368 - DNA, 1885 bp, Cannabis sativa
ttttaccagagtgatagaagaaaaaaaatagtttgcaaaccatactgcaatttgttttgctttttaaagtatatgaaccgaattattttgcaggttgctatatttctgatccaaaggaatcggcatgctttaataggtagagcaatggatgatcatgatacagagaaggtcctccatttcttaaaaaatgatccggtatgccagattgtgggattgtgctttattttcttgattcatgttcatgtttcttaacatttagactataaactgttttgttataggttgttgattctatatacgactgcaagagtgaggttattgggcctgggttctttcggttcaaggctgaaataggtgatttttttcttttcttgtttagttttatctttcacagaggcagaaataccgtgcttatcattttattggcgatatattaaatgataatcgacaatataatccagtagaaagaaaacaattgtaattccaaacctttatggagacatacaaattattattaacagatgaattaacattgttcttctctgcaacagatttcaatggggtggtacttgtgcaaaattatctgaaaaggaccggtcgggaagaatggggaagacaggttagtcatcacatacaatatataaatatgtatatatgtatgcataaatactttttttttgttttttctggattgataaaaaaaaaatttcttcgtgagcttttaacatttgatgctcatgcaattccttttcaccaattctctattcgtgcttatatcaatttcctcataagaaattctttgtcatgcttcaacataactgaaattcattcctattagaagtttgggtttgcgtaatcaagtcaatcatattttcttactgagtaaaattaagtcaatgatgagttgacttcagttttgtaaaatgataatatgcatctaaaggtttctctttgctctgaagcttgacaaagtagtgcctatcattctcttctgttaaattaattatagcatgaataccatgctgaatataatttttcacataacagttccgcgaagcagctatggagaaagacgatgatcaactcctcaagatcatgtcaagttacggtaagatgaaattccacgaaatctctgtattcttctatttttgatggctgagtaagtcaagtcaaccagttttctttatgatcgttgctaagaaagacaagtttgtgattgcaggtgaagaagtggttacagctttaggaagtgaagttgataggcttgaaaaggagatccaatatctggttccgggcatacgacatgttgatatcgaggctcacaatccaactgatctattaccatgaataatagaaatttttctggatagcatcggtatgcatttcggttattatttttgcattcttttttgtttcttctaattatagtgaaaacgaagattgcccaatagttaataataattaaggagattgttggtgagcttcgtttgattattttcttagtagtaaagcatgtgaggccattgtagattgtatatagaaggggaattttccattcctgagattaagaaaacattcattcattgcattctattgtaatgattttcctaattcttaaacacaaaaacaaattgcttttttctcttcttttgttcaacttggacttagtcccatgttccatgtttttgtgtacagagagagacttgtattattttcttcaaagatttttctaggtatattgcaatgagagttgaatgcttttttattattatcattagagtaatttgcggcatgagtttaatttttggaagacaaagtgtcaagtaaaatgtcttgtgtcaagtttgattggatcgtatcattaaatttttattttttttttaaa

SEQ ID NO: 161369 - DNA, 3843 bp, Cannabis sativa
aaaaaaaaaaaaaattcctgcttggcgtatatagacataattctaaataataataataacagtgaagaatactaacagaatggtaagcatgaggaatgtttcgccactaaaactcaaataccgggagtctcaaattcaagcaggaaaagaaaatccaaaatataaaaatgtctacattgaaatctccagtctatttaatctaggcaagcctcatgaagctttaaatatcatagtgcagtaacctcccatcaataatttaaaattccaacttgctatcaaccaattgaacctgcagaagagcataagaagtataaaacttgtttgcaacataactagcgataggtgaaagatgtgccggaatggtggtagcgagacaaagacgacaatggagcaggagcaggagcaggagcaggttcaagtctgctctgatatgcctgactgtaacctgatagagtatctgaagcattagtagagtatagcctatccaagcgctcgatttctctcctatccaagcgctcaacttctctcctatccaagcgctcaacttctctcctgtccaagcgctcaacttctctcctgtccaagtgctcaacttctctccttctcaagtgatcagcaccatcagccacataagtgtctctaattccgccagcagaataaggaatatcatctctccttagataagggtccaatgatgaaccaggaaagtagcgtgcataatatggatcctttgtataagggtccaaatcattagcagccactggtggtggcaactcatgcctaagaccaagattataggctgggtagtctctttcattcaaatacggatcagcacgaattgggttgggttgtcttagaagatgttctctttctctatggtaagaatccaaattaggatcaggaataaaaggagtcaaatttcttctctctccccgaagaccataggtacgatattccttttcagtaaggtacagatttctatggccttcttccctctgaacttctcggcgcccaagattctgatctctttcatcggatagccgacgattacgattagacctagaatcatcatgacgaaaccgagaatctctaactggtttctcacggtgtgaatgtgattctctttttctttttgggagtgagcgtggttctctcacttgctcacgaactcccttgtcccgagcagctgctgctgctggtgggcgggtggacacagaagtatgaacttcagcaggtcgaaaaagtcccataagctttctaacctaaatataaaaaattgaacatcattagcgctaagtaatgaatgacgaacactcaggacccaaaaaaaaaaagctaaaaaggggtaaaaaaaaggaaaacgagtaatgctcacttgtgggcgtgaaagttctgttttgaacttgtttttctcattgtagttttccttaattgccttcttgaaaacactctcaggcagtggaagacaatctctatgcacaatgaaccgtacctaaaatttaaaattaatcagcacaacattctaaataactagacatcgaaaagaagggtctacaggaaaatgtgtatatgacctgagcagggaatttcccaccaaaagcttttggctcaagttttgtgccaccagaagatgaagccctataaatcccatatagaagtttcagatcaaaatcatacagaaagagtttcattcctggtctgatagccaatacagtgtctttctttccatttgaaacacccatgacatggtagcggaaacaatctggttttgtttttccattgcacataaagatcagaccatcaactttttctttcttcttgtcagtctgaggggtctttttcttagaatcattttggtctttcttcttctcggtctgagggctctttgaatcaattttttctttcttctccgtctgaggacttttagcatcaacgttttctttcttctcagttggagagttcttagcatcaatgttttctttcttctcagtctgaggactcctgattgtttctgcttgctttactttattctttcgattcctgtttggcctgcgacgcttttcacctttcttggggttttgttggctcttatccaattcatcaaccttttctttgtccttttcagcttgattgctctcttcagtatttttttcatcagcagcattaacctttggttggttttcttctacagatatatgttctttcgcactgtcttcctcgtcttcacccccttcttctttaccctgcaaaactaagttattcttcttctttttgttgcgttgaacctgagggctacctttaactttttgagttttcttcccattgacagcaaaaggcttcctcaggattttcaatttagctttcaaagaatttggagtttttgttccggatgactccggtttatcagatacatttgaaggaatctccgatggaatagtaaatacttcagcagggatctctgatcctgatcctgcaggtttatcagatgcttctgtagaattgttggttggctcactgtgaaccacttctacaagagtctctgtttgttgacaagatgtttctgctggactccctatgcctttgacagatactttgacgggagactctgttcccttatcaccctttcctacattattatcttcttgttccatggtctagacgtataagctctattcagaagagcattgggacagagaagagaaattaaccaagagaaaggaaatattaaagagaagaatttttgcattttcttctccctacaagtaacacattaaagtagagcaatttactggtttagaaaagaattagaggactaaatattcgccccaaattcagtaaagttaaccaggtcaaaaacccaactggtctgattcatagaaacaaacatcacgtttccttctaacattattgaaaaaggagagataatcatttattcaagaaaaacaaaaatgaacaataatccctccgtcccaaggtcaatataaagctttcttatacagagcgtgttgtgctttaactgattatttttcaaaaaagtgttaaatagaaacaattagctactaaaataattattcaaataaaaaaactactaaaaaaagttacaatctgaacatttccattgaaaaaaaaaattgcttttaaaaataaattagttcagaatgtacagtgaaaaattatctctctgcataaatataattaggttttttctactaaaatttcctatcttatatttcatccacacagaatcaacaaaatcattgaataaagaaaaaaaattcaaagttcaactcattatctgcatacaaaaggtacaatagaatttgtcaccgtgaaaagttcgaagacctatttatagacacaccctaaacgctgagggagagatacacaaactctttctctttgctttgctgatacgaaaaaattacttttatatattagaaagatggttggctgtgttggccatattgtattttcatcatcttcctcacttccaacaaaacactaaggctctgtctgataacacttttaaaagtgaatttttgtttttttaatcaaaattatgaaaacaccatttgaaattaatgttcagtaacagattttgttttttgttttattaatatgaaatcaaattcaaataaattttaaaaacagatatttcatgattctaaaaaattttaaaatcactttttttcatttccttctctctcttgatcgctcgtcttcctcgctcagcagttccatgccaaaaactcatccatggcttcagctattccaggtaaaaatctctccctctccctccctccctccctctctctcaaattttttctaggtttgaaaaaatct

SEQ ID NO: 161370 - DNA, 4320 bp, Cannabis sativa
  modified_base (3861)..(3862): a, c, t, g, unknown or other
  modified_base (4181)..(4183): a, c, t, g, unknown or other
ggcataaaacccaacagataaatgtttctttatgcctataaaagcttccttgcattcttctgttctttcaaacattttattgcctcgtaaaacattaaagaatggtagacatttatttgttgattttgaaataaatatgtttaatgttgccattcttcctgttaaggcttagacttctttcagttttgttggtgaaggcatctctattaaggccttgaatttttctagatttgcctcaattctccaggcattaactatgaaaccaaggaactttcccgaggaaactcaaaaagaacacttcttcgggttaagcttcatattgtaatttgtaagtattccaaagcattctgcgaggtcttttgtatgatcttcacattttaccgactttaccaacatatcatcgacatcgacttccatatttcttccaattttcttttcgaacatcccattcactagtcgctgatatgttgccccagcattctttaaaccaaatggcatgactttgtaacaacaaagtcccatgctggtgacaaaacttgtatgttcttgatcagggacatgcattttgatatggttatatctagaatatgtgtccataaatgtcatcagctcgtgtcctaaagttgcatccaccaactggtcaatccttggtagtcgaaaacaatcttttggacacgctttatttaagtttgaaaaatcaatacaagtcccccatgtgccgattgatttcagaacaagaataggatttgaaatccatgaggggtagaaggcctcatgtatgaaatcattggttaataactcttccacttcttctttaagtgccccttgcctctcagaatctaagagttgccttttctgcctttttgccggataatttgggtcgatattcaaatgatggaaaatcactttaggttcaatccctatcatatatgaatgggtccaggaaaattgatcctagttttcctttgaaaagtttgttaactgctattttagtttttcatccaaatttttcccaataaacacacatttaatgggattgtctggatctaaaacaacttcttccagttcttcaatttgtttttaactggtttttctcgtcttggattctagggtttagatcctattctttcttctccccttcttctgttatgaccaccattaattgatggttggctcttatattttgaagttttatgcgattacattcacgagccaacaactactcgcctcgcactacacctacttctgctagtgtttggaattttagagataagtgtttgattgaattgactgcccagtccaatcaatgcagggcaacccattaatatgttataaactgatggtagatcaacaactaagaagtcttgcatcaatgttgtagataatggtggctctcctacagttaatgggagtccaatgatgccttgactggcgacactatcatcagtaaatccgcataagctcaccatgcaaggttttttaactttgcattttgtagccccattttcttcaacggacctttttaaaggatattaaatgtgctttcattatccaccaacactctcttgattctcttgttggcgagtgaaactataatgaagagaggatcaacatctggatacctcacatgtttcgtatcttcactactacaaataatcctttctatgtccctttttcaagtccaacaacaatagttttggacataaatttttttagagagttttctagtccaatattattggagtaggaaaaaaaaattcatgtccaataattttaaactagaaaaataataagggacgtgatatatatatataattttgaaacccaaacacacacatgtctagtccagctttactggacgtgtcattcattaaaaaaattatcaactttattttttaaaaaataaaaatagaaaaacaacttattacacacttttataaatatattgcttattgttattatatttattacatataaatatatgtctttctctttttttaaattctaaccctaaaataaaaatcctacccaaccatctttttctctcactcaccaactcattctctctttcttctgtaggtgcggcaccgaagccaagtaaaattctcggcactctctccgacatcactctctttgtcatcccgtcgatctctttgtgatgtctcttcgtccgtccgtctcttcgttccgcccaatctctctatctatctatcattccatcaccagcgtcgcctaggtccgtccgagaccactaccatctccatatatagctgatctctctccctcccatttgtcttgctcgtctctctctccctgcgcagccaaggttaaaaatccaagctccgcctctctccactgattcggtgttcaatatatatatctctatttttctattttcatagtttctctctcttatttgtgcaagggttgaggcgtgggtttaagaagatttgaactccattgtggttgcgcgttgctcgctgtcgacggccgttgttggcagtggttcaaagttctattgttgtggttcattgttttttggtcttgcagtggtttttttttttcgttcttgttgttgtggtggtttcaaatctaagtagtttgcatcaatgattcattttgttataaaggaatttgtgtaatgtttttttgttcattatttttgcattttgggtattttgattcattgtccaatgtttgtatctatgtaatttaaatttttttttaatttaaacttttatattttgtatatattttttaatgtaattactactactttttaataatacgttaaagaatggtaacaattaaaaatattttatatatttattgatttatgtatagtaattgtgtaataaatttatataaggctttaaagtataaatatagaaattgtttaatattatttatttaaaatatttattatttatttttttaaaaatagagattattgcatttcaagtccaacaatggtggacattaaacaccagtccactttgaagtctagttttgttggactaatgttggacttgaaaaatactctttttatgtccctggatattatatccaacacaaaaatataattagaggttcttctattttgtcttttttcaatggttctggagcaaacaccaattgctcattttttatttcattgacatatctattatgggcattacttctctctccagcgagatgcggccctcccgagatgaccaatatatcctcgccctcaacaaggggaggttgcaatctttggttatctgggttgttgggctgattaggccagttttgctcgttcccctaatgcttcacatatttttcaaaatatccacgagagattaggcactctatctcgtcctttagctgccaaaactcttcagttgtatgccctatatctttattaaatcgataaattcttgttggatcttttttgtgtctcgcatgtatcattggctcaggtttgcaaaatgcaaccctatgctcatcatcaagaaagatgttttcacgagtttcattcaactcgatgtacatggagtaaattggcacatatttctcgtgatttttttgttttttcttatttttaaattactctcttgagtcatcttttcttttagtatttgaactgcctgaattatcagtcttcgtcgacacggtacttgttgtggcagtactagtgttgggtttgtttcccaagccagtcttgagcaactttatctcatttcttgcttcctctttacaaacaaacacttgcactctttcgttgaattcattaatatttctcactagacaaccctataagtattatgaaaattatgaacagtacgcaagtgtaagtaatcaagtagtaaactcacacanntgaggtcgaaccacagggaattagattgaataccactagactaactttatgattctatttggcaaaccaatagtttttatgattaaaaacagaacaataattcaagaaacttaagtagacagataaagaataatcaagatgacaagatagggaagagaatcctgttgatttgtttacccaattgttaatgcctaattgatatcctttttcctgatgtgaatgatagattataaaatttagcctaactcttttcagatcttttaggttctaaatcacatgctctctaattaatctcttaattagaatcacatgtaatcannnttaagcaataatctaagtgtcacagagatcacggaaatactttcatttcacataagacctagattatcgaattttagcattctcaattctcacttttcagatttcgaattaagatcatagaacatgtagaaggtgat

SEQ ID NO: 161371 - DNA, 10614 bp, Cannabis sativa
taaccatattcagttgttccaacaggtgagaaggaacatgaataattttggagtcagaaaggtaccaggatgtagttaaatagagattcacggttattgagattgataggagaaagtttcaggaatcgtaacagcttggaaatttcaaattattcaataattcaagaaagtgggttcaaaatttggatatttctgcagggtaaactctatgattgtcaattatattggtgacagcagcaaaatttcaatagcattttcttctcacacaatgttgatgatgaagaattaagcaatccaactatgaagatagaggatttcgttttgcaaatatctcttttccagatagattcagtgctaaggtggaaatgagaaagatgacatgataacattcaagtacaaaatctcgaaagaaagaaacatggtccatattcttaaatttaaggtagctaaaagcctttcctacaaaaacagtatcaatctggttcaaagattgagttgctttgtccaacttgtattttactcttgtatattatttcttaatgagattgctgtcttcaacaatgaagaacataacaagtagaagcagttggactctttcaaaactgatgttgatgtgtatgcattttagattttaaagagtttctccacactcgactacgtattagatacttgggattacctgcagatttattttaagcttgtttgttgtatcttttagagcttttacacaatatattttttgaagtaaaagttaacgtttcttttatatcaataaaaaaacacaatttccttgatctttgaagcattgcacagaaacatacataccttgttacaataaatagatagaggtcgatatacaagacaaacttctggatatataaaatgcaataagtacgaattccagactacagataatcattaacattacaatcacatcagttagtttggaaaaatgaccaacaaacttcttaaggatgacaaaatgaactcatcattctttgaaaatactactttatagtattagagattaattagtaaagctctttactgttttgtgtacaaggaaactaaagctttaaacaaatatcagtcatatttaacgtttcaaaattcagccattctatttcagaaatattcattacagtaatgctaacaagtatgctgaacttacatgcctagagagtattctattcacttgtatgattgtatccttcatgctaatattagaaagcacaaggaaaggtgacaattataaatttctcacacttaaaatcactcttagatacatcttcctttcctaaaacttaatatagttgatatgctactaaattcaccaacatagtaaatttcttatgtttctttgtcgtcatcatcgctgtcaatttgtggatgattcattctcttctcattggcattgaaacagatcttgaaggtttatttccctcaacatccagtgcagcagatgcaggtactgaaatacttggtcgaagaagaggcgaacctaacctacttgaagtttcattcgcacttacctcagagactggaataatagaagctggctgcatttctattccattatgtgtagttacagattccgggtgatcatgataatgattatcatcatattcctcaaccgagattactgtgcttgcatccgtgtgtatagtagaatcatcattgaacattccgagccttcttttcctcctagctgcctttttccacccgtgaattgtctcccttattctgtttggtataagggctgccttataatttgttcccatctgggagaaaacaaaaattggtaagcagttagaatttcagtagctgagaaccaaagcagcaactaaaacaaattttctcacaaacaaaacacacaagaaagtcatttctgtatccagatctttcactagcggtactttagatgtatacattttttttcctttgctaagagtatttagtcgtccaaagaagaaagaaccttcttcactataaccatatgcaaataatcatacctgagttaccaatgcatacagtggcaaggtactgtaactgcagagaaactgcccagcaaacctacaagtgaaatccagaagattaacacaaatgaccatttaacctatcaagtagattacagtgacatgatgaattgtctgcataccccaaaatcagtcttaaatacacaagcaaatgattccgaatgaagcaagaatcataaccaaattgccactgcaatcaaattagtgaagaagataaaaactagttaaattacacaggtttcacaaattttaagcataacatgactgttttctgtaatattggcagtaggaatggaaaataagtacccaaaaccaaaagaacgaagccagttcaaacgcgttctgcaaaagagaacaaaaagaaattataaataaaacaaaaataattacactttggctaataagactggttagcttgtacaagctgtaacagcaaattgatgatcagaaactccaatgggtgcaatcatagtctcatagagatcatagctgacctggaatagaacaaaatggatcagtgttaacagaagctctggcttcttaaaccagaaaagatcgtcccttggcctcatcctttctccatgaagtcttaaaccagcattctctagtgccagggttgcaatgatatgctgcagctttgtgccaattagaagaactagctgcacgtgacaatattcaaaggttatcattgctgcagcatattgaaatgtatggtgctacaccttattgaaaaaggaaattgagattcaaaacttaccgatattggaatgattgcaatccagaaatataggttggaacctgttataaggtacacaaaaggggaaataaaactttcagccaaagaacaatctaatgtcagcaaattgtctacagttaaaacaatcaacagaatggaaaacttaatttgaagcaactaagtttgtatcgaaacagttattttaatacaagaacaactacctatatgatttcattttaacactgtcataccttttatattaaacagcataaaagcaacaacaaatccccatagaagaccactgtaagatttaaacaaacaggtatcagctgttaatttcttgttacagctttcccacattagttaacaaaaaaggtaaataataacactaaaaaacagtaaaatgttcgaattgaactggtgatgactatatttgtttttttttttttctgagattaagcactttaaaacaggattaacataaggcagcttcaagacagtatcttaatcccaccaaccatcatggaaccctcgtcaattttcaatcattgtgattggttttttttttggttattattattcaccttagagagtgaaatgaagtttcttcacaacagtttctcttttatagtatagacttcacaaacagtactacagttaaagggtttactgtttgctgattaagctagagataggagctttttattgtaaactctaactttgttgttttatatattaatatacgtgtctagtttctttttcaaagaaaaggtagtagaccttcacaagcacaattagatgaaggtcatataatttttaatcaaccatttaatctacaaagagccgaggagaacctgtagaagagtgtagagactgtaacctcctatgacatcttttgcagaatagtgaatattagataactattgagtgaatattttggttgcaatgtctaccagaaacaacttgttataaagaagactgttgattacctcacacccactatcctttggaactcttcttccatggatcgaatcatatagctgtgaaaatcatattttggcgtgaggttgtgattctgcaagaaacacacaatcaagtagtattcaaaaagtagtatgcagatgtgaatgacaatctaaagaacacattaattgataacaactcaatgaaatagaaaattatttataaaagaatgtagaacagttcagtgaaaacttataacactctggatctcgcaacagaaatggcactattaagatctgctaggaaactcgttaaattttccactttaatatcctaagcgtgtataattaatgcatttcttaacttcaaattatttgacaaaaaagccacatattaagatgcatggttgacagaaattaataaatatgcattgaggaccagctcaaaatcaaatgatactttgaagaagtgaaagtggtagttctctgaagcaacgatgatgcataccattatgaaaccattgcgcaaagtcaagtaatccgcacgaacaactgaacgtccaaattggcggaagaagcatgtctgcatgacaaagtctgcaacttcagtacaaactaagaagtttgacctactctagaaacataaaagtgaatggaagatccacatgaacaaataaaacatggctctacttaccacccaaacgagaaaactattttttaccactggatttgatgactgggcttttacaaaggttacttgtctccgcattgtcaactgccttgtcatctctggaatggaatatagtcagttaccatttgaaatcttcataaaagggaaacaggtttgcttgagtaagcacactgaaaaggcttataaaaaatgctagcatccaagcagatgtaaggatccataagtttgacatggaacactcgataaatacagaataagtatcacaatgagagtaacctgacttttacttggtcttcccaacaacatattaagcttaccagttaacgaatcatgccgctccaagtgtgcctcctcctcccattctctccaactgtgaatctggacatgattacagcatcaaacaatgcgctaacattagaattgtagttttcactcaaagtaataaaggaaaagaatttcatcatttccttcagaaagcaactcagagatggtacactacaaacataattaagcattcagcatagaagaaagcaagtctccttggctgatattaattgtaaaagcaacattttttttaaaaaaatatagatagaacaaaatatataagcttcactgaagtttatgagagcaagcataaatctccttatctgttttctaccagatctaatggcaagtaatcaggcaaactcataatcaggaaatctgttatgctataattttatctgctggactaacttagctggcacaaaaagatacacaaattctgtcttatatatgccctctttgtaacatcaggaaaatcaaaatctactattatcaaatgcaattcgtcacacaagaaaattgttaacatgatcaaattaagaaataataggagggttttaaggaaaactcttcaaagatgttcaaaactctcaaattacgtttactgaaatattgtagagaatatcttaccttaacaatagccagcaacatcgttaagcaactgtaggatacatgtgttattgccataacaaagatgaagcgatgcaactgctcaagaccttcataggaaacaaaaggctcgtgaccctgacaacaagagtaaattttcaatcaatcttcaccatttcacaggtcccatctggtccttgaaaaggcaagacaaaaaattcttatcatttcaatatattcgtttctaccttttcggtatattattttcaaaagcaaaacaatgcataagaaaaactttacttctcaagaaaattactaatttaaagataagggacatgcctttttgcaggtatttcgatcaatgccattcaatactctcctaactgtgtgtactgaagacatcaatagtttgcgttcatgggaggaatgatcctcattctcatcatcaatctcagatcttttacatggagcaaaagcactattatagaaccttgaaggaatgcaaatattggctatcaagcttgaggtagctgttaaaagcagagagataaacccaagcagcatcaactctgtcatccaagttaaacaggtaaaaacttatcagtgacagctctaaaatatatgaaagaaactaatccatttgcagttcactaatcaatcacacataagaaggaaggaattccatgaatattgacatgtttgcatacaacagatcagataccttctttcattttctccaatgcttcaagcaagggttttctcttcgttttccgtaaccactgaaacaacagcacaaagaacctcaaaataaaacaattgctgatatagctttaaaatcaaatatatgaaattggccaaaaaaaaaattgatcatacatgaaattagtaatccatcagcacagtttctaaatcttgtgaagctggctaatcacagcatgaacacctgactctatatttataataagacacttgattcaagttgagttgacccagccataccaaaaaataatgagatagtaaaggaccattttttttttctatcaagtaatctagacgattccatataataaaaccactcaagagctagcaagacaagaaaacagaaaaggtcatccttaatacaggtttgcacgctagatgccatgaaaacttgaaaaacaaaattcatcacatgtcagttttcctaaactgtttaacacagtatggtttacaaccccattaaggttaaattgaatcaagcaacttaattttttgaaggagctcaacacagaaatggacaaatgggtgccttagcagtacagaaaccttactagacacatatatagggtaaaaaaagttctcttttcctccactaacaaccatattataatacaaaaatgtaagagtgtaggctaaagactagcttaaaacatacctgattaaacagtaaacccatggaggaaaaaagaaaaagaaaaagtgttaagagtgccacttacggtgcttaaacggtggatcgagcgctccacaagcaaagacactgcaacaaagattgtcaagacagtagcaacagaccatgttggagtcaaggccaaagatcgcatttctttgttattttcctccattttataaaatcccctcttcaaacactgctagctatttcttttctttctctgaagtaaatcccagaagataaaaactaataatgccctttcccagttggccacaattacacaaacagaaccaaaagttgaaaatctatactatatagaccatgaaattttgacccaaaactgttttctgcactgtatgaataaatagaccaccctatattctaagctatgggtgttctacagctatattatcagaacttagatacaatacacaaagcatcacaaatatgaactcagaaaaaggttttctttttttctaccaaaaaccaactaaagtagctttctctaattgaatagtaaccacaaacagataaagttgttgttttgagtaaaaaaactcaacaaaaatgaacaaagctttccccgtttaagcagatctttttacaaattgcaattagaccctcctccactctccagaaagagaaatcctttttgtaacccaaaaccaagaaggttgaaggaacaagcagttccctgaaaatggcaaataatcaaactgctccacctactctctatttctctctatctctaataaccgggctttaactctgtatgtagcatctgtttgttgcagtccgaggaggaacagctttttctcttgttcacattgtcagaaaacggaacagaatcctgaaatatcaacctttacgaaaacaccacattgacctttgaatggatctctttctcttcggaaacgcagccagaaaataacgatagaaaatcaatgaatttccaagctcaaagtagtagctgattcttacccaatgcaaaaactctctcttaactccccttcggttttttattttcctaataaaactagtccataaagagaaggaacaaaataactgaaacccaggaacggtgattatgtttacatcacaatataatataatggtattataatttatatataatgcttctagaagttttgctcatatttacagacaaattttcggaaaaaataataataatagaaaatataaacacagcattgaccttaaccagacgagatctcaatcgcaatctgtgtaatcatttttctttttcctaaatggacttaatcctgattataaattataatttttttttttttttttagtttttgtctcatttaattctaatttgtataattataaattcttatttgcctaaaaatttgatagtacatattcagccattccgctcgtccataaaaaataaatatactttttatggcataattttatcagcacaaatagaaggaattttttttctttcaaaatttacgttcataatttgatagttaacttggattctctattttttattacaaattaactttgaaaatataattatcttgtctcaaattcattaaatcagcttctaaaatattaataattgttcaaaaaaaaaaattgagagaaacggctcaattattcttattaatgataattatgaaattatttcaaaaaaataaattatggaattaggtcccctaagaaaataatggaattagacagggaccggggtaaggcgaagattacggggattgaataattagaaagggcttcaatactaaaagaaaaataacagctaaaagaaagaaaaaagcatttatatttatttttttattttttaaaaattaaaatactaaaagcattttttttttaaaatactaaaagcatttatatttattacaaacataattattacgtgtattcatataatagaataatactacgtgtaagccttgactccttttgtagctaaataaaataataaaataatatataatttataatataaatatttaaatttaatttttaaatatataaatatataaatattaaaatttaatttttaacgttataaaaactataatttaaatattattattaaaaaaaattaaatttaaatatttataccataaattaatccaaacaaatattaatgcaacttctctaaagtgtaccaactatcaaacatatttatcgtaccttacttttttttttcttgttggaatatataaggagtttgtaggtatctattatgtgcgttcaatgttttcttggtcttaaaggtaaagaatatatcatttcacatttgtttatccatttatttatcacatatattctttgtttttatcattattcgttttctaaagaaataaaaaacgcttttttaagaaaaagaaaaaattgttatttgagaaatctctttgtccatttattttttcaataatgaatctaactaatctgaaattttagacatataataaatattcgaagtgcaaactgtaagaggagacaaggagtgaatcttcttaattatttacagatttttgcaacaacaaacaattgaataaaagaagcacacacgtgtgcatgtgaagcacttgcttagtcagggtgtacaagtacaagtataatataaaataaaataaaaatacaattcaagaattatatatatatattttcacccctcccaattataaggaaagaggacaaaaagaagaagaaaaaaatataagaggacaggaaggaaaaaaagaaagaaaaaagttttcctcattaaattgaaaaatatatatctatctggttatcatttgtagaaaattgacaagcatatagcaatagcagtacaattattaatatttttatcaatatcaattaaataagagtttctgtcaacaacaaagaaacctttactttactaaaaagagctctctataaaatatatgtgattcattttgattatatatagcttttgtagtataaattaacaataataatgaactttatcatgtatatatagctaataggttcgtttcgcggtatatatgtaatgtgtaacacggataaaagaaaaatcaaagtagtaactaatagtagtacacttgtgaatcaccaaagcaatagtactagtatatatatacatatatataggactcatatttacttgaattgatcatagaaattagaaaagagttgaaaaataacaaaagaaggtacatatatagacaaagaaaaaaaaattatataccaagtcatttttttttccatacatatatacgtcattttttttttctctttttgacaaaattcaatggaggagacagctagctagcttagttagctattttaacaagttgcatgtgccttccattatggaggattttatgccatcttcaacgtgtttacgtaatatatatatactcattactcaatcaaccaatcacaggccacttatgtagtcctctcccctttggacccacacactgtcatattcaggttaactaataattcaattgtaatttgagtattcctttcattttcttatatatatttgaacagaaaatgagaaaaataaattgtcaccgtatagttagaaatagaaacccacgcgtttacgttactatattacctcatctttttcaccaaacatgcatattagacagtatggcaattggcaaaccatatctggggtcatactcatggagtcatatatttatatatatatatatatatatactaggcggcaactacgtgcgaggcacgtgttattttattttttgtaatttttttatctaaaatatttaatttaataatataaatattatttataa

SEQ ID NO: 161372 - DNA, 3529 bp, Cannabis sativa
  modified_base (3475)..(3485): a, c, t, g, unknown or other
gacctagatgcccattttttttcttaaactttgaccatatatgcccattttttttattcttaaaaaattattttgcattaattcttttattattattattgaaaatccaataacttttctaaaaaaatttctttcttaacaatttttgtttacttaaacattattcatatttaaaatctaatactattatgttaccgaaatttcttcagttaaacataaaagacgatgattatgcaaattttttatttaaatcaacaaaaaatatattaattgactaataatatactttaggttagagttatttttttttttgaaaaaatttattaaaaattatttaattttttatttctcttgtaaaaggagtcatgatttaaaagtagataatgttaaggataaaaatattaattaacaatatcacatcaacttttaaatgataaaaagatagaaaattaacaaaagtattatatttcttatatagaagagttcactaaattttttcaatataatatatattttagagaatataatttaataatattgtaagtttagaaaacaaaaatattaattatttcttaaaataattgtgcttcaatatttttattagaagccaatccacgcgcatgcagcaatcccagcaatcccactattgtgtgtatatacatttatatatataaaaataatacggtgtgccggactagctaaatagtaaatacatccatatttatatatagagtagtaaaaaaaagacaaactgaatatttatagataaatataaaaaaaataaggacatgtatgaaagattaaaaaaaaggagattgatgacaatgacaaaaataaataattgtctcactgtttatgatggtaacgatgaccgtcatacgatcgatctgtctgtagacaattatagaaaatgatgatatataaatatattgacaatgaagatgatggtgaacttgacaatgaagttttcgtacttaaacacttatgtgtgtcatccaatggtgacttaaggaataatagtagctaatttgaccacgataagtgcgttttgcaactagttgatatatagtattatatatacatatgtattaaaaaataaaaagatttatttgcatttatatatatagcttctcataaaagcctattgttttcaaatgattgaatatatatagtcaaagtaatatagaagcatatattacatgtaaaaaatgagattagaataaaacaattaataataatcatggcataaaataattaagctacgcattatgagattctctcattatatatattatgaataaggagatcctaagaatccatcttcccttttccacaaaattttattcggtctagctagttgattgttaaactttctattggatttagaatcaagatatatatggagattatcattttattaattatgttctataggttattaaacaatgaataagaagctttaggccgtagttaaacaagtaattaattaagaataattctactagagggaatggtgctttctatccaagatattattctgaatctccaaacgtttattactcaacaatcacgaattaaaatttgatccgatctagaaagttgttatgtgctgacgaaagtgatgatcaacatttcacatatatatattatactaattaatataactaatcttatatatatttcaaacacatgattctcgcgaagtttttggcttttgtttccaatcttatgcttatttggttgatttattagaatttaaaaatgttgattaggtcgatgacggatcaaaatatcaaagtttattcaatacgagttggtctaaattagccaatcaatcactaaagtaagacttagtttagggaagaaaaataataataataataataactagggtttataattatattatatatatatatatatagagagagagagagaggtagctagctagggcaggaccaccacaacgttgtttgtatagaaatcccatgcgcatactacaaaaatatcacttccccaacgttaaataaaaattagtttaaattaaaataataaagagagaaaggaacaatatgggtcctcatcgacacgtatatcatatataaatagcctatatagaagacaatatataaaaataatatatataatgagaaaaagaaaacagttaggaacaaatgccaagacaattgcctcgaagtgattgtgttagggatcttgttccctttcccttttcaaatattagcttaggctccgtagtgactattttaccaccccataatcatatatatattacataataactaatattttctaatttatatataattaagcacaaccaagattgtagggccgatttggaacaacaactccttgcacttgcttatgcatgtctcttctaggatacctacatgggagattggggtgaactcaacgaagagattgtcaacaattttcattttttaaaatataacacattttattcaaacatggtctttgaggtctttgagttgatgataaaaattaggctggatatccgatccaatttaatatttttcttctagtttaatctaattcaatccaattagtaattagatttggaaaaacatcattcgatccaattcaattagtcctctaaattcaatccaattactaataattggattgtatcgattttttaattgaatgttcaattacataccaaatttttaatattaactttaaaatatgaagaaaaaaatatgtaaaagttaaatatcactctttatttaagtttaatactctatatataaagatatcatccttacaagtttaatataaaatttaaaataattaagacaacactgtcaagtaataaaatagaacaaaatatgaaaataaatacacaaagttatgaattaaaaaaaaccgctaacaacatgtatatatattttttaatattgttattatatataaataaatataaataattgtttaaatatatagaaacgtaattgaattggatctatatttaattgaattttgatattgatattcactataatcgatccaattcaactaaaatttaacttttaatatcaaatccaatgatctaattataaatgaaaatccaattttttataataaaattaaattagatcaattagttcaattaaattaaattagatgttgtccatcctaataaaaacaacctaatctaaatattaatcaagtatagctaggcaaacatatgttaacaataatgttgctgatttgtcttccacaatgggaatcgaccacttataacatagttgctaagagcgatatatttgtgattttaaaaagtaactagctaagacagttgggaaataataataataataataataataataattaggatttttgtcctctaaaccttaatatgtactaaatcatgttttctaaatttttatggccgttaaaagttccccctaaactattaagattgttagatttnnnnnnnnnnntctaatttcatttaattttactatttcagtgattgtttatgtac

SEQ ID NO: 161373 - DNA, 6014 bp, Cannabis sativa
atcagttagaaaatcgacttccttaacatgtataatatttgaattaatttcaatatacttgtcaatggctaagaatcatgttatggtctaatgtttataatgaataaattgagtggttgaattacgataagtctaataagaactttttgaacaatgtcttctatacagcaatggcggggtgctgtgtttggagataacaatgcatgtcactttattattgtattgatctacttgtgaaagagaatattaagacaaaagttttatttgttaagttttctaaatattcaaaaatggagaaataaattgtggaatgtgttaagaatttataaaaatggttggtttgaaagaatatacccaggatttgatatgtaatttgtgggtattgattaatgaattctcttgataaaaaaaatcaataaattttaaaatatatataaaaagaaagaaacgtgggtagtactattccacaatcacacaatcctttttgtatgtttgagtggggttatatatatcttttatatatatgctattcaccaaaggaaaatgtggtagtcctatatatattgtgaataatgaatatattcactcaccaaaagaggggaaatcagtgaaacaagatctcattctgatctgtaccactcacatatatgaatcttcccgtatagaactttagggcatatatataaatatctcaaatatatatatagcccataaaagtccacattgccataaaacatctagctagccatatctaggagctcaaatttcttctaaccctaattttaggcagtgccactactattaatgtttgaagcttttcattattcattatacatgccttttagaaaaaaaggaaaaaaaaactttatctgatttgggagaatatgtaagaattatttatgattggtctggggagagggcccccaaagccaatattatgcttagtataatgtagagattgaaatacaaaaaagaaactcaatccaagtcaatgaaactaatcatcaagtttagcaaattaagaaaatgctggctttttggttgtatatatctatatatatatatgtctttttttttttcaaaaaaaaatatatattatatattattacatataactcacaagcttaattatgacatttacttgtatttttataatattaataataagttatgagatacttgttcatatattatttgattattttatgtttggccacgtactatgctattaactattaagaagtgtaaaaaaataaaaagtgaaaaggagtactgaagttgaagtttaaactatgtatattaggtgtacaagtgatttatattaaggaaaataattaattagtgatatttggttaagaattagactcttttttacttgggaatatatatatttaattacttgtcattggagcattggtccctcacaaacacttcatgtcaattaatttgtgattatgattattatttttcttctttttcaccttgcctttaaatcttggtcattattgagtgtttttaatgatgagatatgatttaatccgccaacttatattttattttttcactttaattttctacttttgcaaactatatatatatattggtaaaagatttagcaatgtaaaatagcatttgattgatttgatttgttttttccatatcttgcatgaaaatccattgatctatctctctttctattcatatacatctttgaaaaaattagaaatatatataaataaatatgtatgggtgatataataatacatacatattgttgaaattaccttattaggccgtaaacttattttaactcaatatttatttactttgggtttggcatgcacagatttatttttaaacaactttctcaaaaaatctcatactaataagtaggtgaacactaattatattcaagaattttttcctattttctaacatatgggacttcagttgatcgatatcccgataatttttccctcaaagtaaggactacatactcctagcctctcctttagtgaaattatcttgtattgtgagtcaccaacgaaactttttgcctgaccatatatcaacattgtctagttagaagacttgatcaactcaaggcactaaatacagatttccatttggtaccaatatgatcaccaacttaattacccaattgacaagccttatagaattttaagtgtttgagaggtcaagagtgttttactaggggtagaattctacttaggacagcaggagaggattgatctagcttagaatgccatgtattgatatcatttttgtggctaattaatgtggaaagtaactagctgggaatcataagaacaaaaaaaaaacgacattgttgatatcaaaattattacaagaggattcatcagttacatttatacgatttttatgacaattacataacatagcagaagttgtaaagccatctctaaccgtccctttcagcaacaccctcataatttacttgttcttaataaaacaataagttttatgaaactcaaaataatcattaattattatctttgattagttggcaaacactaaataaattcttggtaatggtaatagagtgttaggatttataccctaaataaaattctaaatcaatgtaattttattaatctatcaataaaaaaaaaaagagatcattttaaactattatcaattgcatggttcacatgtttattttatgattaattctataatatataaattcagctaaatctggcccgaacatatagatattcacaattatagtgttgtcaccaaagtaaaaataattgtaattatatgttttaaactatttcaatcctataatttattagtacactagatatacactaatatgataatcaacgataaggtttactcgtcttttcaaaagcattagtaaagcaaacaaggatcaaatgtataggtttacattggactgaactgatcttgacaatagaaaagatatcatatacttaccgttatatcttttccaattcaatatcacttagttgatcataaatctattaatctcaatcatgagatgattaagctttaagataattatattattagagttttttaatttgttcattaccatcttattacttgtcgaactagctcatacttacatattaggaacttggtaatacaattgagtgggagtgttaatcatagatatggacatctataacttctataattatttataagtgaaacgataattttctataagcttagctaaataagattaaatagtagagtactcatttcagtaattgtattagtttactaaaactttatttacaagtagctaagtgtttaaatgataaaatacattgaagagtaaaacggtaattttgtctctaatcgatgtagaccatctatagaagaacattgattgttttgattgtaacaatggataatttatagtgtatctataatgtaaatacatagtgttctatgtaatcaagagtgaaattccaagtctatagtagagtcatgagaaattaaaaagttggaaaatttaaggggtaaattttagattaacttatttgaagcttgattatataagcccatggtccccacaatacctgtgataatatcatcttgtagaattcaattaattgatttggaaacagtccaggttgacaatctggacgctgggcctagtgccaggtgtcaacctgggcgctggatttagtttttggccaccagatgactctgtttgatccaaggaaacacttgtatcttaatctttggtgaaaacggagaatatgcttagaagacttctcagaaaaattccttgaaaatggcccaagttgacaaagtatcaacctgtgtgctgggccccaattttgacttccagatggctccatttctttcccgaaagtactcaaatcttaattgttgacgaaaatagaaaatattctcggaagactttatctgaactgttgatggaagtggcctaggttgacaaagtgtaaacctgggcgctgggtccctgttttagcctctaggtcgatatgtttttccctcaagggcacttgttttctcattttggatgaagacaaagaaaattcttgggatagttcttcagtattgtagttggaagtgccccaggttgataatatgtcaacctgaaagtgctccagttttgattttgttgcctcaaatatatctgtgacaggtcttatcaatgtcccagtacaaattttaactcatttacactaagatgggcccaaaaactaaaaccctagcagggttgtcaacctcgtgttgggcaccggggtcgacttccaggttactgtttcggagttcccagagtcaacttgggcgcagggctaaagacccctcccaagtcgactgtcatgactcgggactactcaagtgcgagatttttttttcttgccacatgtcaaacattgatgtctaagtcactagggtcaacttctaggtaaacatatgtataaatattaaatttttgaaatttattaaatatattaatggaaaattaaatttaagttgaaaattaatgtttaattaattttagatcaacctaaattaagcaattttcaaaatattcatttaaaatttatactaaggatggaaaataaattttatttattttttagataattctaagttagtaatttaaaattttaaattatatttagtctatctaaattggtaatttttgtcaatagattaaaataaagtaataataataaaaatatactttttcttcaaataatgagctttatttaagaatatttgatcttcattgttggtattcttattctaatggaaccttgaaatgctttgaatttgtcaaatggtattttacaaaagaatgacttaacaacgttagatattgaaatataagtatttataaattaaattcttgtagatttactcatacggtgactactagagttggatttatagatatctaaacattggtagaaacacataaaataagaatgactttgactcttacttacccgaacatcattaaaaacttattttgatctaataacgaaggcacagtagatcactatgggaagtgactctagagatgaaaaaaatcaaattctaaaccaagaccattcaataactgaagaatggcatcttgatcaggaataggtgagcatgctactgcaagagaatctacaatcgattggactttttctacataatatgaaattgtgagaccccctttgcgaacattagagaactcaactgtcaattgaaaaaggcaagcctttgattaacttgaaaacttctgttctagagcatgccatggagaataagagatgggaaaattagaaaatgaggtaagaacaccttcagtcattaatgaacgcagtcaagacaataacaggtgatccttgtgtttccactggccatgctcaggattggaatcgctattgatcaaggttggcagtggaggaatgtcaacgaacaagatttcatctaggtcgtgcgcaatcacggtgggagccacttatgatttccatgtgaaaaagttagtgcggtcgagtttgatcatcaaggttgaggtgatagagcatgaaaaaggattctagatggaattaatcagaatcagcgttgcagtggtggcgtgagtgaggaccgagcaagttgcaagacctttgcgagctgttttcgaatcgatggaagtatattccataagcaatattagtcaagagcagctaataccataaaaaaaattcagagaaaatcaaggaaatttagagagattttgctcaacaaagcttaccttattaattgaacaaaataatgtatttatacaccattacaaagacttacaaaagaaaagttaatgagaaagctttatgctttaacagtaaattgaaacagttaaaactaataactaacttcttacgaaattctaattattatttttatatctattctatataaagtatacctatataactgaaattcttggtttttgagaattttatgggtgacttttaattttt

SEQ ID NO: 161374 - DNA, 6006 bp, Cannabis sativa
gcataataatacctttactaagaaaggaaaccgatgttctctaatagccaccattttaacttgtccaagagctttgctcttgactatgtctatcaacttagcgactggtggcatgtatctgtattccaatccaacttgcaccagcatatccttcctctttttagcagcatctacaatctatttccaaacacattatttgtatatgatccatataattaaagaaactaatagtccaatccatgcaaagtcaacaataggcatagtattttaatgtagaaaagctaagaggatgagtaatccctttctgtgtgcacttgcttttgaactcttcaaactttttagtcacagcaatactagtccaaagatgaaacatattcaaacaacaaattaagcacaaattgaataaaggctaattcatgttgctaaatgataaacttacctctttgcagtgagcaacagtagtgcaaaggggtttctccaccagtacatgatgaggtttgaaatggttaattatgtccattaaaatttcataatgggtcatgtttggacttgacacaaccagcacatcacacactccactgtctagtagctccttgtgtcctgtaaaaaccttgtgaataacaagtcttataaattagagtatcattggctctctcaaagtaaccaaaggctagcataaactagaatccattcatggtgttacactccacatcttttaaacttactaatcagaacaattgaagtatgacagaggttggaacatacctttaaaggccaattgtaagactttgctaagtctagagcatggtgttgagaaggaatatgtggatcagctatggctacaacggcaacatcttcagttcgaagatggtgtaaattgatgaggtgctcacgccccatcatgcccacccctatgattccatacttgataacagaattagcggccattttttatatatatgaaagctctcgttccactttttctacctgcattgtatgaagaaaattaagttcagtgtttttttttttcttttcgccttcacttatatttaaacctaccaaaacacacgtactaatgtgtttttgtccataagagctttatttatttcagtaaatatacttcaaaatctttgttttacaattgtcaatttatgtccaaacaaacggataacaatagctgtgagaacttgatggatcaaaccagaattctaatttatcagaaactaaactttgatgtatcaaacgatagctcagaaaaaaaaactgctgaaagtaaaattacacagaagaaatcttacatgctgtcagtattttttactcctagtccacaagaccaagcgagattcagaagataactcttgactgatgttttataaggagaaatccctaaggatagctttagaaggttaaaggtttgaatacagaagaaaacattaataaatgaagattatcgttgttatagttgaaagatctgatgaatggatgaatgaatttggacttaaacacatccgaattcatttgacttcaaaaaaaaaaaaaaactccatagctattaaacataacaattgagatattgagatgtgtaatgaatcccaatcacacaatgaacaagtcacgtggtccctacatgatataaatagttaatattgatatacgttattattgtgtaataagagtgtctaatttaaatatatttattaaaaataaatacattataataaaaattatttttacaactgatattgccaaaaaataatctttcaatactcaagacttatcgagaaacatattggacaaggtaaaatttactttataaaataacttgatttagaaattaatcactcttaactagagactcatgttaacatctctactttattttgcaaaatatttcattaaaactcaattttatctatttagctcacacttttatattacactatacataatttttcatattttcttttacaacaatataatattatatatttaatactttttattaattaaaaataacaaaaaaaaatagagaaaataagaaaccaattattaacgttgtgataaaaaatggaaaaataaataaaaaaaatgaattaaaatatttgaagaaacccaaaaacttaaaaaaatttatctctacgtgtaaaatttaaagatgaacgtaccctaaaaatgctttcaacacagagtgtagtgtaaagattagtaggggtgccgcaagctttcacaattgttattatacaattaattaattttatctaacaagaagaaaaacaaaatgagaaaccatatttgttgtttccaatccgagatattcattgactttttacatccaatgctgaagctacttgctaccaataatcattacaagaacatctaccatctctgaaatgatggaagcggctcctgtctctcacaacaatctctctgccaacaattttagatattatctttattgcatcatgacaatcattacacactcgtaagtttttcacaattcgaattgtagttccttcaggagtgctaattagtccgaatgcaatcgccagcttttcactatgaacagacaaagcatcttccttctcttcttcatctatattatgaaccacaagatctgtccttggtttgtacccagctagcttcatcttccaccttagttctctaatcatgtagaatatcttatctgattgaggatgtgataagtcacccatgaagaactcgtatactacattatctacctctatccaactacaaccaggcattttcatcactccattgttcctcattctcaacctacatttggctgcatcgtccagtctacctaatgacgcatacatattagcaagataaacatagcttccggagtgatctgattctagctcaagaatccggtggacaacacgttctcctctttcgatatctttgtatatccggcaaccaccaagtaatgcaccccaaacaatgacattaggctctactggcattgagtttatcaacttctctgcttcatcaaggcggccagcacgactgagcagatcaaccacacatccataatgctcaatcttgggaatgattccataagtgtgatccatcgtatcaaaatacttgaggcccttttcaactaagccaacatgagtacatgccgtcaataaccccatgaaagttatatcatttggcctcaccccatgttcaaccattttatcaaaacactcgaaagcttcgttagcatggccattcatggccaatccggtaataataatactccacgatatcacatctctctcatgcatcttatcaaaaacccctttagcttcttcgatgcatccacatttggcatacatatccgccaatgcattccctaagaacagacccaattctatccctctccgtcttatgaacctatcaatccatttccccaaatcaagagcaccaagatgagcacaagcagacaacacactgacaagtgtcacgtcatttggagccaagcctttaacttgctgcatccgtcgaaatagctcaactgcatcagaatacttctcattctgggcgtacccagcaatcatggcattccaagaaacaacattcctctccggcatctcttcgaaaagccgccgggcttccttcaaatcacccaccttagcgtacccgcttatcatcgttgaccaagaaaccaaactcctctccaccataccatcaaacacagcctgtgccttatcaacttgaccactcaaacaaagcccaaatatcaaagtattccaggacacaacatctctcacagtcatttcatcgaacaggttatgggcaatctcaaaacaacccaccttaaaatacaaatcaacaagcgaatttctaacaaaaatgttcgagtggcacccgtatttagtcactaagcaatgaactttccgaccctcgtcttcttgggcgagaccggcgcaagccttaagcaccgaagtgaaagtatattcatccgggtcaggtgcgctaggcagaaccagctgggcattaaagtaacgcaaagtgctgagccagtcattgtgttgagcgaatgccttgagaatagcgttgtaggcgaagatgttggggctggagaggtagtgggtgaagataagcgtgccatggcggacactagcgcgtgaagcgcagacgccgatgagtttgacggcaatgaggttcgggtccatagaggggatcgggttggtagtgacttgagcttggatttggtacaggtggcgcatggtaagctgggtggtacatcgtagcaggagatgagtgagctttgagtggtggtggtggtggccgtggccagggagaagagccagggcgagttggactgagtttatgtgagttaatttgactcggctactgccttggcaaccatattaaatttaactgtgatgtttagattttttttttttaagcaaaaggataaaatattattggaagcttttgggaaaagttcttatttttattaggtcaatttagagttttacatccccaattggcatgtactaaattttggcttcaaatttattaggccgttaaaaactttttggggcataatacgagacatggtaaaatttgagaacatgatttcatatataaaagtttaagtgataagatttggtatataaataattaccatatgaaattagacaaaaaattttaaatttacctattttaataatttgtgacttttttaaaaaaaaaaagttctaataacacaatttgagactttttttctcaaaaataataaaaaagaatcttaaatctccaatagaaaaaaataataataataataagagagaaacgttaaaggatactcatggtaattaatatctttatacttttgtggcgtataatatcactattgatgtaactcaatattgaatcgtacttattttatttcaataaatgttatagaaaattgctaaccaattataaagcgatattttatcgtgctagacatcataagtttctcataacaatactctaataataaaatcaaaactccataatagttatgtttaggggtgtttatgcacctatctagtgctagtattctagaggggcttagagcatctccaatcatgctctctaaacttaagttttagttaaaataaggagtgagtcttaaaaaaatgagatccaaccataaaaaaaaaataataaataaataaatatctctataagagagaattgataattagctctctaaatatagagaggtccctattttttcgctaatttttttaatattattttaataaaaaacacaattatcttttttattattttaacaaattaatttatatttaataaatttaaattataaaatattattaatataatcaaatgttaactaaagtaaggagtatgattgaagtaaacataataaaaatgactatctattttaactctttaattattttagctaaaatttgaagaaaaaaaagatagatgataaatcttattgtagagacatattttagaagatccagacaaatacttatggacagtcacaaagttaaaactcttgatagttccttccatcttctttttctagttgaaaaatatcttcaatgaaataagctaacaagataagaaataataataattaggaaaatttgcggaaaaaaattcccaaaaaatttgtgttgatgtagattagtctctattttttgaaaatagtggcaataatccttaaaatggtattgtggtattgttgtaagtctgttagtcttaaagttaactaatttgttaacttatttgtaattgccacgtgttgtaacataattggtccacctaataattttaaattaaaaaaataaaaaaaaatacattttaaaatcaattttttttctcctttattttcttcctccagcacatctgacctctcccattactatatttttttgagatttttacactagatgctaaatttagccttttttttacatttttattcccgttagtttttttaaacttttttatattttatgtttttca

SEQ ID NO: 161375 - DNA, 2484 bp, Cannabis sativa
  modified_base (1654)..(1658): a, c, t, g, unknown or other
aggccctgcaaagtcggagcaagtagcccccgaagaggagggacaagatgttagcgataccaataccgccaaagaggacagttcagaagcagaatcagcttaaagcttaatcaaaaggaaagaaagaaaaattatattaatgtagatcaagttttggaatagttggggttcaaattatttgggttaatctatatttgatagggttgttgtgattgttgttattggaatatttctacttaaatattattttcattgagaaatggatggattggatacaattttgaggcaattgagacattttattatattgattttggtttataatccaaaaaggaaagtgttttattcttggacaatatttgtgttttattgcttatatacaattatgacccaaagtctaaggtgggtggggttccaaacaagtcctaatgttgggctttttttttttatttatgatatttggagaaattataatttgaagttttgaatttataattaatataaatacaataattttttaaaggatacaagtacttaatacttttaaagattgtaatttttgttcaattttgtctgtacaaaatctattagtgtcttaaaaatatgacacatgtaagacttatatcttacattattaagtttggacggagccgtgtagtatcatatagttttaaatttttttttaataaattttaaatggagatacttaatgaaattgaatgaaaattacaattttactaatattaggtaattatgcattttaaaaaattattgggtttatgatgattataaaattaaaattttaagtatttatgctgcaattattacttttatttatagtatttagagaaattaaaaaaaaaaattatataacggtgtataatgtagtaaggagtactactgtcaacttcctattacaactttttaatcaattttcgtatccgaaaacacatgttgaaatattttttttttatggcggtattcgttatccttacaatatcattcgtaaatttttgaaaattttaaataatttaacttttcacaaatatttatatatattttttcaaatgagttagttaatcattttcttatttataaataatgagtagggattaattttaaatcttttttttaaggttaagtctcttaaagttaacttattatgtaagttgaagagctacatcataactctttaccacaatacttaaaactcacattaataaaactattttatttttgtttctaaataaattatcatactagttaattaacactatgctaattattattaaaacaataagtcaatgtccactataatagttgagtttgcaaacctaatccatccttaggtactaaattattaatggtcaaaaggtttttttggggtgggctaatcttcttcatagccatcttcaacttctctagggtcattttctatcaaattgagaatttcttccaaatatttattaattcaaaatattgtgacccacaatcattttccaaaattccactctattaaaataaccttttttttcccttaaataaaataaaaattaaatccaataaccaccaacaaatttcaaaatattaaaaagtacattgggtgcttatatagtggattctaaaaataagtgtattgatatatatatatatnnnnntatattttttttttgtattttttacatatgactaattttattcttcaattttttttatatgatggtgtatattatatttatttaagataatttttaagtttaagaaatacaaaatagtttataatacaaaaaataaggtttaaacaatttattttacacacataaaatataaaaaaaacatgcgtgtgtaatagactatttaatactgtttataccttgtgttttacaaaaattattcattagatttttgttttattaaataacaaaatagattctgtgattttcaaaatagtataaatagatttctgagctcattttcaatactttttttaattaaactaacttaaagatgaatcctgacacgaacaaataaaaaaaacataatcgaatttttcataacacatttacgtcaggttatcattaagtttaacaaaaaaataattaaggtactatttatttagtactattttcaaacaaagtagaaagttcaattaataatttttacaaaatacaaaattcaaaataatatttactctcattataatattgtgccttaaaaaaaacttcgagatatacgatatcatatatatatataattaatatcaaaacaatgtttacatcaaaaacaccaaaatgatacatcaatacactcatttttaagagattccaagttcgaagtcatctaaaaaaaataggctaatttttagaacacatcatagactttactaagggcccgtttggtacacaggactggattggattagacaggctaatttgtccaatccagtgtttgggcatgttagaagtctggataactaatccagtt

SEQ ID NO: 161376 - DNA, 8050 bp, Cannabis sativa
tggtataaatgttgttggtttaaccctattgtaaacattgtaattagggtaaatattattttggataatatgttttgtataagttattgataagactttctatattattaaatgataaactgaatcttgtatttttttaaaatagtattaaatagtacctgaacccgatatagaggtgttgacaaaactagttacgttttatatatttattcatcctaaaaattgtcttcaagttggttatattaaaaaaattgtcgaaagttgaacctatggtcctatttgtactatttaaaaaaataatggtcaattttgtcatttaacaaaacagatggtttaattagtaacttttacaaaatacaagatctaaaatagtattgatcctaattttatttgatttcgtgtgaaaataaaatagcagtgttcatggatagtaggcgctttggctatggctgtgtggctcgggattctcttggtgcggtggtgaaagctaagcgtggtagtagagagggtgtctttgaactgctcttagttgaagcgatgagtattaaagaagcgctaagttggattaaagatcatggatggacggattagatacttgaatcggattgccttactgtggtagcacatttgaataataacaaaacatagtctttccttatggctgtgttctttttgattgtaaggctaatattaatagttgctcttttacgttgaatcttgtcaagcggtctgctaataaggtggcgcacatgttagcacaatcttcttgttttgaggcaaactgtaatttttgtttgaatactctttttcgttttgtttcatccttagttttggatgatatttcttaataaagttttatttaaaaaaaaaaaaatagcaatatgtggtatattgacaaaaatataatcagtttaattattgacaaaattttaaagatgaaggaaaaagaggtattataattgcttataattatgtgttattattttctaataatgtattataatcatctttataattattttttaatgtaagaggagtacaatacataatgtaacgacttacaatgtaaagctgttacgaagccttaaaatttaaaacaaatggtaaaaatattaattccacttcaatgacctaaggatcttcactagctagtttcaaacaacagcaatgtctcctaatctagttaagaaagtatataatctagtttgagtatctattcgaatttaaatacataacctctttatgtaataattaatttattttttttaacaaaaagaaagaagacccaagagtactgggggaaagtgtcctttgtttctaaagttgagtacagcatagcatagcatagcttagcatacaggggcatcaagaattgggttaggtgtgttgtgggtctcattcattctctcaaagagcaccaaagttagcacatttcaaatccataatcgatacagaacaacacttgattgattctgacactttggcatatacagcagatgagtatttcaggtggaaatgataaagaaaaaaacctgctccattttccagcttaccaaacagaaacccttcgttaaaagcttccacaaagtctcaggctttcgatgggaacttgaacattggtaaaagggacgactactgctgtcatcatatattttagggtaaatattttcttcctgtactgtacatatgcagttaagccctctttcgtctatattattctatagaatagactctatagctaaccaaacccaacaacagttagagaaaattcctttgtcataagggaataaaaaagatgcccacatgaggaccagtgtgaggagggtatcaggggatcccactttggttggcgctggtcccggtgcaaccccagtccccactcactcactctgaccgccatgaatgacggtgcatgaaacttgaaagtaactctttgtccacttttgcttattattatttttcagaaatcagagacaaaaacgacaagacatagcattttgtaaacaaaaaaagaatatatatttgttaatcagtgttgaatttcatctcacatcaattttgatttataactagatgttgagaatagagagatgttagagatgatcactactataacaggacaaaattttaatgtttattacaatacaacgaaggccattttcaaggaatacattacatgtcattgtacatttatagatttgaaaactaaagaaaacagacgtccctcttcaaaggttcaacctgttctttttctctcttttttttcaaaaaattctatttgaaaaagaatatataatgacactggcttaggcagaccaacatctccaaatttcaaatcatttttttagttcctacctatgttacaagtttttgggattatttacaaattaccacgatgagaaatctttgaattctgcggtagaagttcccatcttcctcttctttgttttcgatgcagctgctgaaccattgtcgacaacactagattcagcttgagcagtccttgctttcagatactttgcaacaccaccaccgactgttcccgatcccgtgcttccagtgcctgggttactataccatgacccaatcttgtcctgagataacacaaacacaatagcaagaagattactggcagttgaaaaaatagagaaagttaatagaataattgctcttgacatgataatgtgatatcgtttactactaacattgtcttcatcctcagctttcttctcattttcagctgcttctttttcctcttcctcgtcaggttccgagtacggattcacaaaaactgagacacctgttatcttaatttcctcctgcataaaagcaacagaagcaaaattgataaatatgatatatagcaaagtaaatttatccactataacggattgtgcaaactcacacgtgaaaataagatgcccaataccacgaacatgctaaaacaatgtttgaactattgaaaacttgtgtttaaagaataatgctgcatgcccaataacacaaacatgctaaaacaatggttaaattattgaaaattagtttaaagaatagtatcatgctacagtagtaacaaattgctaatatctcagcatgaaatatagaatccacactgaaaagctttcgaacaataacaaatgatatgttctgcgaaaaaaattaaatatactatcaaagtaatacgtttcccattagtctggcagattattaatgatgacatgggagagcactgaattgaaactaaagtaagctctaaacacagttgtgagaaaaggataatacaagaactcaccaaaggtcgatcatcgtcatcaacaggaaccttttccattgttgccagagtcgtcaatccacctacaactccaccaaaaacagtatgtttgaagttcaaatgatttgcagacttgtacaggataaaaaactgggaaccatttgtgtggggaccactgtttgccatactaagaacaccccttccagagtgaagcaacttggaattgacttcatctttaaatggctgtccccaaatagattcccctcctttcccagtaccagtaggatcacccccttgaatcataaaattcctacatggaccaaacaacttgaaattaatcacattaacagacaaaagcttatatatagaatgcatatgaacacataaatttctgaggtatgtatcataccggatgttcctatggaaagctactccattataatatccacgttcacagagagtgaggaagttctcacatgtcctcggagttatatcacagtgcagctcaatgtttaaatcaccatgagttgtgtgcagttgcaaatatcctttcttcttggggttcttctcaactttgacatactcatattcatttttagtcacgggatcaaaagaggtagaagtgaaggatctcgaagcagcaccagtagtatatttactcttgacctgaaacagataagtcattaataatggtcatagcacctagtaaagtaaactaatagtaggattaataatgttgcatcctgcttgtccaaaggaccagataacagacaacagtgtagtttaccgaaacaattaacctcaaataacagcagtctcctcttcaagaaacataaaagcaaaaaaaaaaaaaaagaaagaaagaaagaaacataagcaccaaaaagagaagtctatgtataattattgtttttaactagtacgaacaatttgaatagttcggatttgaaaacttcaaataactagactgtgaagatatgcatagttggctagatctattgataggaaactaaatctccaagaactcttttcatatgtagaagaaaatatggcaaggcggactaaattttcatcgacagcagtcttctcttttaagaaacagactttttacactggaacctcaaacaattagtatcccctcaatttttgaaagatatcaagttaaagacaaactaaccagcttagcattcaatggtgttctctcaccagccctgtgcatagcaattcgagcagcagttttatcacttgatccagcttttgctgcagcggcacttctcccatgtacagaagcagatgcagcatctactatgctgtaagcctgaggggcattactctctccatttgattttttgtcagaatcttcttttatacgtgacctcgcagccaaaatggcagtaagtgctgcggccctttcattctgtgccttgctgccacctcctcctagcagtgcagtttgctttgctttctctgtaccaagctccttcaacatctgcttgatgtctccactgacatttatgttataggatggatctgaacccattttctttaactctgggaaaaggaactgaagaggtaaaaatgacaatggtaaaatcatataatcaaaatttaagaaactcctgcacaatgaaacatgaaacttaccttcatcatcaagtgttaagctatttttcacatgatcaaaatccaagagtgttttgccgtcaattgcattaggattctgcaaaggatacccataagcatacatgttatattcaagcaagcaaaaactactcagaagagttctgaaagaattggatatgtttcgaaattcaaactactttacctgaatagttataaggtcccctctaacaaatggttcgtcagtaaggagctccttccagttctttgtcttgatgtttagttctttaattgcctataaagcaaaattcaaacaaggaacttggaaaacttatacatcaacagacaactatatgtttattcattacaaacaatcaatggtaagagtcggtggaaatacagacctcatagcaaaacacgtttcctgtagtcttcacagcaactatgtgtgtaaattcagtaaatactttgttcaacactgggcactgaaactctcctgaaccgggaaaaaatgaaataaaattggtgaaaggtttacaattagctaatcctcagaagtaaattaacagataaacaagctaagctatgaagctagggacaaaacaaaacttcgttaatgaagggaaagccatatcaaattatcaatacacccacattactagcaatgttgcttctcctatgcatactagcaaggtgataaattaaaactcacaggctcataatcaagacaaattgaggaaactgcttctaagtatatattataaaaaagaaaagaagagagagaatcattcgaagcattttcaaaaacatttcattgcataaaggtgtccgcaaagaaataattgaagcctttaaaaccataagctaatcacaataactcagaacagtctaatttaaagtaataattgtgattttattaaaaagtatacggtatctaatttagcatattttaattaaaaaagtcgttgaaccctcagggattgaattttagttccaatacataatagtttttaaaagtctcttattttaattagaaaagtatgaataaaaattgcacacaattcacatgtccttcacacatacggaatacagtcatagagtttagcatcatcatcatcatcattgaaccccataggtcataagatccaaatctcaattaataaagtcatccaacaaatgaaataaacaaaaactacccattaaaaatcaaaataaaacgaagaaaaaaaataaaataaaacataaaaatactttctcctcaaacttaaaagaaacggtgtccccacttgtgtactgtggagcagcagcagttacagctacttttctcttgtgttctctgaagtttaacaagctttccaatcatccaatagtatatttatgaacccctaaacccctatttatataatcctctaaagatgggatttgaaatacattcaaaataatgtttaaatttaaaaattcatacgccaggcgatataaagcctagtattgatttggggctttttgcgattttcgaacaatttctctatagcaggtgcagcgatatggcgcctagttcttggcgccatatggcctggaacacaaattcatggattgttgattttgcagcatcatttcattctttggtttcattacctcattcaattatgtccattatactccaaattcacaacaaattttacaattaaacacaaacctgcacagctacaaaaaacatagctatacaaaaactcaagaaaaaatacagcttttcttggttaaaaagataacaatgagtacacaaaatatgcactcatcacataatacatgccaatgcttaggaatgtaaacagggacttcagaatctcttttctccttttatcaatttaaaagagaaacatatcagcacctataggagtaaacaatcactgtatagagaaatactgcatctaaatatttggtctgctgttaaaaagcttgtgctcatctgctcataattgatagcaatgaaactgacagcatcattatgagcaaaggttgtgcctattttgacagaagcatcaacaccgacccttgaacattttctacacttatatctaattgattaagttcaacaatatctataactcattttctcctctccacatagttctaaccttacatcaactaaactcaaacatgacagatagttaatttcataaaccacaattccaatccaataattgcataagcccgaaaggaaaaaaaataaaaacaccaaccttcagagttcttgtgaaaagttagtggaataagatcctcctgcttcaagggagcccccgtcactggatttttcccgtactttctaatatatggaactatatgcctgcacccatttcgaaacaacaaagccaaagaacattactaaactaagcagccttccatcatgaccctaaaaaaaaaatgcaagagctacagattgagatacccacgtgatttcaaagacactgccatcagcagtgcaaacaggatcctcgaaaggcgtaaaggtgagcctgcatcaaaaattaataagccatgactaaatcgagttaaaaaatttcaaaattcatacttttatataagtagacatttgcaaaaagcttataagaatgaagatgaagaaagtacgcgcagcaatagaaagggagacgtttgaagggagtggaggttgatttgggtttggcgccaccccattcggtggcccactccgtgttagtgatgaacattcggtccttgctgtgctgtttcttccccattgtgtaatatcaatgggacttcttcgttcaaaccctaaagaatattcgaaaccaactattgaaattggacgaattgatcaaggctggagagctagatcgaagcactccaagtttaatccagctccgcgtgaccggagtttgatattttgtaggaagaccaccctggcctcgccgagtagagtggagtacacgttctgattctgattatgattctgcagtgccgatttctgattctacgcgagggcttatcacgttccaagcccagtataaactagcctaccccacctgttatttatttattttttttttatttttttttttttgagattattttacaaatattcaaaaataacaaaacaaccaaaaattataaaaatacggttttacggaattttaaatattt

SEQ ID NO: 161377 - DNA, 24113 bp, Cannabis sativa
tttgaaataagcaaacaataatattatatataattatagtatatatatgtgtaacatttgtaaagggatatatattcaaagaaatatgtatcattatattgatggatgatcatgaagccaataaagatttctttggcgtaagaaatacaaacaatcatatataatttttttttttttttggatatattagtcatatcgtgtgaggcacgtaatcaattaattaataacctacaaataaaatttacagaaattaaataaaattacggtatttaacattttccacatatgcattattgtatttttgaatttttgagtccattaaaaataattattgatgaacaatgtaaattattccccaggccaaactttgtaataataataaaataattttatgtaaaattaaatttagaaaataaattactttttaagttaattacgcacgtgataattattgaataatttggaaaccatttttaataaactgataaatttaaagacacgataatattaattattggggtgacaaaaattctaatataagagcctaaaattaataatgttgtaattgtgaattgagattattattactagctttgttatatattcctatacattatatattttcgtaatatatatatactcatatagtgagaaagattgtgaccaaacaaacttggaaaagaatctatcgaaattaaaaccaaaatttatacatatattttttcacatgccaaaaatatatggtgaatattcccaactcaactatatataactttttcttttttatgtgaatatataatttgagtggtcaaagaaaatggaagaaggaaagtatatatatatgatgtgatgtgatgttctaaaacaagttaagtggagataattaatttatttatttttctttttttttttgtgaagtagagagtactatatggtagtactacttaacactcactctactctattctattattataagactacaataataatgataataagtatatatagttagtacttttaactgttgaaacgtcacttgtgacttgttaggcactcataatttactataacattattaattaattatgagaactaaattttaagtttcttattattaattaaaatataaaacactacactaaacctaattaatttcttacttttgtttttttatttctcaattattactatattataacatatatgtgtatagattcttttgatttggcagaaccatagtatagcatatatatggtgatatgtgtggttagttgagtagtaataaaagccaatgcatatgagttggatgtgttccccctcttcttcttgtttggtacttataaaaaaataatactaataatttctatacaaatatatgcatttctcaatttaatttccaactattgttaataaaattagtattcttaaatgacatcttaatgacactcacataataatacaacatattactattaaattctatcaattattattgtttgaatctaatgttgaatcgaacactactagaactaatcaaagaattaaaataccaagtgatagagattaataaatatgatttttactattcgaattatattaccgctactatatcatattcttcaaatatttcattttgttaaaaattctccataaattatttttattattgagttttggtacttctgttacttttgtccaaggctgacgttgtatttattgtgtaaatgtggctaggatcagctaagggtagggcaataggggcccacgcccaaggtcccacccaaacttaaaaaaaaatttaacaaaaaaatcttaatttatttttaaaaatacattattaaaaataaattacattcaatattttattaagatgcaagatctaattatactttcaaaatactatattttaaatttttaccattatatacaaaaaatataaaaaaattatatataaaaaagacgtaattagagtttttggtgtaagacccccaattaacttgagacgtatatgtatcattgctttgtgtataatttacaatatatatatatatttttttaaaaaaaaatatgatttggttaattccaaagaaaaaattataaatttaagttttaggtaagtgttaagtaagtgtagctatatagtgtgtgtgtgtgtgttaattgggtagacaagtttgaataaattgtacctacttacttactacctttgattccatggcatggactgattaactaactacaactagtaatagcaaatgcttgttattttccaataattaataattaataatggctaaaggctaattactactcaccactacaacaccaaaactacttcattaattaattaaatctttttatatatatatatatttaattaggtcaattctttcttatttgcttggctctaaagtaaccatctttcacaagtgagttaattgaattcatcatcatcatgtgtctctattatttgactaataattattgcaaaaatagacacctatacatatagtattactcaaggtatatatatacatgcatatatggctttgttgatttcattataaattatgtacacacaatcttttttccattgcttatatttgcaaaagtgaacaatttcttttgttttttaataataatttcaatacccctttttgtgattttgggctctaaagcaagcaaagttactagtacacaaaaaaaaaaggtcatttgtaaggattatcacaaatatatgtgaagaaataatagtaatagtaataataaataataataaagttaggtgatctaacttacgaacaaaaatgtagagacctcagttaatttagtgactaattaaaaaaatattctattaaatatttttttttgataaaataaataattaaactttggtacctttgaatatttcttcctcacttggctacatgattgcaattaatgcaacaagaacaagaactatagcttcatgaattaaactaattaattaatcaagaaaaggagattaataatataaaatcattcaataatgatgtgttttaaaatcattaataatagatattttctcttaataaaggaaccaaaatacatggggggagcagatagcatatgtatataaatattttacaaatcaaaaggatttagattatcaaatatgcttttatatatgtttgtttttgattgtaaagagaatgatctgttttattaaatatgatataatgttaaatattaatcttattatagtgtacatacactatctatacttgctttaagaaacattccaacgaagcaacttcatatatacacataacaaaaactctctctctctctcttaggattttctatctactaacttgtgcccttgaattttaatgtttactatgttattcccctcccaaattttgacatgtattaaatcgtatactaaaactttcatacatgtcattggacaaaaatctttaaatctaacaatctcaataattagtgaaaatttttaacagcttaaaaattataaaaagcataattttgtaaatgttaaattttaattaacctaaatattagtaatggtaagtatggtagattagggtttagtggtgagtttctactttgagtggaataaaaagttattgctaaaagtaaaacacaataaataaaataaacgattaatgcaaatctaattgttaattctaggatgaaaatgttgatgtctatgtatgaatattcatattattgaataattgaagcaaacgacaataatagaagaaggtaatataagaaaacgactatttagcaaattaaaacgaaaaaaaaaagtgaaacgacaaaaatttcaaaaacgacaagataagttcataaaaggagaagttgagaaaaacgacaataatagtcagtaagcgacatcaactttaaaacgacaataacattcaattcaaggactaaaataataatagagaaaactaaataatctcaaatttgattacaaatctgatttaagaacttgttgttatacaaatctaaacattattctattgtcatgttcaaatgcttattaaaatttaatagagcaggcatagcatagcttaacagctttaaaaactttattagcagagagttctacattgcctcccattcaaccgaacacgggccgggttgtctccaaagcaaatatcgaaggcccgaaacccgatacattacttgtcctcacactggtgtcagaccaactacacctgtgcacaaaagatgatacaattttaaatgtgttatttgagttttgagatgaaaaatcttttttttttttgcttaccacatgccaatcttccacctgcattgcctgtggacaaactaagctcatgcccacctacaaatggaggaccgaatgagttagaaaagagtcaaaagttcggaaagacatctcttggagatcatccaaaaacaaacaaaaaagtgatctttactataaagaaaggaacttggtgagttacatctttcattgaaatttcatactcacatatcacattattgccaaaacatgagtgaagttactatgtaaacagctatatgggccatggctaaggttcgaattaggtgttgaatatttaagataaaaagtacaaatcaatacataccctttccaagatcatcctcaagctcatgaaccaccaaggctcttccaacaacagagttaggaccattcagaggaatctgcaaattttggctaaaaaaacttagtactaataattacacaacacttttctactccaaagttaagtctaaacttagtattttacctgtgaatccacaattgttgcttctgccacgcctgaattcataaaatttgtaaataataagtactgatattcggataaggatttcataaatccaatgtggtgattgaaatgatattaccttcagcgttggcaattatgtttcccaggtcacccgcatgtcggacttcatcttcaggagcaccatgtgtgaggttgttaggattgaaatgtggtcctgaaaacaaaaacaaacctacaacaattacaagaaacgaaataacacgacgagcaattaaaaagatttcaatggagatggatatttcgaaatcaatcaatcctgacctgtggaaatgcaaccattggttgtgtcaccaaattcatgctgcacaagaaaaagaacaagtgatttgagcttccaaagttaccaactttcatttatacaaatccaaagacacttattgaagataaagaatgaatactcaccaaatggaacccatgaggccctggtgtaagtccagtaatacgaacatttacagtagtgggacctgtcaaaggtaaggttggtacttaaattctctatattatcagctctattggattgagcaattgtccttttagaatactattgcacattaataaaacttcaatgaacaatgtaagaaactactaaagtccaaaagaagaaaactttaaataaaaatgtaagaaaatttcaatcaataagcatagttaagttaaacaatcaaaagatcaaccaatcattaagctctctctttcctgttactccatactcaagttcaagctaagcatcatttccaaaaaatctaagctagtagttaaaatctctaactaaactaccagattgagctgaggcccctcaaattacgacacaaaagtaaatctgtatcatcaaaatgtaaacacaaagaccatgaaacaaaaagcaactgacccaaaaacacttcaagcaaaaatgaaggcctcatattttagtcaattacctgtttgagaaaattcccaagtgaccaattttagaaaagtatgataaaaatgtattctttatttaaaaataagcatatagttaagataaacaacgaaaagatcaaccaatcattaaaacaaattaacaagttcaatagtacaagacaatgaacaagtaaagattactacatttcactgaaataaatctaaatacttaaaatctctctctaaacaattacgacacaaaaagtaaatctgaataaaatgtgagcttttctcttgaccttgaaacaaaaagcaactgaccccaaaaacacttacaagcaaaaatagtctcaaatttaagtcaactaactgtttgagaaaattcccaagtgaccaattttagaaaacataataaaaatctgttctttaatctttatttacagtaagaagagagtaccatcgccgtcttgggtcaaggtaacgactccttctacattggaatttcccttaagaacagcgacggctttcttggcggcggtgacagtgaagggtttgggagcagctgtggcggtgagattgaaggaacggaagtgagttgggcgatcgagcttgagtgagacaccatggaaggaggaaaggagaggtgggttttgtgagtttgggagataggcgaaaagggtaggagaagaaggtgaagctgatgataggaggattgagtgggccgccatggcagccatagctgcagcttgcattgggattattggaaagagtttgattggttgagatttaaggtgtgtgaatgaatatgataatgtattctgaaacttttgagtgagttcttttctctgttatctctctttggatgagagagaagcttctggtagtgagagagtgagtgagtgtagagagagaaaaacgctgtgaaaatgactatggttgagaaaacgacaattaactaaataaacgacaattttcaagaaaacgacaataataaactgaggaaacgacaatattaaaattaactcagaaaacgacaattgtcgaaataaacgacaataaacagagaaacgacgatgaacgacagtaaactgataaaaacgacaatcataaactgagcaaatgacaattattaaaataaactctgtaaacgacaattatataaaataaacgacaataaactgaaaaaacgacagtaaactgataaaacgaccataaaattcagatttttacaaaaattattgaaaataaacgacaattaaaattaaacgacaataaacttgagaaacgacaatgaacgacagtaaactgataaaaacgacaataataatctcaggaaaaacgacaattgaatataaacgacaataaactcggaaaacgacaattatcaaaagaaacgacaataaagtgagaaacgacaataaacgacagtaactgataaaaacgacaattaataaaataaattcagaaaacgactattatcaaaataaacgacaataaactgagaaagcgacaatgaacggcagtaaactgataaaaacgacaataaactcagaaaacgacaaatatcgaaaataaacgacagtaaactgtaaaacgacatatcggaataaacgacaatggacgaaaattatctaaataaacgacaattactgagagaacaacaataatcaaaataatatctcaaaaaaaaaaacaataatcaaaataaactacaagtaactgagaaaacgataataaactaagaaaaggacaagtctgagaataaacgacaataaatttagaaagcgaggaaacttaaaaaatgaattacggtgtaagttatgaaaatgaattgaccaagatttataataactcagaaaatttcagaacacaaataataccgtagacaaactacactaaataatagaaaacgacactattttaaaaaaaacgacaattattgatataaacgacaacttatattgctatagaataaatagattagaccttcaacgacaattcgaacctgtcttctttgtatagagagagaaagctctctctctctctctctctctctctaagcttcgtcaatggaagttcaaaaccagagcttgtgaattctaaatcaatggagtctccaaaccccatttcaaattcttcttcttctgttcgcgtcctaatacgccccccatcttcaacaactctctcatccacacccacactcgcttcgtcttcaacctctcaaaccgctcctctttcctcttcaattcaaaccccacaccctccgtcttctgatggcgtagtggtcgttggcttcattggccgtagacctgaaatcacgacgcacctcatcaaccggatcgtcgactccaatgttttcggctctggaagcctggatgagaatcttcgcattgataaggaagagcttagggaatggtttaaatggaggagaatcagttactaccatgaacgcagaagaggggttttgtttttgcatttctcttccaatctttgccctgcgtttgatgatggggttttggagtctggctccggtttcgatttggccatggaagaacacgagtttggagatcttcaggggatgttgttcttgttttcagtaagcgtttttgtttagttcattttctctttctttctcaaaggcatcttgttcttatttgttcatagtttcttaatactaaacatcatataaactaatggagggttagaatttatacatatatactcaattattactggaaaaaattagctggatagtgttatatatatcgtaataagctagttctggagtggagtagcttatattatatgctaacatttccttgttaatggaagaatttttaactagagagtttttgggatcatagaactaaggttgcatttggtttgaggtaatgatattgaatggaatcgaaatccgttccataatttagtggcattttaaagtattggaatgtcattctagtggaatgattttcccaccattgtgctattcaattttaaaattagtattccgttcatttatttggttgcattttaaagtattggaatgtcatttcgattcatattcccatttgcatttttattcttttgttttcatttctctctaccaaatgcaacttaagagtaattactatgtaggtttccagataacttagtccgatcatttgagctattggatgtgctaatggggattatttgtatgcttggttttcatatgagaattatttagttttggtgttgtgatgagttgttgctaatagaccatgaaattaactctgatagtaaatgcaggtttgccatgtaatcatatatgttcaggagggttcaagatttgacattcaacttctgaaaaagtttagagtattgcaagctgccaagcatgctttggcaccatttgttagatcacaaactactcagggattttcatctaggccgcactcatcatcattccgaccaaccacttctgcacctatctctaataattcttctcctggtaggagtcgtaatatcttgaatcatcgcaatggttctgctgtttcagtgatgtcaggttttggttcatacacctctttgtttccgggacagtgcactcctgttttgctgtttgttttcgtcgatgatttctatgacttgccgaatcccagttccaatgctgaagagtcaacagatgcatcctcacataatcaatcttctagttcgagtagtttaacaaggtcaaatatgcctgctaaggtctctagtccagtagtcgtacttgctcgccctgcgagcaaatctgaaggtggttccagaaagaaacttcagtcgtcccttgaagcacagattcgttttcttataaagaaatgtagaactctttcaggtactgaaaccagtcatgctggatcaaaaagtggaggaataatttctagttctgcttctttgttctcgcttgatgctacgcggtctgttgtgttgttagataggtcaggaaatcgaagaggcgaatctcttgagtatgcaactgatcttgtggaagatgttttgaatggaaaggcaacctcagattctcttttgcttgaaagccatggtcagaatgctaataaagatgatataacatctcttaaagagtttatttacaggcaaactgatattctgaggggaaagggagcagtggttgttaattcgaatagtggttcagcagctggtgttggcatggttgctgctgctgctgctgccgctgctgcctcgacctctgctgcatctggaaagacatttactacacccgaactcccaaatattgaggtttggttatcgtctagtcaactaattcttcatggagttctttctgcaaagggtgggtgcttagaagaaatagaaattagcaaaagaaaacctcgggtgaggaacgctactccacagtcactcgaaggaatcgcttcaaaaagcatcgatcccttagatttagcagtttcttggttagaatgtggtaaaggattgaatgcgaaattttctactttgtggtgtgaaaggtctctaccagctgcaaaggaggtttatctgaaagacttgcccgcttgttatccaacttcacaacacgaagaacatctgaagaaggcattgcaggctttttattcaatggtcaggggatctgctacgcatcactttgcgaaaaagttgggtgatgaatgcacatccatctggaaatctggcaggcagctgtgtgatgcggttagtttgacaggaagaccgtgtatgcaccaaaggcatgatctcgagaatggtgaattagtttcgggagctggattgaagccgcattgcagtggatttgttttccttcatgcttgtgcctgtggacgttcaaggagactacgacttgatccattcgattttgaaacagcaaacattacttctaattgctttcctgactgtgacaaacttcttcctgcgcttcaattaccgaaaatatttaatgaaggaccagttcatccgtcctcatggagtttgattcgtgttgggggcgcaaggtactatgaaccttcgaaaggcttacttcagagtgggttttctgccactcagaggttcctgttgaaatgggaaataattttagagaataagaaaggtgattatggttcaacggccactgctgtacaccaaggttctgtaacaaagtcaaatacaagccccaagtttgaacctattgtgagtacagaaacaaatagtgctgctgctgtgaaattgtactcgggggagatacagtctgtagttgaaaatcaaagaaaaccctcagagagtataatacttgacgaaaagaaaatcagttttggtaaaggtctacccaattttacaatgaagaaagctttttctgaagttgttgctggatcagcagctggagattctggatttcctcctctagaacagagaaagcaacaatcttcacgtttagataggactgtcaagcagagtaggactggaggcttgagtgtcgaacacattgctgataatcaaggacctcaaatatctaaagttgcttcttcttctactctggatgtctcaaacgagattaataataatggttctacagtgggagatccctatttacgcataggcagttacgtggtcccagttaacaggaattctgttgaaaaaataaaaaagaacatttcggttaaacatgtagcagcatatgtgggttttgaacatgaatgccctcatggccatcgtttcttactgaatccagagcatctcaatgaccttggaacgttgtatcaaccggaagaatctcaagttccttctgctgaaacttcatatcagaatcctagaaatctttcaaaactgagtaataatggtcttcgcggtaaagttcatcctgcttcaaataggaataatgctacttctacaagaaagggaagaaatatggatagatcaaaggagctagcaactaataatggttatccaaatccagacaagcatgctcaatcaacagtatcagaaaaggagcagaagcagagtcatatgttgtttggtgtatcgacagttaatggtgttgttaaagaccttcgagggagccttgattctattaatatcgataaggatggccatgctttctcaatgttgaatagaaacttaccaatcttcatgaactgcccatactgcagactttccaaaagtagtgaggaacaatccaaagttaaatttgctggcacaatatcacagcttcaaaggatttttgtggtatgacattgtgtgagcttaagcttatatataaatattgaagggtattgcagattttgaaattagctgtcttgcaagtttgcattctattgctcttaattatcaaatatctgaattttggtttttcttgtaggtcacaccttcctttccggtcgtattagcaactcatccactaatacaatttgaggtatgtcttacacttccttacaaatgtataataaggatgcattatcttttgtttcttcttccgagatcattcttcctacttgaaagtctagaataataaactaaccttgaattatcggtttcctagtttttcccatttttatttttgcctcagcatgtcaaacctccagtttgtttagtcgagtccaatccaaactctatagtacttttacatgcacatttccatttctatcagtcaaaagttatttataaatatagcttgttggtgtccattctaatgatatcggttagactgttgttggactctttaaagtttagtttttgaatctgtaggtgtcttctctacctccatcagtatcagagcgtgagcaaaaattacaattcggtcttggatgtgaagtgcttttaccacccgagagtttccttaccctaagactaccatttgtttacggtgtgaagttggaggatggaagtttgcattctcttaagtactttgagcgtcaaccagaagcaactgcttggattactaaagggactgcattgcaaattgtttccaaaagagacagcgctggtcattatggttctcatacctaatttctcactgatctttagaatttgtctggcattatgatgtacccctcccaatgcagtgtcaactgctctttggtttgacaattcctttgtcaatacagtacaggtgagtttctaatctgtttattaaattttattgactttgttttctttttccctgttaacttttttagattagtttttttttaaaaaatgggcatgattggtgattatttccctggctcttagtatattaggcaccaggaatagtaggatgtggtatcatacagtaaataaaaaagctttagttcttctggtatgttttttgaggacgttatagttttattgtctaaattctcgaagccagttttgttccatgtggctttcatacttctgcagctcatagtttggcaaagcatgcctttcggttagataacaagctatcttagttcggtggtggatgtcagcattgtaaattctttagtaattttaatcactatgttaaaaaaaaaagaaaaaagcgttgtatgagtttgtttgggaaggtagttttgagtgagaaattactatatataagagagtaaggttgagtaactctttgcatcacaagggcctaagggctcccattgttcgtaattggattttatcatataatcattatgaatgttggctactattctgttgtcattgagattaattgtgttttctcatcatatactaagtagttaccaaacgagcgttgagtgtcttttcttttcaggaactctgttatggaagtgctagaagaggagttagcacatttatgagaatggcgggtaaactctcagctgagttaaacagaatcggaccttaaaaggagtttccctattgaaaacttgaagtgaagagtgatgatgatgatgatgatattgaaatgcagttagaaggtattgtgttttgatgagcttaatgtggcatattaccatttaccataatgaaatttgtattctaactgggctgcctatttgtttaggttgtgagggaaagaaaggaaggagatttgcttgattgcctcaggccctcacctctgcatattatactcccttcttcacacataaaccatctataatataaatatatgtatatatgggtgtttcaactttggaacaataccccgtttcttgcactcggatatgaacctaaatagtattttttttttaaggtaatgaatggtatggtaaaaagatgaaagttttgatgaagtgggctgagtttatggaacaaaattatagaaatgatatataacaaggtgcacattatgtattgtagacatattattacacaaattttaataaagtttttgttttaattagtttaatattttaattttctaaatcaaattaattaaaacaaaatcatgcataaaaaataaaataaaagactaatatccttgcccaaatttgtaagcaccatttattaagtaatgcggtgatagttcatccaataaatgtgggtcgagtcgttttttttctctacgataccaacatgccaaaatataataatactgtttgaaattaaaagcagcattgttattagaaactaatgatgcttagtacttttaataaatgacatcttacaattggttagtgatattccttaaaatttattattttaagttatatgggatctgatatttaattacaccaataacagtatgatactgtggagggtgttagacaccagtaatatcttttagcaattctcaattaaaaaccattaaatagatgtatttttagtttgagcattgctagctattaggctccaatgcaacaccttctaataagtaggtggtgtctaatgattggttagcgatattccttaaaagctatttttgaagttatatagaattcatacttaattatattaatagtagtataacaccgaggatgatactaggcactagtaatgtcttttaatatttctcttctagtttctgtcacactatacaaactaagactatgtttggtcggaaagaaatagtaggatagatagagagcttagagataatggatagtcgagggatgatagtaaagtcaaaagaatgaagagtaagttagttgttaaaagggtaaatactattttagatcttgtgttatgcaaagtaattaattggattctttattttgttaaatgataagtttgaccatgtatcttttaaaatggtacaaaatagtacccttagctatatttttgttaatttttttaatataactaacttggagccaatttttaatacaaataaataaaaaaataaataaataaataaaataaactagtatactatgatcataatatctcagtttattaagttttatttttacattaaatcagtttaaaatattattttgtataatttttaaaaataaataaaataaattagtaacttttacataatataaaaaccaaaatattattgagtataaatattactataatatatttatttatttgtttttttttatgtattttgtatagttaaaagatttttgactctccctccattatctttcactaccaaacatatataatgacttttttttcaaaataaacacattttactaaaattattaaattaaattaaaatttataagatttgatcttaatcaattaatagactttgtgatggtaacatgtcaattaattatggatattttataaaagttattttcttaaattatataaaattcaatacttaattatatcaataacactatatatcgaataatactttttagctattctcttttagcatttttttttttttttgtttgaaaaagaaaaatataataaataagaagaatactaactgaccaataaaaggcctataatttgtcagaattagaagggacatcacaagatttccaagatttatgtccaaaaacaaaatcttgctgaagaagcaaagctatgtatgttactagtattatactagctactaataggtgtacttaggtagggacacatttggaattttacaaaacaatacatctctttctattcttatttattgttactattatatcatcaatttattcagtcttttcatttctctctcactttccaaaattcttctataatgtcttcttctccggtggattattcatcgaaatgtgtgatgtttccggcaagacccggttatggtattgttggtagaaagtgtttgatcaaagctaatcacttcacactccaacttgttaccaccatccataactataagggtctctatcattaccatgtgagttcataaaaataacatcttttcttgtttcattgtatcttttcatgtttccatacctttttaataatgttggttttttttacaggtatggataagtcctcaagtaacatccatgaaattaaacagagatatcgttaaagagttgggaactttgaactatttaggtaatgtgagagttgcctatgatggtagaaatactatctactctgttggggagttaccattttcttcaaatgaatttattcttaagtttcccacaacaaaaacaacaacaaccaccaggttaataacataacatcatattaactattttttgattttcatgtactatgttctgttctgttctgattgtgttttgatgtagtgaatgtgagtttaaggttagcatcaggttcgtttcaaggatagacttatgtaatccacaaagctttttacacaccattcaaccacttaatgttgctctcagatcagctccatcagaaatgtaatgattttgattatatgttatgttctgttatgttgttgaaagtggtcaacttaacttttgttgacttttgtttaggtatagtgttgtgggaaggtctttttatcatgacacaatgagtagagctggtgagcttggagatggtgtaatgtattggaaaggtttctatcaaagtttgaggccaactcaattggggctttctcttaacattggtatataaaatatgttgttgtgtgttagtttttagtcttaggtggtttgtttgttttcaccattgtttttttatgatcgttgtagatgtgtcagcaaaggctttttatgaacctattgaggtaactgattttatcttcaaaaactttaatgtgagatacaattcgacgccattggatgatcatgttcgggttcaggtacttgttttgccttttttttgtcatatattacatatttcaacatgattgtgtatttatacactttttaatggattcagctaaggaaaaatttaagaggggttaaagtaacatgtagacatttggatgatacaatgttgttcaaagtttttggggtatcgacagagccattgaacaatttaatgtaagtaacataatgttgtacaaagtgacataatgctgtttcaaattgtttttactaacatgtttctttgttaggtttgatcttgatggtaacacgatttcggttgttacgtactttcaagacaagtacgaaattcagctcgaatatgtgacatggcctgctctgcaagtaggaagtgcaacaaagccgatttacttgcccatagaggtttccatatcattgtttccataacacattttttagtgttatgttaatgttattgtatttctaacatgttagtgctgttataggtttgtagaattgttgaggggcaaagatgctacaagaaactcaaccaaaggcaagtaaccaatctattaagggaaacttgtcaacgaccgtacgaaagggaggaaaccattaggcaaatttttcgacaaaacaattacaatgatcagaatcttgttcgcgattttggaattaatgttgcaaatgacatgacattggttaatgctcgagttttgcctccaccattggtattttctgttatgagattcttcttttgtttaaaaagtaggttctattctttcgatttgaactaatctttttctttttcttctttcattgaagcttttataccatgatactgggaatgaagctactgccaatcctcaactcgggcaatggaatatgatcaataaagtttgtatttatgatgttataattgttttgagttaatttgtcatcattgtatgctcttaaaggatatgattcattcatttttttggtaatgatagaaaatgatcaatggtggccatgtaaaatcttggacttgtgtgaacttctcacatgaaaatccagatattcacaatcgcttttgtgatgaactagtcaatatgtgcatcagtagaggaatggtagggttactcaatctttctgtctcgttatgttttttttcgcgaaattgcataactgacgtttttatcattttggatactcggaataaggctttccaaaccgcgccagtaattccttcgcgcgcttggccagctaacgaaattgaggaggccttgaaatatgttcatgaccaatgcaacatgatactcggaaacaaacaacttcagttgctaataattatcttgcctgatttttcgggttcatatggtaagctacaagacttgtaactatgaagtttgaaatgccattataacattttgcctcttgtagggacaattaaacgagtttgtgaaactgagcttggaattgtttcacaatgctgccggcctaaacatgcagcgaagctcaacaacaagcaatacttggagaatctatcattgaaaatcaataccaaggttcattttatcacaataattatgctctaattaattatttgttgtaggagttaatgttgttatgttggtttattaggttggtgggcgaaatacagtgttaagtgatgctcttaataagagaattccttttgtgtctgatgtcccgacgataatctttggcgcggcttttacacatccaaagcccgaagattactcaagcccttcaatagcagctgtaagtacatacattttactataatgattctcttccattgtttaggttattggatcgatttcttttacttgtattttaggtggttgcctcgatggattggcccgaggtgaccaaatatagagcgttggtatcagcgcaacagcacaccgaggagatcatccaagatctttataaagtaactacagatgataaagggagcatagtccatggaggaatgataaggcgagttaatcaccattgtgtacatggtacatttctctatgtatgttttttctttaactaattttcctttgtttctttcgtcgaaatagggatcatttaattgctttcagccgatcaaccggagccaaacctcaccggattatattctaccggttatttgtgtagcacacttggtaaaatctttagtgttttttcattactctgcctcttaatttactctgttttgtgcagagatggcgttagtgatggacagttcaatcgagtgttgctttacgaaatggatgcgataagaaaggtatttacttacaattatcactacacttatactatgtttggtagcaaggaaaaaaaatttacaaggaatagaaaattaaaaagaaagaaatgataacatatttctttctttcttgtttggaatacaagaaaaatagaaatttggtatatagtaaaattactatattatctttaaaaatattaataccatatttttttgtaaaattatttgtcttttctcttcatttttctttccaatttggaagagaaaaaaattggtgagttccacaccatatttttcttctcacttttctccatttttaccaaacataaatgatttgaggtatttagccatggcaatatctaatctgtttataattacaggcttgttcatcgctcgaggaaggatatcttcctcgagtgacatttgttgctattcagaaaaggtgtcatactcgccttttccctgctgattacaacgatcgcgattcaatggacaagagtggcaacattctaccagcttttagtgtgtgaatcttgtatgtaccaaatatgtttaacataagatttgatttgattggttttactattttgcattttgaaggcactgttgttgatactcatatctgccacccaactcaattcgatttttacctcaaaagtcatgctggaattcaggtccaaaatgtcacctatgattcatcaacgtatgtcattgttaatgttagcttaaaatatgtaatgaatatggtttcttttaaacttttttcgcagggaacaagtcgtcccgctcactaccatgtcttgttcgacgagaacaacttcacagctgatgccttacaagttctcacaaacaatctatgctacacgtacgacattttcattttttttcgctcttcggtttcatcttttgttgttcatttgatttattcttttcttttcaggtatgcaaggtgcacgaaatcagtgtctatcggtacgagctatacgatgtttaatgtttgatttgatcttgtttttgattagcttgatttcatgacttgttgtgtgcagttcctcctgcatattatgcacatttggctgcgattcgtgctcgttgctacatcggagtagcagttgatgaagaagaaactgatgttggcccaagaacttatcaaccccttcaggtgatcaatgggaaccttaaagatgtgatgttctatgtctaagaatattcttagctgtttttttgggggtaaatatgttttatttagttaattggtagatgttattaactatgttttttggtttgatgtggagtttggaggagaatggggatatttggtagttaaaagaaatgttaatttggttggtacatttttgaatggagtgaagttttttcagtacaagaccagagtctctttttgtatgttttagactttttctataataatatattatgatcatcgttcacaaacacttttattttttaatttttaatcacaaaataaaagtaaaattttgttttcaaaaattttatttttgaaatacaaaaatgtgttttgtaactatttttgttttttaattttaaaaataaaaagtagaaatgtgttctgtgaagttcatttttatttttattttgactgatttaagttgggtctagatccgagatcggtttcaggttcaagtcagaggttacgttctgcactatggcctggggggatttgggtcctagtttggtcagattctaaaatattaattaagaaaaaaaattatttaaaaaaatattaaaagtgattttttcttgttttataattttgatttttaatattgaaaaatgaaaactattttatagaacatatgtttaaaaaatatttttacttttctaattttaaaaatagaaaattaattacaaaagtgttaccaaatgttacatatatatttatatagtatagggtaagtctaccccttaaactagtattttagtaaacttcctatcttgtttagtatttaggagagcattttaattttttttatgatcgttatagttatttagggctgttgggcctagctctttcactttgatgggccgctacctcaccttgactctcacattagtatgatattattcgcttcgagtctaagctattatgattttgtttttgggcaccttcccaaaaggcctcatactaatggagaaaaacacttatattcaagacaactcttgtatatgcttccaatgtgggacttgggttgataccccaacaattctcctctcaaaccaaggatcgcatacttgtggtctcccttccaacgaaactaccttatgccgccgctatcaccaagggaactcgccgcctcaccatcacctttgtcaggctgactttcgacacagctcctaacatcgatctccatcttgtaccgccgtaaatataaacgggacacgtcacctgactacctcaatatcagatagactttcgatacaaagcaccatatagatctttaatcgcgaggtcatcacattgaatgattctttcacacatcgtaaatgcagcccactatcccagcgctcttaaacttttggctctgataccacttgttgggccacgctcttctaccttgttaggctgggtatcaacccaagtcccacattggaaattatacaagatgctgtcttggatataagtgttccaccttctccattagtatgaggccttttgggaaggtgcccaaaaataaaactgtgagggcttaggttcaaagcggacaatatcatactaatgtgggagtcaaggtgaggtagcggctcaacaaggtgaaagagcggggcccaacaagtggtatcagggctaaaggtttaagagcgctgggataatgggctgtatttgcgatgtgtggaaataaccttcaatgtgatgacctcgcgattgaagatttatatggtgccttgtatcgaaagtctatctgatattgaggtagtcagatgacgtgtcccgttgataattacggcggtacaagatggagatcggtgttaggacctgtgtcgaaagtcttcttggtaaaggtgatggtcaggcagcgagttcccttggtgataacgacgacataaggtagtttcgctgaaagggaggccacaagtatgtggttcttagtttgagggaaagattgttggggtattaactcaaatctcacattggaagaatagacaagagttgtcttggatataagtgttccaccttctccattagtatgaggtcttttgggaaggtgcccaaaaataaaaccacgagggcttaggcccaaagcgaacaatatcatactaacgggagtcaaggtgatgtagcagcccgacaaggtagaagagcggggcccaacaaggtctgtgtaaatttttaaaaaatttcgaatagtgtataatgttaaaattaagatttatatattatgttggacgcttgataatttttcttaaatatgtggtaaataattgtttaaattttattttcaatattataaattatttaaaaaaatatataatcttaaataactacgatcataacaaaaaaatatgaatgctctaattagtattgtgctttgttattattagattagctatttgtagaccttttccttaagacacatgtcctccacttgtaaggctatatatctcttgtatgaaccattttccatttattagaacaaatcacattttcttagttttatctcactaaatagtttactaaacaatatgcaacaaattattttgtgtatttaatttattattaattcaattaattttcatttgccctcttattaattttaacggccggctgttggtaaaaaaaagtaggattaagtcttcttcttggaccatgtagagacttaattaattacaaacttaattaatgtaatataaattagagcatgactattgaatactagtagtctctaatactttttataggtgacgtctgattaattagcgatattctttaaaaattattttcttaagctatatacgatttgataattaattatactaatagtagtatgatatcgagaaagatgctagacatcaatagtgtaattttcttcaaattataatatgacatagagaattgctaaaatgcactatttgtcttttggcataactaaaagagtgcgacaagtcgtgccaacatattgatggacactaaaaattaaattttttggcactaatttaatcgtgtaaatagcatattttttttcttgtagtgaaagtagtgtatatatataagttacatgtatttgattcttcttatgcaattatgaaattaattgtttaaaaatggtatgtaaaagaatttgcattcaatgtaaaatatagtccgtataactaattaaaaaaatacaaagatagagatggaagaatcctaatttcttgtgtaaaattgagtttattgatgaagtaatattataatttattacataatattatgtcgtttatatattagacgtcatgaatctggcacattaattcaattaattgattattaaaaaaaaaaagaaaaattaatacaaatcaattgatgtaatttgaatgtattgagaatgagtacttgtgcatcctcttattgtagtagtacttggagtagttcgatattctctcgtaatggtttgattagtagcctgatggtggtggtggagacctatagtagtaaggtggaggagagtgtggaggaggaggtgacttgtacacatatggtggtggcggggatggagaaggaggtggaggagacttgtagacgtatggtggtggtggtgacggtgaaggaggtggaggagacttgtagacatagggcggtggtggggatggagaaggtggtgggggagacttgtagatgtacggaggtggaggtgacggtgagggtggtggtggagatttataaacatatggtggtggaggtgagggtgagggtggtggtggtgacttgtagacatatggtggtggaggtgagggtgagggtggtggtggtgacttgtagacatatggtggtggaggtga

SEQ ID NO: 161378 - DNA, 1233 bp, Cannabis sativa
  modified_base (1200)..(1201): a, c, t, g, unknown or other
tttttttttttttttgaagcaaaagaaatcaattttattccatctaccaaaaaaacaatacaaaaacaagctgcaccaacagccaacaccccttacaaagctttaatcaaatccattacaatagactctctttcaaataaatttaacccaaaaccaatttaagctctagtcttaactatcatcttaacatgattactaatggacttagtagaagcacaagtaccttcaaaagatgcaacgatttctataatggacatagcaataataacaactgagtttttcaaccaatttttatcccaacacatcatttcttgtaaggttctaggccactcaaaagaaccaaatcagctagaaatctcagctaaaactcttctagagaaaatacagctaaaaaaagatgggaatgagtctcattctccacctggcaaaaagggtcagcagatgacactttaaagcttgccaagtgatgaaacaatgcttcggcacaacctctctattccacacaaagtgatcatagctgactttatctttgttaatgagggataagtagaatagattagctttgaacttacctaatttgccaccttctaacacaacttgtatatcaatactacctctgagtttaactaatttcttaaaataccaactagcaacagtacagggtcggttctgaattgaaatgggttgtaagcaaaaagaaatttttgggcccttactataaaagataaatagtatttttaaaaattattaaaaaaatatatgtatattttttaaaaggtaattttttttatttgggcccctaaaatgagtgggccctagcgcctatgcccaaggccgaccttgcatcagtattaatcttcacgttccaaaaattagttttgttcatataaacagagttaatacatacgcaatcttgcttagtagaaatagctcaaatgtaattagtcatcaaagctaaattccacttctacctttctttaaaacatagaccaccaaaatcctttggcaaacaaacttgatcccaagaacaccaatgaagcttgctcttatttccactacaaccccacaacaaattttcacatattttatcaatagttgttgtaactttttgaggcaaaataaagattctcatccaataattttttgggcttttttcataaatgtacaataaaaataacataattacaaaaaatgtgcaannaaaaattattttaaaaacttatatattttgaa

SEQ ID NO: 161379 - DNA, 7010 bp, Cannabis sativa
tgtgaggtctgttcttccaactggggaatattgcagagatacacatttcatgtgagatgttcttacttggtcaacttgaatggcctgcatattatcaggactcgtcccttgaatacgaaaaaaggcatcctcactttcattatttgttttgtcatcaatacctttttctgcaagaaatttcctatatcctgcactcttacctccctacaagagaaaaagaagggaagaaatggttatgttgatttttatattaaatctttcggttagtgagattttagaggactattttgaaatagaaacaacattaagtgaaggaaatgcttgggaggtaggaaaaccttgtaaataattaacatctggaatataaagaagaactgatctggctctttatcttgtacaacttgtgcctgaacatgaaacgtatgaggtaaattagagaatattattttgacacgtaaattgataatgtctaacatgggaaaagtgtcttaaacaaattagcatcatattgagaagatagcattgatactcagcatttctcctctaacaaagaagcacattctcatcataattagaccaaaaaagaaaattaacatttttagaaatgttatctgtatcagaggctaggactaaccataacgggatcacccctggttgaatcaacaacggaattcatatgagagataacatctcttctgtcttcctgatatcagaaaatacaattgaataagttataattttataagagatcaccaaggaacttagtaaaaatggtaagtaaaataaggaagcattcctcaaattacatagaaaaggaaccattaagaatttcaacaaagatccttgtctgaaaaatcatatgggttataactcaaaaacattttagcattcacgatcacgcccctagtaatctcataatgaaggtggtcaaaacacatacttgtgcatgataaaccatccttaccagtgtgctctcacaacctagccatgcataaaatagattttcctcccttccattgccagaatacgtatattgcacgacatagcaatcaccactgaaaagctttcgctgttctgaaataggaaccagggacagttcatccccatctacccgccaaacctggattgccaaaaagattgtacgaaaataaagtaaatgatcaaataaaatactggcaaaactgtgttgtgaggtttgtttcagtaaaacttactttaagggttcccctgcaatctataagtggctctatatcttcttcaggaagctctttcacctcataaccattttgcttgaatattgctggaagaagaaaaaatttaattatatcaactgcattgtatcaaaaccttcaaggtcaccacattagtacatatgctgcatttctttgaacttaacaaaagttaatgaaagaattaaacctgccactttttcccggccttcttcaaataaccgaggctcaacctttagaggccaattagcaaagtaagacctaaatttggaagtttctaacccttcagttatcaaagataaatgtgtcccagctgatcttccttggtttctgaggaaatcctgtaaccagctagtcagtaatcacatagaaaatacagataagaattagtcgttagtcgttacaccccatcaaaacaaaagggaattcctcttattgtacacctcaaaattacctattttgatattgtgatgtgatgatagatttcatattcacaaagtaatgataagatgataaattcatgatttcccaattcaaatttgaaacatggaatggtaaaatgaaatcgacaataaagtcactgtcttccatgagtgtatgtttatgtataacagatagtgagggcagaggaagtctcacctctgcagctgaaattgatgtcttccgctctgtgactgaggtaagtcttcccatccaaacaaatatttcagcttcacaatccaacatatagcacttgtctgcctcaagcacttctctagcaaatgaatcactttcaatttgacttagtttaccctgataggttatcctgttgaaaaataataataaaacaccacctaagggaaagaaacgaaatacatttaaaagggaaggccaacaaaactaatttcataattaataggacttgatatggtatactgctaatcaaagttgatgcagttattctctttacatgtattctaagtgtcaattatgacatttgtcaagcagcttgaagagaacaaccatcttattcaattgggacgtaatggagtacatcatagacatagttactgtttgaaaattatacacatgaagcctccatttccaatttaaatacttcctcatatttgaatgaatccgaacaataagactaaactagagtatatgtgtttctacaaacattcttaaacgcaccaaaatagtttcacggattggatatcagactgatcttgaaagaaagaaggtgactcccggggaatgggagcatatccaccaaaaaaactccagaactcacccacttcagaatcgccaacaaactttccatcctctgcaggacttgaccagttaaaaaaatgttttcataaaagcaaacaaggaagaaggaagaagatgccaacctatagttgccacctcacagtttccactatgcttggtatctttgatatattgtacaacctccaaagctttagctctttcttgagtgctagaattgcacccactaaagaggaatatttttgatgcagtatcaagaacgaacacatcattgtggttcaaagatgaccgagaaaatggtacctggtgaatatgaaaagcatacagatcggtaaagacacacacacatgaaagtaatttatgtgattcttgaatttttcctattactatttaaatagaaaaataaagtaaactgacagaaataagccgttgttacatcctcaaaatattgatggatgcaaacctattgaacttaacaacagcaatggcaattcttaaacaacatacagttaataatatacatcttacttctttaacatgaacaacatgatcccctttgcaagttaacaatctgacttcatatgtgtcctcatttgagtgccctttttgagaagaatatacaccttcaataggtataatacagggtttgaagtatgaaagaaacttttctgtttcttggccttgaagttccctgtactgtacagagcaagaccctagggcagcatctagttcaagtgctttgtctgatgccaaatctgagtccacctgccaatgagattaccaaacttaaaacgtcatgaagatttggtgattacatcaatgtccaatgtttgttcaaattttatgtagttcctcaaatataatatctcaatagattctgtgatgcaactgtgatattcatttagtgaattgcgttactgatataagttttaaaggtgtctcctagatatctcattcacatttttttaagaaaaatacccaataatgtgaaacagctttaaatctatggaagcatgaacgaaaatttatggatttttctgccttaaaattgacaactaacaattaattaaatgtgtgccacaaaaaaaaaaataatcaaatgtgcaatagtaattgagtgataaaggacaggaaaaagaataccttgtttgtgtcatttcctagccaatagtgaatgtcatgcagaggaggcccactttttggtataattgtctgtctcaggcaataagcaagtgaagttgtcaaattattagcatatcagaagaaatattggagtgaatatgttgcaaatatttgatctagcgggacggatcattacatgatctgaatcaggttggatcatagccggatcagatccgacccgatccatttacactaatacaattaaagttgtagtgaaaaaaaaaaatcttaacaaatttctgatatcaactttgattcagagcaagtgaataagaaaacaaaagagagagtgagagagaatcttcacgcaagcattaagacttcatggccttaatggaaaaataattagcaaatctgaatataacttacatgcaagataagatatgaatttccgctgtagaacttcccatatgaagtctttggaacagcaaccagttgaaggttctccacacaccaaatttctaaaccactagcattagaatataaggatgaagcaacaaaatttagcagagaatcaacattagttttgtatttgcatatgtaagaaaagttagtacaaggcgtagctacaaactagaaaacaattttgagagaagaagtcgccggtattaggtgaacatggattacacagaaataagtaatggtatgtctaatctatatcataacagtatcaattttcatccattcttggctatacatttatgacttaaatgaacttgagcatgagccagttttcatgttaagagagttaagtactattgttcaaccagtggcaaaggaatcaaattgatactataaagaagctttcacatgagatcttatgttgtacagtattattatttcataacactatatgtttccagtaaccagagaaaaaatctgaaacactatgctagtgtatcaaaaactcttaatgcaatgataatatatatagatacatataattcaataatgtaaaaaacacacacacaagaaaggatacggttttgttcctgctccttgaaatgcttgatctgtgtctttagcatagagagacattgtcttgcatagctctggtgcccccacagcatatgtttgcaataacttctttactccaatctctgatggttccaaaaaagaaaaagaactaaattgtgaaggatgaatctgtgtttttcagtttaactggcaaaactactcaataaaacagaacttaataataattagttcagcaaaaagtcatgccaccaaatatgcactttcattttggtcatgtaatccaaaactgaccgcataaagacagcaaagcacccaagaacaatgagagcagtcaatccaaaacataataatgggaatccaagacaagtctttctacctatcaaaaaacgagtcaacttgtagctgtgtgatactattactcagtacaataagaaacttgcagagtttcttatctttaaatcattttgataaagaagcatactttggagaaatgtatttgttttctccaaaaatctgggggttaagtaaggaaagcaatattaaggaggtttataagaccagaaaattgattattttgtgtaataaaataacgatccttatatgaacataactaattgcttcatgggtcagtttacaaagtctgcatttctcttgcatagtctttgcaagttctcctatttatgtttttactaatttgggaaaatcagcttttagataatctgaaatacaagtgttcctcctttcattgagtaaagaaggagctacagaagcccaaacaatatagatatataaatatcaaacaaaccccagaaatcaaaaagtgggagctacaaaaaaaaaatgatattcaaacttgaggggatgtgaaataaacaaagagtggcactaataaagttagcgagtaaactcttaccagtttaattttcttttctgtagcaaaacaaccaagaggaagctgattacttgaggtgttaatgagcagaaaatacaaagagagggaacagagaaaagccaaaggatattcctttgttctagtgcatttgatgattgtttgacttgaaaaagatggttggagtggagtttagagataaattgttattaaagcaaacaaagaatgctggtgaaaaaccaaagaaagggaaaggtaggaattaaacacaaacaaatggcatgctttgattttctcattatctccagctaatcagggccccacttggccactactattcccaaacatggcatgcccaagtgaaagtgacgtggtaaagaaagatcattagaggtaggttggtgtcgttgctgctttctgcttgtcgtttattcattgagcgtatattcattttgtggctatgcctatgtatgtacatgtgaagtgaaagaaaatgttttaccccaccttggatccgaagtactttgttcaaggatttgatgatttaatagatggggttcattgattaagtttaacctttacttgggtcaattttattgtcttttcttaatatcttagctgtttttctccaagtagaagtaaaagcgtcaccgattatttgtgcggcatgtcttgttggcctgtaaaagttttttctttttcaattagtctctccattttaatatgttggtactggtattacggcatggatataggagttgaatataatgtatagttaggtataatgctaatctctctagtcaaaactcaaaattaacctcaatacttttttcagtgttgattttttctattagcttttatagggttatgctatttagattggcactcactatataaactttactgatatttcttctaactcctaattttgagctttaggtaatattttatttaaattgaaagataaaaattttattctaacttgtgtgaccttataactgaaaatgaagctatatacaggctctttacaaacataaccataccataaatgataataattaaattacatcctttcctataaaggaaatcgccagttaattaaccatagataattagatatattttagttaataattatatggtaaacttttcagcttgccggaaaaatatttgtcgtctattagattttttgtctttagctgtcatttaattttagacatgaatctatattggtctataaatagtcacatgatcttaaaacattaaacaacagactcacttcgtagagtcgcatgtctatcttattataactaaaaataaataaggcacaagtatagataggtatctttaagtattttacctaccatatttttttactgatgggcgcatatgaggaattgaggttcaagcactttgtattagtgtcatctgtacaccatgcaatgggtttgctcttgaaaaaccgtgtttttgcaaatgtc

SEQ ID NO: 161380 - DNA, 3208 bp, Cannabis sativa
  modified_base (2867)..(2871): a, c, t, g, unknown or other
gctcaccttcaaacggcttcatcggccgccacttctttggactaaaatccttcccttctccggctggagactacagcttctttctgtaccaatgggctttcgcaatagcagccgccggtatcacaagcggctctatcgcggagagaactcaattcgtcgcttatcttttgtattcctccttcttaacagcattcgtctatcccgtagtatcccactggttctggtcagcagatgggtgggccagtccgacccgacccggaaaagacttcttattcggatctggagcgatcgactttgctggttccggtgtggttcacatggttggaggcatagccggtctatggggagccttcatcgaaggtcccagactcggacggttcgacaggtcaggtcgttcagttgtgctacgtggccacagcgcgtcacttgtagttctcggttcttttcttctatggttcgggtggtacggattcaacccgggttcgtttctgattatagtaaagagctacggtactacgaaccaacatgggacattttacggacaatggagtgcgattgggaggacagctgtcacgacgacattggctggctcaacagctgcactcaccactttattcgggaaacggttactggtgggtcattggaacgtcatcgatgtttgcaacggtctcctcggtggcttcgccgctataacatcgggttgttcggtggtggagccatgggcagcaatcgtctgcggcttcgttgcttcctgggtcctaatcggcttcaacaagttagccgagaagctgagatacgatgacccgttggaagcggctcagctacacggcgggtgcggcgcgtggggattgatattcacgggtttgtttgctacaaaagagtatgtggctgaggtttactccggtggaccagcggacaggccgtacgggctgttgatgggcggaggatggagattactggcggcgcaagtggttcaggtgatggtggtggcaggttgggtcacggccacgatgggcccacttttttacggtttgaacaagttgaagctgttgaggatatcgagggatgatgagatggcgggtttggatttgacgagacacggtggatttgcttacgtgtaccatgatgaagatccctctattagacctgatcatcatcagtttacgatgaggaagatcgagcctaccaactctaatttcatgagcccagccaataacaattctaatactgatgatgatgataataataatcatgtaccatcttccaccactattaatgtctaaaaatctcttatgtataatttatatttaattagatatatatttcacatttatcttttgtgcttaattatattgccttctaattgtatatttagtgtaagtttaatgctgtatctgatgagcatgatgtcctttttcatatacacacaatatatcttattagtgaacaatttatatatatatatatatatttttaatttgatgaatcagtattgtattcattgaactaaaaactttaacttgttcagcaccaatccccggcctgagtaaaatctgctaaataattataaactttccatccattccttatatatttgagtaatctttttaaagttacttcgtgtaattaagtctatgaattgagaggttccaatatttgtcatttctactactccaaattatataaatgagtgcagcaattgccatcatatgtacacctgcttcctgatcaaattttccagtttgcaaccaaattttcagattcgaaaggcaaggtgaacatttagagcactgaaaaaaataaatggtcaattgtttcctcttctaataacccacattccatacaccacgagacatttcaaatactgaatttatgcagcaggacctttgtttgaatcttttgtaacataactaaccatcgaatgaattggtgcttgggaataattgctcttccccaaacttccctgtgccaattcactgctgcggttcctattagtggattatattactatgttatgtatgcacattttttttttatattcttcgtatatgtatatgtatttattatatgaaaggagcaattacatatttatatatattcgtagatgatagaattttgctacaactatcatcaagaggcataaattaatagcaattattttctgagaatcaattctcagaaaataattgctgttactatcatcaattctcagagctcccataggtccaactatatatagtttgacattagttattatctgtttctcgaaaacaataattattatgcatatatgcttaattagttatagttaaagtttttactagtataagcaaataattgagtaacatgatatcacgtactatatgacgattgatcttacttaatttagtatattcaactatataaatgtacaaatatatctgctcccactataatatatatatttatattgatgagcgtgcaaatattgatcagccaagaggacatatatgaaattattaatatatatgtcttagctagaatgtgaatttaatttataggtatcgtgtctgtggtttataactctttttttcccttttttttaaaaaaaaaaaaaaaaattgtgatcagccaagaggacgtatatgaaattattaatatatctgcaatcaacgcatgatcctccttgaatcagaatagctcatagtttaaccgaaaagaatgatttatcaaaccatcactataaaaaaatgtcacttttagctagagacaactttttagtcacaacaaaatttttttgtagctaaatgcgacttttggtcacaacaaaaaaattacttgtgactgaacatattatttagacacaaattgtcactaatttaattttnnnnncaacaagtattgtgactaaaaactgttagataaattaataataaattaacccaagatcaatttgtatataatatagaacacaataacaatatataataattatgtatatgcgtacctgattgatccatagtaattaccgcaattcgataatacaatactgtcaactaagtcttcctccctagatctttaaatcagaagcagtttatttatctgattatcaaaaagtatacaattattatgacaatatgtatttatagagttagaggggacttagctacatagtcctagttggattgggtctgctcatcaaagtttcagttaattagaaaagcccaca

SEQ ID NO: 161381 - DNA, 1055 bp, Cannabis sativa
aaaagtgcttcacatattttttagctaggcaaggagttttttgaaaaaagtccctacgcccatatatttgacatgatacaaaaatttacctacaataatatgcaatataaaatagtaatggttggacactatcgatattccttagccatatatattgatatttataaagatatatatgtatatatatatatatatattaaaatttgtaatagatcactttctttatggcttccctgacaaatattacttgccctttttcataaagtgcagggttggcattattctattcgcctcggcctttacatataattaatctccaatataagttaattactcatttttcgcttaattaattaagggttatcaatattttaaatttttattgtaataatcattattcatgagtctacttaaaaggtatcacacaccaatcaattactttacatccaaaaaaaatataataataaacaataatcgatttctaataaaaactagagaaatgctagttgagtaaactttgtaatattgacaaaatttgcgtaaattagtaataatgacacaatttacaagcttaaattagtaattaggatgaagacctataaacatatattaatgacgggaatttgttatatattctcatctactctcgaaattattgacaacttataaagataagaaagagaaaataagagaatcacatgcctggaaaaggaatattagaagaaataaaggcattccgagcttttgctttttgtatataattttctaaacattaatccatgatcactctttcaccagatgctattcttgttaaccgatcaatatattcgcagcacatacctaaattccaacaaggctgcgctgcttataagctaggtaaactacatttatgtatactaaaactaacaaacaaaccgcgcttcacgtgcagttatagtttatttaatcatgattgttaattccatttttggcatatttaattgacaaattttttttattatttaatgtatattttggctggagtgtttaatgtatatctaaacttggaaggaaag

SEQ ID NO: 161382 - DNA, 2049 bp, Cannabis sativa
  modified_base (1413)..(1426): a, c, t, g, unknown or other
  modified_base (1870)..(1881): a, c, t, g, unknown or other
ttttttttttttttttaatttggtcacactttctaagttaaaggacctacactattggtttggtcaaattgcatggacagtactatcataatcaaatgattaacgtctccactaagtttcatatatacatataatatttggattaagtgtctaaattaataaatgtatatttgaatttgtttttaaccgttcttatttttatcggaatctacgactctttttttctttttcttttttgaaatgccgaatctacaacttaaataagtattaattaattttaaaaaaaaataaaaattaaatattttgcatcgtgaatgtgtatgatgtgtatgattacataatcaaacatgttttagatttgtctaagatacatgaatataaccttacaaatagttgatcgtgttacaattgccaatgtgccatttctagaatattgcataattataaaaagaataaaattgtatttgtaatttgtagctaatgagatataaggaaaaactttatatgatgtcaaggagcattgttatttggcattcctggtacttagcatttttagagatgttgtcctgtaattggttagtaatagtccctaaaactatatgagacccgatacttaattaaactaatagtgataataacatataaaaaaaatgctagacaccactgatattttttcgcatttctccactcatttgtcatatttagtttatctcactcaaatttcttgtccactgcaaatttaaaaaatagtacattaattaaaaataaaatataaatcttataaatatatttaaaatttttccaaacttatttatttttatatcatcatatataataagttggatgtttttttttttttttttttgaaattgtaactttagaaaacaagctacaatttagagtggtgagggatagaaccattccatactaaatctttatcaagccctaaagctaatttggccacattatgagcatctctgttaaactctctaggaatacgcctaatgaaacattaggaaatgttgacaaagagtgattaatatccattataacatcaaaaaggactgataaatctctattcttgtctaaactttttttaactaatactttagaatcagactcaaccatcaagataggataacatattgcactacaccatcgaagagctgtcctgagagcaagaccttcagcatgagttgactctagggccccggggagagtagttgcaactccagctaccacctgattgcaagcatctttgatgacagctattaacgcagattttcgttaactaaatttgtgcctcacgattatgattcatcacagaaaatataaaagctatagaaaaataaaatatgaacaccagtttttttatgtgattttgctgttaaaaattctgcatagtccacgagnnnnnnnnnnnnnnatttctgagtatttttttagggcctcttgcataagattttttcgtccttttttttgagattgtttgccactatttataattgcatagtggcagttaattacaaggctgaccaaaacgtaattacagtcattataccttaaatagtgggatctgattacatatcatgaaatgtaaatgcggtgcatgattttgaaaatcatttagctgtgattttcccgcttttgatgggttacaaatatcgtgtattaaacacgtctttaattgttgaatttggagatgtctcgacagaactagattgttgtgatcccaatggcgagctggaaccattcttctttctgaggtcgacaagatgtgtctttcgttgatcgcgggtatacagaaatcttctgacttgccagggttatgagcctcgctcatggtagttggatgaaactataggaagtnnnnnnnnnnnnagatggtcatctcgcattcttgtactccaagccggtctgactttgacacttaatttgcttattgtagccaaggtatgtgttacttttctccggtgcctcgctattctccctgtaacgccctaatgctaaggcacgctacagtgctttttcaaatattgtgcaatcttt

SEQ ID NO: 161383 - DNA, 5485 bp, Cannabis sativa
aaaaaaaaaaaaaaaaactcttgccttaatttactgcaaaatttcagaattaccaaagtcaatgtcatgaccataattaatgccattccttcggatgattttgggtaccaatagaactttattaataactttctaagctttcttcatttgatattttcacacactgaaaaagtaatacttctatatatacacactaaactactaaagacattataataaatatattacacatattgatgttattcatttagttcatgtcccagagagaacctgaagtgttccaagtgtcacattgatcataatcatgatgaccagggacaatagtactccaatattgatcatgatctaccatactattattacattcatcatagcatttcatttcattactatcttgctcatcattattagaaagtactgataatgatatccaataatctgataatcgattctcatatggtgaacttgttagttcaaaatctcctgatgataataataatccagacccatcagaacaaccatcccaactactgcttttgcttccccataaattctcatcatattcatcactctcacacttccatattttatcaccaatagcagtagtagcaatatcttctttgcctttctcttcttgattttgtgctaatttttttcttaaataagttctccagtaattctttatctcattatcagttcttcctggcaaaattctcgcgattttcgaccatctgacaataaaaatagaaaaagaattattaggatactaatactaatttttgcattttatcaaggcttgctaataataaattaatcatcatcatgctcaaccagaaaccttacttgttaccccatctctcatgaagttgaatgatgatattctcctcttcagcactaatttgatcatgctttagatttggacgaagatagttaagccaccttagcctgcaactcttaccactccttcttaaacctacaaatcaataataaaggcactaatcaatatcactttctttaaaactatttatatactcatatatatatatatataaatgtaaatatatacctgaggctttggctaaggcatcccatctcttctctcccataagttgtacaaaagaaatgagtctttcatcttcttcctcaagccatgtccctttacgaagttgatcatgctctccttgcatggctcctatttgaaaatccatattattaatttgtttgcgacaaaaaaatgagagttatgaagtccctttttataccacaaaagaatgaagcaaaagatttggtgggaaaaaagcagagctatacgtgtgaccagaaacacttactagtagtttttgtgggagctccacccaccattggcttacataatatttaggctaatattattcaataataaggtgatgatctttaatatttaggtcactctcatttgtctaattatatatctttccttgagctaaggatatgggatatgtagttctatcttcccttgttgcatcaccttttcttattttttttttcttttttggcattcatatttcaaaggctgtccttcaccttttaggacccaaaacaatacttaattattatattattgtagtttgcagataggattttttgtctctaccagttatgtaaagtaatagaaaatgaaaatttaaggaacaagataatgttttagtaggttatgcagaaaagggtaagatttgaatcttgggatagattttctctctactttaacatatgccgctgatcacgttccctatagaatgtgtgaatttctttaatggcctcttcaagttaatgttactgtagttttaatttccttatcatcattttttatcttaggaaatgcatctaattccccctccttaaccagaaaaataagttttagtgaacataatataataatattattaaatacaactactcgatgaactttgaatagatatatttgatagtctcgtacagttttttattattccaatcattaaaacaaaagttcaattatctttcaaacaccatggtccatcacactattaatttcctatagactttggtttgactctaattggtgtgaagagaagaacaatagtttatcaagtgaccaaacatcttacggtcaaattatgaagaacaaaaccatgaaaggaaacgttttccaaaagaaaacagcttgtgggagtaaaagaaaatagctcttacaatatgacaaacccttcaacaacatgcaccaaacaagtgaaatttgttctaacacttgcaatgattgaatttttatttcttattggaggtttagtgaatagaaaattagttgtatttgtatcattttgtttctgaaatcaatttaaaacgtctttgttacatcttttcacctaaggcctcgtagcagagtacccagagagctcctttctctggctatgcaatagggcaaaactaatctaatatttattcattttaagtaatttctaacatttactacagcatgttggtgtacttcattttgttttctgcaaatcattttgcagtccgagaatcaaattgaaaaacttcaagatcatttgagtaaaacaagaagagactaatagcaaatattaaaaagcaaagaaataaaattaaaaggaactggcgctgcgtttttattgacatttagtacataattgttgtatgtatctaaacacaaagaaaagggagatcttatatagccactcttccaggttaggctttcaattgattgcaagaataccaataagaaacaaaattttgagcccaaaactttcagcaatttgttctgcagatcaatgatgctaacgatcaatgaaagatttattcataaggttgacagcatcatccatgaactgcataagggaattaggagccaatccattagtcaagacaggctaggaagcagaaatgtcgatgatgatcgtgattgagaagttagaaaagacgattaatgcaaatgttttcgatacacagaaacagcagcagagcaaaaaccgcaagatccccgtaaattaaagggcttatatttgttctctggactttctttgacaagcataggaactcattcatgtctactttcaaaaacgcatcaccaactgtttaattctcctctcaagaaaattaaaactggaatgaatcttagacctttttagttgattaattaaacgttttaaacaagcaggcatctaatcttggattctttatttggtgttgaaatagatatagtttcaacaattttaattcataagcaaaagtgaattcaagaataaggagttctacctttccaagcaacttaagctctcttccaactggttccaaaaatttcaggtcaacctcaacaggccatacctataagcaaaagactgatcaaataaaatggtgactgaaaattgaactaggtgagataaataaataaataaataaataaaaagggacaaaacacaagttactaagtagataagaagcaaaacatcaagaaaaatactaataatagaataaatttcagctctactcttcaagtttgtacaaaatataaaacgaataatcttggacgaaaaaacttcgaaggacaatactgaacacaacttgaaggaaacttgtatcaatcagttacaagaaatcataggtaagataatcatacagttcattataagaaaaaaagataacagcacaaacttggttaacggcacactttggtatgttcttcagtaggaaacagccttaaatagaaaacaagcatagcacaaacttagttgagtcttttgtagactttaatgaaaatattcattaacatacaacttttcaaaaagcattattgtaaaataacatggtataccaaaattacactaagcagcctaaaacgatcctgaagcgaccctaaatttacactggaattagtttattaatttcaaacattcatattgttagtttaccaaattacccagctacaggcacaaggttctttccacattacaagtagaatatgagaaaaaaatattagcaaaataaattatcaaaagttatatattccagcaatccaaaaatcacattaagccaccctaaaacgactttaaatttacagtggttaaattgcaaatttcacaggtagcaaaaatatactaaacaactcaattcaacataataaaaatgctcctacatacacattggccaaaaatatactaaattaaaaaactttgaaaaaccccaaatgcatcaaatacaattatattcattgaaagcaaagaagtgaaagaaaataaataaccttgagaccaagtaatttgatgggcgtaatctgccctgggacgatgcaatcagggccagctgattctacaatagcttctgaagctaagccgttcccaactggattcgactcctgtccagtaaaaaaaatccgtatcagcaaacaaaacccatgaaacgataaccaataacatctattatttcattctttcatttgagaaaagaaaagtgaagcagaaaagagaggagaaggtaggaaccttcatgacgaagagggcataattggaagtaggagtattagcgacgcggagaataggagaatggttgattctggggaggggtttgacagaagtgtttctccatggtacgtccttctgcaacgaggtagcggagcctcctttacgggacatggctttcttcttcttcttcttcttcaggtaggttaggtacttctggataaagagcagaacttcaaccacgtttcggttctatgattttttttttaaaaaaaaattaatccccaaataataccatatttaaataatgtttttatataaataaataaacaaataacttcattctaataaaaatactagttagattggagatggataaaaatttaactgaataatataaagagacaaaatttttagttattcacttttatattataatggtaatggagttacgtctaaagaattataaaagaattaattaagaaaataactcaaatttctagagatgctccaacattgtgagaacttagtaaaatgtaaaaagtgtgctagagaaattttccctttataaggaatgaagccctattaaaatattaataagataatacaaaaaatatggaaaattcactttggattgatcttggccttaaggatgatctaagggtgaaaattgactcttgatgaaaattgtcaatttttggagtttgaatttcctccgacggatcgtttttcaggtgatttgtggaaaaaaggcgcttgtcttggggataaattttggactttaaaattgtcaatgtgtgtttggatatcaggtggtaattacatatgaattcctaatatcttgtttgacaaaattgttagtaaatccatggaaaaataatattttttagtagctaatgtttaatatcgaaaattttcagtaattacacagtgtaattacatccaattctcatgggggaccatgagaattggagagtgtaattggaacccctcaa

SEQ ID NO: 161384 - DNA, 2444 bp, Cannabis sativa
  modified_base (2381)..(2389): a, c, t, g, unknown or other
cgcgattacgccggggaggggtttccctgggtttggtggagttatccgtgggggtgggggtgtggtgtgggcggcgtgggctgtgggtggggttggagagttccaggttgtggtggcggagcttcttgccatgtgtacgggtctgttgtgggcggccagattggggtacaaggtgatgcgggttgagacagattcatctattgtgagctcttggattaataatctgaatcctatatattatgtttaaatcaattgttgaggagattatttttcttttagctgctgctggtggtggttcttgttgtgccatcttgcgtgatgcgaatggtgtgacccatgaactagcaaagtctgttactagttcggtaggagttcaattgtggacggatgcttgtcctagatttattagtactcctgtaacagctgatgttatttaattgattacatgctttctctcaacaaaaaatgtagatttatatatacttgaatttttataatattaaaggttaattaataaatacttgagaaaaaaagttaataattaatgtagatagaatactaattctttaactttaacataattttctactgagtaataaaattaaattgatgatgtggttgtaattaattggtgggatagggtagagacaacatcttggggacatgtgttttttttccctccaaggtgacgttaatcaacctagaaaaattatatcctaatttataattttataatattgtatattgtacttattgtaaacatctacgaaaggacattgtaattgggttatgtgcacaactcctactgagaaaaaaaaattaacatgaaaatttaaatatttttatatttaataatcatatactaaaataataaaaaacttcataaatatttttttataacacaaatccttacaaaatttaaataaatttacttgaaatgattataatttctatttaaaagacataataaatatttttataacaattaagcctccatatataaagtaaaaattctaaatttgtcacttgacatctcacttgttttttaaaattttttaaataatttatagtgttcaaaataatattcaaaatagtatgtcacactcattttttttttcgtatataagtgactgtttaaatcttatttttgagggtataattaattatttaaaaaaaatcaaaatggatagaatgtttactataaatataattataaatttatgatataagctgtcatttaaaaaaccaagttataatatgtctccacatatcgaaaatataaatcgttagtacggtaggagctagcgaaagtatggctagtaatttgtgttattgtgtcgtgttcgtgtcgatagatttatgacacgtacggcatgattaaagtaaacataaacacgacacgtttattattaaatgtgtcaaaacctgaaatacgaacatgacaccattaattcgtaggtcacacaacatgacacgacaacacgattatcattataaatacaaaaatttgagttttttttttttttataaaatataagaaaattaattcgtgttatcatgtcaacatgattattacctgacacaattattaaatgtgtcgacatgactatgacacgatacaattaaggtaaacacgaacacaacacaattattaaacgtatcagaaacttaaacacgaacacaaaacaattataaaatgtatcagaaactcaaactcaaacacaaacaacacacaattattaaacgtgtaatccaaacccatttatttgtgtcattttcgagtcgtgtcgtcgtgtcgtgacccatattgccagctctaagcgaaagtgatgagctatgaattttctatatatacacattacgcgtaaatataaaattaattagagaagtgtttgaaagcactaatagtgcttagactatctctaattgttaaattttagaggatgattgcttatgtgcattgcttatttggcaaaaacaaaaggatactataccattagagttaaatatgtgttatcatagaaaattatattgaggccactacacgacaatgatgctttgcttttaaaaaagataaaaaattaaagataaataagtagtgtgaatatttataattaaaacaaataataatgtctgagatcataatttaacattttttaaaagtactatatatatattattggagtgtttgtagaattaagagtgtcaaaattggtgtggaagagagataaaataaaatattatatttttgcatgatatggagtttttagcattttaagaaaatattattattggagatgctcttaattagtacacaatgtatcaatatcgctattggtgggttccatatcgattgtttaatgggttaatttcacaaatgnnnnnnnnnaacaaaaaaataacaaaaatacggtttcacggagttttaaatatttttacgattt

SEQ ID NO: 161385 - DNA, 2997 bp, Cannabis sativa
gaaaacaatgtatggggcaatagcaggacagctttgtccacttaccataaacaatctccaatagcagtgaaaaaggtggcattaagggacttgcaaaatgataacagaaggttcatatcttatggtccggagagttcatgtataacaggaggaacagtgatggacagtaatagtatcaaggtttttggaactaagatactcacctccgaatgcccttgtagccctcctccgcgcaagcagtccttggagggcaatggtttaaatgaactcgaagcggatgctggaataagccttgatttggaactaggtaaacgaagaaatcagaacattccagaagataatgctgtttctgttaatttgaaacggtatttacaaaagcaaccaaacctacctgagcagccgaacaagaaaccggatcatggggcatcatatccacctgcatttgcaccaccttctgctgcttctgtaattgcttcacctggtaagcctcttatacttacactatgttgctatctctgatgataaattctctgccttgcctgccttcactgacttctgatacagcaaacactgaagggaaaagtgatcaggagaggatggaacgattcattcatctgcagaaagttctgaagcagtgtgaggaatctgatcagagggactacattcaaagtaagtcgcgatgttccgtagattgtatctaaagggttttttctttttctccttttcttttcctcataatcattgccagtgctgaaaatgctctttttggttactctgttagtgctctttcgtttatctccgcttgaacttagcagacatgccgttgagctggagaaaaggtcaatgcaactatcagttgaggaaggtacttattatgtttatcaaagtaagaaatttttaggaagtaatgttgttatttctagggaactatacttagcatcgagtctgaattgtttcttctttttcaaatataatatgggttatgactttaaatgttaaaggaagaataatgataatagagataagtattcacaatttcttctatgctagttgcctttgtgtttgtccaaccacccaagcatgatttttcatgataaagagatcatttttttaccttgattgtcaatgtaagaaatatcaaattaactagtatagtgacaatacgtaatatagtatgacaaaaataatattgtcggcaatatcatgagattgatggctctgaaaatccactatcaagatcaagctgtatgtagaggttgaaattaaatttccttatacgccacttttgaactcatggaattttctgtatgtcatgagagatatttttcttgctgagtaggagataatggtgaatggcaaaacaagtggcctttcacctttcaaatacagattttttttttaatgttttgacaattctactaaggacaagacatgagctatgttagagaacatggtccacagtagcccattgttcaaagcacgagcttgtgagagcctttaacctgtctctttttcctggtcccaatgaatattactactcatttattaaacgcatgatttccctctcagcatatcctcaatattctgtcattttcagatgcccattattgatccctttaagtggcaaacaattagtataaaaaaaaaaaaaaaaaaaaaagaagaaacacaaacacccaagtgttgggtttggcttgttttgctttctctatctctagtgtgccaatttgcacatgtttgtattattgattgtcacttcttgcgactatattatggagttcacttaattgggtagtgattattaatctagacgtaatattaatatgtattggttaggatcaagagtacttatcttaaaattacttcttatgtttattgttttaatataataaaaagtatgaaatcacatgttgctatcattacagctagagagatccaaaggatgagggcgatggatatactgggagtggggacatcttccaatgatcgttcacctatttttgacaagagttaatccaaaaagtgaaaaatggtataacaatttacttgtctaagtaaatcattcaaaattgtgatatttaaaatatatttaaacaggtgaacgagtttgagtattttccagctcagttggtgactaatcgtctgataagtgataactatatttattttactagtttgagtaaaatttatgcaagtttaagacaaagcattgtatgtacgaatcacagttgggttaggtataaagtagttagtttcgtgggataacttctctttgggatcatatactactcaaatgtctcatgccatgcatattgatttttgtgagatggtactttagaaattttcaatctagttttaaatgcatactttttattcttccttcttacatttaaaataaaaataaaatatattttaaatattataatacaaaaatatagaatctttataataaaaaaattataatctttaaaataaaaaaataaaaaaatttatattgtttaaataaatataaaattaaattattgtaattaacaaaaagttgtataaaaacattaataaaaaataatgtgaaagaattttcttaaaaaaatatatttcttttctaaaatcgtcttctaccacgtgttatataagtaccctaaaaaagtattatttaacacaaagtaatatatatatattataataagacaaagtcatcaatttgatgagttgtcttattatattaatatattataaccatatcttaaaatgtaataattaatatattttttctatgtataataattaatatttaagtaatgaaaatattctttcaaaaaaaaaagaaaaaaagaaaaaaaaaaagtaatgaaatattatttttctcatattattttgtaatgattctaagaaaaaggaagctcttagggaaatttataaaaatattgaaatttgagttaatttttataaaaatactgtcatacgtaaaagtttttaaaatactgtgtttttataaaa

SEQ ID NO: 161386 - DNA, 2141 bp, Cannabis sativa
catgtgtttatatgatgcaggtgtaagcatgggatttgtagccattatggctacaatcggtttaatgttttggggaatgaagaaaagaaagttaacaaagctaagagaaaaattctttgaacaaaatggaggcataatgttacaacaaagattttcaagccacagaggatctaaggatacaactaaaattttcactttggaagaaatcaagaaagcaacaaacaatttccatgaaagcagaatccttggagagggaggttatggaatagtttataaaggagaattgatggaaaataaatttgttgcaatcaagaagtcaaaggtgggcattcaaacacaaattgaacaattcatcaatgagatgattgttcttatgcagattaatcacaagaatgtggttaaactctttggatgttgtttggagactgaagttcctttgttagtgtatgaatttattacaaatggcaatctttttgagcatattcaaaacataagcaacgaattttcaccactttcatgggagttgagattaaagatagcctcagaaactgcaggagctcttgcttatttgcacagccagactataacacaaatcatacatagagatgtgaagacagcgaacatacttttggacgaaaattacacagcaaaagtgtctgatttcggagcttctcgattgaatcctcttgaccaagatcaacttcaaacacttgtgcaaggaacatttggatacttagatccagaatacatgtattcaagcaacctaactgataaaagtgatgtatatagttttggagttgtgttagcggaattattaacaagcatgaaggccattgattttagaagagacgagaatgacagaaatcttgctaattattttgtctctgctttgaaaggtgatagaatacttgatatttttgatgctgatattgttagtgatgcaaatgttaaagctttgatggaagttgcaaatcttgctggtagatgtttgagggtgaaaagtgatgaaaggcctacaatgaaagaagtggcaatggaattagaggggttaagagctatggaaaagcatcaacaaagagaagctaattttcccactagagagacaaagtacttagttgaatcacctttgtaccccaactgtattcacaacgtggatggtgaatcaataaataatacttctgctgactatgtgaacatccagaatgaactcttgaattcatacaatagtgggcgttaagtgttaccagggacaagaagcgcttggcctagcggcggggctcccggccaagcactccttggtctgggggttggagaggttcgagtaggagcttgagccaaattctgtttatatacttaggttgtcaccattagtggtggtgtatcccactttatggtggtgtacaacattcattagacattaatatgttgtaattgaattatttagatttgtatttagtaatgtctttatagtatttctaacaagattaatgcctttatatctaatctattaaaaaagcatgtgataggattcaacaggaaatttagtgtgtgtgttatttattaacttttagggaagtttatcacgatgattataggacctagtgtatatttgacctgcttaattattcttcatgcagaaagagaaaactaactagaaaagttaacaagtaattattaatctttatgtaaataattaaaaacaattacttttattttatttgtatttatagggaggaaagaatgattatgttctaaatatatgggttaattgtggtaaaacactcaaaactctcactttgctagcaactaatctcaaaaatctaaattttaatggcaaaatctccaaaactcatattctgttaccagtttaccacttcaatccaattttagctgttaactgacatgttagattatatatatgtacacagtgtacacgttacacaatcttattagtccacttaaataaaaaaaaaaatttaaaaaaaaaataaatattttaaatggcaaaaattaaaaaataaatcatattaaaattaaattttgttaaaaaatacttatttttttttcttcttctttctcttcgtaacccccttgaaagagtattgaatttctaatactcgagcttgagcaagaagacaatg

SEQ ID NO: 161387 - DNA, 4342 bp, Cannabis sativa
taatctcctcaagatttctatttatatgtttcctcttttaggccacttggtttggagacctggaagcaatgggaagttttctcttaaatctatttagttgacttttaataagaaaagattttagggacatcaacttctgtttgtgaagctttggagccttcaaatataggagcacattaagttgtttatctagaaattgtgcaataatactctgtctataggtgataaaatgtatcaaatttttaatagcctccctagtaactgctctttatgtggtattgatgtagtgatactactcaacactggtttattgactgtcaagttgggcgaggtatttggttgtgcagtaagtgggatttttgtattgatgatattcttttttcttcgatttattctcttatagaatggatctcgtttccttcttcttttgatgagcatcatgataaggttaattgtcttgagttcacatgttttgttactattcttgtgtataagctgtcgtattacatgaacttgagttatcataatagaatatcccccactatagagtctattacggtggcaattattaaggattttaacgagtcgtggaggatcctttgtcaacctaaggtgtcccatgttagaactattgaagggacctatattttgagatgaatgccaagactagacagagtccaagtgtaggtagatgttgccattcgaaatggtctctcttatgtgagagttgtaatttttgatatagtttgaggggtaaaggctcttttcactaaacagatcaatgctacaaatccactagagtgagaatcgcaagttatgtagtggggtcttgatgttaaagagttgggaattacaatgtcgacttcggcttcgatttcatgttgctagttaaggccattgagacgagaagggccccgagatagcagttatccttttgtcttgcttctttaatttcaggtcttggtagattttgttgttatgttttatggttgcctagaaactctaatgttactgctcatgtgttggcgaagtgggctctttctaatgtttgtaaagggtacttaagcttctgggaggcaacgcctcatgtgctcaccaagatcatttcttctttctaatggacttgatgaattttagcaaaaacaagattttcccacaaaacttgagaccactaaacaagcccaaccaccaagttttagcatggtcaatggacaaaccaaatttagcaaggaaatgagctatctcgttcatagttctagaacattacataaataaatacaagagaaatatttctttagactttaaatgtcttctagcaccataccaaaagacaaagttaccgagaggttaatactgatagcctcgcatgcttatcgacagtcagtttcaaccacaacttatttgtaccctaaccttatagataatagaatgtgttgatgaatagcaccagactttgttgctagtggtacgaaagttgcacatagaggaatgcatgtcaatgctaaaattattttatttgcatttctaatgatagctccaagcccacctttagacttccactttggatttcagcatccacattgaccttgattacatcgaacattggtggttgccattgagaataggtcttgaccccgaaaattgaaagttacaatttccaaggttatataataaggcctagagaatgacaaaatcattcaactacgactcccgggaagtcactcagccaagttcctcaagaagtcactcagtcaagactctcgagaagtcactcggccaagttccttgagaagtcactcaaccaagactcttgggtagtcacttggccaagttcctcgagaagtctcttagccaagactctcgagaagtcacttggccaagtttctcaagaagtcactcggccaagactcttgagaagtcactcggccaagtccctagagaagtcactcagccaagactctttagaagtcacttagccaagttcctcgagaagtcactaggccaagactctcgagaagtcacttagtcaagttccccaagaagtcactcgaccaagctctttgagaagtcactcaaccaagacttttaggaagtcactcgactaagttcctcgagaagtcacttggataagactgttgagaagtcactcagccaagttcctcgagaagtcactcgaccaaacttttcaagaagtcactcagccaagatccttgagaagtcattcagccaagctctttgagaagtcactcggccaagctcttcaagaagtcactcgacccagcacctcaagaagtcactcaaccaagctcttcaagaagtcactcagccaagctcttcaataagtcacttgaccaagctcctaaagaagtcacttggccaagctcctgaagaagtcacgaagcaaagctcctcgagaagtcacttggccaagactcccacaaagtcatttagtcatgacaattcgggatttggtgtagtcttctctagcaagaggggagtaaagtgacaagaatatgaacacaaggacagaataagcacgcaagaagagtacgaccatgccttctggaagttcagaagacccggccaagggtacacaacagccactatccctacagcctcggagcacctaacaccagacaaggatatgaggtgcaaggccacctcctgcacctgcagcttgtaggttcaaagtgacacattgtccccttaggacaaccatataccttaggcctttaaagcctataaatatccctcctttagatgtagaaagaggttagaaaatcatacttgtaacacttcattgagagcaatgtagactttatcattcttttctctattttaagatagtaatttgaatttatatttccttcttctcttcatattaattttgatcttagagtgtagtttgattttccgaccaacaaattagttgacgaattctcaccatcaataataggcaacttgattatctgtaattttcctaggtccactatgtggaatacatcttatatgcgagcatggtaaaaaaaatctaaagcctaaatctttgatggtgccatatcctttacgtgatgataattacttattcaaactctttcttatttaataatgatattagcatagatttttgttaattaaatttgagcctaactgtgataatctcgcagagaaaaataaaagttataaaataaaaagtatgaacacacacaaggtttttttacgtgattttgcagttaaattttgcatagtccacgagttaatcttattcagacttctgattatttttcagggcctcttttgtatgagtttttccgtccattttttgatcttgtttacccctatttataattacatagtgggcagttaattacaaagttgactgcaatttgtttacaacgatcatcccctaaaattgcggggtttgattacatataatgtagtgtaaatgtagttatgatttaaaaatcacatagctgtgattttctcgcttttactggatcaaaatgatcgtgtattaaaaatgtctttagttgttgtatctagagatgtctcgacagaagcttggttccagtgatctcaatagcgagctggggtcatttttccttctgagatcgaagatgcatgtcttgtgacgatcgcggttcttatttacaaagagttcttcgacgctcatttgaatgctagcttctgactcatcaaggttgcaagcctcactgacgttaactggatgaagttataggaagccttctcatagcgagacgggcacctcgcttacttggtcttgagtcgatccgactgttacacttagtttgtacattatacactaacggctttcacagttgatatgtgtcgcttttgtcttcctatgtgtactgtctttgatgtctcgctattcgcattcagcaaaatatggtttctaactaatatactaagcaccagtttgtatattgattcctcgcctaagattttacagtcaagaggttacaaatatactttgatacttacgtaattaatgagatattccataaaaagtgattgcatcgatccacattccctttatcttgacacatgtcctccactgagatggcagtcaaatttcgggtataacaattgccccttaaaaagttttttttagtaaaaaagtgctttttaataattacagagggcattttcgtcaaaatcccttcttggaaaaaatatgtcctatgattctggcggttgtacggcgtcgaaggtcattatgaatcgtctcttcatattctgccctactcccaaccgttagatttcccaatccttagctttcctgtcactggactttgtgtataaaagggcagcttaagct

SEQ ID NO: 161388 - DNA, 4890 bp, Cannabis sativa
ttgcttgccattcgccctggcactcacaagccaagtcctcaagctttgattagatggaagaacctcccagactttgaagctacttgggaagatttttcagtcattctagctcaatttcctcatttccaccttgaggagatgaaacttcaagtgggcggtaatgataaagtcacttgtcacttatgtttatgctagaaaaaggggtaggaaacttaaggaaggggctgccacagggaattaattaattggctgtgtaagtttggtatgtgagttgtgtttgggtgtgacttagcagtatctttttttcttcatcttcttcttttattcttctttactgcttgaatcgataggttgaaacctaacaaaatcatgtacaaatcagttcgaaatgcatatttaacatgtgtttgtggtttaattaatatttaacacgagtttaagttttaaattatcaaaatctttttatggtcatttttgtgtaacacacatgaacatgttaagaaagagaagaaaaatggagggagagaaagaaagatgaaatagtgttacatgaaagttgtatagtggcttattaagtaaactgttagtattgtctagcttagtaaacatgaaatatcattggctaaaagattatcaatgaaatgaatcagaattaggagtcactacataaaatatatatatatttatatataataaatatatgtaaatgagaatggtatatcttttgatgtattttgtggtgttcatttatgtgggatggagaagaggaaagataaaagggtgagttgtgagaggagtaattttgaaaaagaaagaataacatattttaaagataatacataatgtggaatgttttcacctttaagtatagaaactcaaatttcttacttttgatgttacctgaacgcttagttgtttgtgtagcgtttcgttgcttctaaggccttctttatgcaagggttactacattaaaatcttcatggaggcgaaattaaaaaccatttttgttgatactttatcaatagacttacgttctagaggacatcaaaaatcagtattagtttgggtaaaagttgacacagaaaaaggtctaacaggcctttggtcatactttacaatcttttgcatttatgaactatatcacttaagccagaattactctcttaactgtgggtttatgtttatgtatcagttagcagaggccatgtatgagtacggtagaggcaattacaagcaagcactggaatttctagagcctgatttcgacgctgttgactataaggtatgcgttatgttatgtaccaaatcctagcagcattttcccgttgtagtactagccatcaaaaactaaaacttggaacaaattttgtgcaagattattggggcatctgatgagcaagttgatgtgttcaatgaagtctggtactccatgttgctgaatactggacaagctttgaaaggtaggctgttcactttttatctccttcaaagatatctcgagattttttattccttcttctaataacccttggaaatgtagtgattgaagtacttggagaaagaattaaaaagagagaaggagtccctttcttgtggaggcttctggtaaaatgtcttactgtataagaagtgtttagttttcagcttatgcagaaaccatagtcccttatttatttacctatgtattactactaccattattattatttcaggaaagagcttacaccatagttggtagcaaagaagccccaattgtaggtgagaaggccaaagttttggagactgcatatttcaaatagttgtgattgtgaaatctctcgttcgctttcctttctcgggataatcattgaataatcagtgtgtacatataacaaatgaatggacattaatttcatttttcacttgttcaaacttaaggataattcccatttgatacaaacatgcacatcataatcattactattctattgtcagtgtaaaaaccaaaaagtgaaacccattattcatttgggttgactaatgctaaagtaaaatgattaaagcaaagcagagaatcaaagaactaaagattaaagcttttgtttttggacagcaaattcaaacaaaaattgagcaactaagtcaaatggtctgaaaaatagtcttagttggttcaacaaccaaataccagtaacagggggaaaaggtacttatacctaatctaatacctaaacgtgagagcttaaatatattttatttattctggagggacttatttacatattattcccaccaaaaaatatttacttgaattttgaaagatgtaataaaaagtaaatgcaaaatcgacagaaaaatgaatgaattcacaactattggaaactttctatatatattgtatggagttcaaaaacactttactggcacaaatatccagtcatcagtcaatgcttacacacgtgcatttgacctctcacccacctcaccaatcaaaatcaaatcaaccctttgccacgtcaccatcaccagcatcattcgagttcgtccctcgttggatcccacgtgcgcggctcctaatctgcctaagttcctctaccacctccttcgaatcgggacggtcgtctttgtcggccgccacgcaccggaacgccagctcagctacagcctcgacaccgttaacggcgtcgccctccattgctaaaaccggatcaaccacctggtgaagctgacccgtatggatcttggataccaccaaatccgccaaggccatttcccgcttatcccttcgctgatcgaccgctctcatacccgttatcagctccaacaagatgacgccgaagctgtacacgtcactcttctctgtcaatcggaaagaccggtgataatccgggtccaagtaaccgggagtcccctgggggccggtccagacaaacccagctgacgaggaagagttttctggaagtaccagaagccttgacagcccaaaatcaccaaccttgatcctcatatctttctctacaaatatatttgttgacgtaatgtctctgtgaacaactggcggtacaactgagaagtgcagatactccatagccaaagcagtttgcagagctatgtcgatccttacctgccatgtcaaagatcctttctggtacaagcttttcggaccatggaggtggtcagaaagagttccgtttgggacataatcataaaccagaagaagtcctcttgggtcgctgcagtagccatggagctttaccagattcgggtgatcaatggaagaaaggatcagtatttcgttacagaaggacttgttggagaaggctctgcctgcagaagcgatttggttgtgaaggtatttgacagccacgatgcgagagtcgcagagctgaccgagatagacggaaccgaacccgccatcgccgattttccgtttttggtcgaaccggttggtcgaggcttcgagttcttcgaaggtgaaaaccagcggaagaagactagctgagcgatggcgatgaaggaagtgggtcgtcgggtcttcccaagtttccgaggacttgagccgtttggaccggaaaatcgctaaaacaatcagagttaaaagaacagcacaagacaaaacgaaaactgagctcaaaatagctattcgattcgggttgtcttcgctaatccatggcggcgaaaaccgacctcgagatcgaaaacagacaaactgtttatttgggtccgaagaattgaatccgcacactccattttgggcacgacaatctctgcaatgtgagaagtaagcatcttgaacttcgtcccactcgagctcgatccccaatttcaaaatattgtcaagataccctaaaacatcactgtggcaaccttgttgagaaactcgatggtgaaccgatccacagtcgtgcagaagccgtgctgggtttttaatgagcttgcattcccaaggacaatgactgcagtttgggagaacaggaccggcgcaaggcctaaggaaggaaagcctagaacaagaaacgtcagaaacccgaaacggcgacccggaaagattaatggatcggttcgggatcgagagaaattgaagaaaagatgagcaattatttgcagaagattcagaagatcgcccagttgagttaatgaggggaagaggggagagaagaagagaagaggaattgggttcgtagcggaggactgaaaatgaaaggtgattgattgatatgagagagtgaggagttgaacatttgacttggaaaaaagggtggccacaaccaggtgaggaagagaacgggaacgtaggagttgaagtgaacggagggcacagagatggagatctaaagggctcagatttcgaagaacaagcctctatagaagaataaacaagaggtagagaaaagcaaagtaggagggcaacaatgggggcaacggcgagaggcatatgtgtgaaacgacaatgcgtcttcgttattgtcatctcataactcaaagtgaaatagtagaagacagtagagaacccatggactaaatctgaaaaatggaggctccaaactgagattacgtgcctttagcttcctggagttgcgcatcgaagagcgagcgaacgagacataaaggaaagagcagtgctctgtatcatgacaaattatcacgaatttgtctctagaatgacgtgacaaaaatttacatctaaaaaatttcaataataatgaaggctttttatgtaaaacctgtttgaggttttcaaaacctctaaagaatattgacccttcgatgttataaaatgagcaatttttagaattcaatggcttagattcgacacagtacataaagggtaagaaaatagttaaaattggcatcggctgtggcagttgtgccattccttttttttttttttttttttttttttttcttttt

SEQ ID NO: 161389 - DNA, 1854 bp, Cannabis sativa
ttttttttttttttttgcttatggatgattgtaaaactccattttttcttcatgtatgcatgacatcaagactcaatcttggtcaagcgattctggccctttggtcgagtgattttccttgctttttgaatgaatcatttgctttgtgttctctttttctgtgatattggccgagtatctcttgggatcgctctttggccatgcatcgctgtggtctatggattttacattgggggagttttggctctttgagcagcttccctcttattgtaaatccattcttttacttggatgggagggaccttagagaacttgactgtgctaccctcttgattaaagaatttttgcttactcttgagaggcatccttctggtttcggctttaggacatgaatgtctatgaggacctcttttggcttagttatgttttgcgcaaatgggggcgtaacctgtcatcgatcaagggtatctagttctctatgatttagggatatacactctttactcatctccttgctcccaagtgtaaaacgccattcatggggttgtatacttgagttaggtgcttattcctaagggaaaggaattaacaacaatccaaataccaatttgatgtaaccttcattcattcatataaaaggttttatgtgacatgcatacaagagaaatagaaataaggaagatgaaagaagttatactagtggagctaccctagggtcgctccttgattcttgtcagccatattaaaaaggatatgtgatgcttctcgtggttggccttctcctactttcccgctgcctttgcatctctgccccctattgaatcatctggaactgcctttattgttgggttcttggtctcggtagcaaggcgcagcgagatgttgtagcactcgcgcccctctttctgctcccctttgagtgtggcaactcccttaagggtcggaaacttcacagccagatgataagctgaggttactatctttaatcggttgagggagggtcatccaatcactacattgaatgcagccagaaaatccaccaaaaaaaatgttgccatcatcgtggcgtgtttggggctctctccaacagtgaatgccaactctatcattctcagcggtcggaccgagtctccggtaaacccatagattggtgttgcacacagtttcaagtccttgagacccagacacattttcttgaaggttgcaaagtagaggatatctaaggagctcccattgtccaccaacgtttgatgtacccgtgtgtaggcaatctggatcacgataaacaatgggtcattgtgacggatgtgcactctctgcgcatcttcctctgttaatgttatcgagcctctctctcccctagaactttttggcggcctttgttccagactccagacttggggctcttgtctcgcctcacgttcatacctctctcgtcccttgcaggtattgcccccaactcctagtcctccgatgacagtgcagatgtctcctagcacttctagtgcctcttcttgatcatctcactgccgtgacttgtttggcctttgattctccttccaatactctcctagatacccacgatgtattggcccttcaatttcgaccttaaggtttttgcactcttctgtgaggtgtcccacatctttgtggaagcaccagcacttgttagggtctctcctaactcttttcctcttcaagggtggcagtctcttgaagggaacttgatgttcattgctcaggtagatatgtcctcttgaacaggttagctctgtgtagtgggtgttggaaatattttactaggatcttagatttactaacaagtatgtaatttaacatcctaaatatgaactt

SEQ ID NO: 161390 - DNA, 4592 bp, Cannabis sativa
ttaggtaaaaatcgaaattagtcttatatttataattaattaattgtatccgaatggatttcaaatggttgtggtgctagtgtaacgtttgatacttttctctttatggaaggttgagcgtaaaataaattggagattattatagataagttatgtggtcaaaatctactaataccctctaagataacgctccctaaattatatcataaatatataatattaattatataaaggctgcattaattttagattattataaatgggaatagtggggtcaagccatgcatttcttccacttgttggacaaaattgaaaacgtacaaaagaacactcacaggaatgtaaagagagatagatagatagatatgagtgagttataataggaaaaactgtttctttttcctttttcatttcatttcttttgttatataagaacaggggactctgttctttttctctacccaaagggataagagttttgagtttccagctttatctctcttttcttctctctctctgtaaagccatggctgctcggaagctttcctcagtgctttctcgctctctctccctttctcctgctttaagatcctcttcttttcttcgttctcttggtaaaatatatctcaccttttgtcacctttcattttttggcctctgttgtgtgataatgattgcttgataatgaaaagtggttcttttaaatccgttccttttcatttggttttttctgaatcagttttttttttcttgatttctaaatcacacacatacttatgtcattgatcaagctattgagttgttgcagtagattttgattttatcttgttctgaaatttgttcatgccaaaagtttttctccttgttccattttaaatcagagttttctctgcaactaaacaaagatttgtgttggataattagactgatccacaaatacaaacaagggacaataatagattatatccagttcgatatgcagagaaaaccattaactttatttactgataatatttcttataatcaaaatgtgatcttcagcttcaggaagctctgtcagtggaaacagctgtactagcaggtacagtacatcagccgccgttgaagaattaatcactccacctattgaagttacttatactaagaaccttattaatgggcactttgtagatgcagcctcaggtctgtattttcatcttttttttttattatttatctcaaaactgaaattgtttagatcatgaaatgggattgtgagctgattttgtgaactggaatcaggcaaaacattcccaacatatgaccctcgtagtggagaagtgttggctcatgttgcagagggtgatgcagaagacatagatcgagctgtggctgctgcgcgcaaggcttttgatgagggaccatggccaaagatgactgcttatgtaatttctttcttcatttttttaagtatccaataagctctacatgacaatactatgtgctctttctgttatggcttttttgtttctgaagttaccaaatgaatgatttcatttcataaccccccatgttgatgttaaagctgcattttcaccaaatgcttggaactttcaggaaagatcacgggttctgctgcgctttgccgatttagttgagaagcataatgatgaaatctcagcacttgagtcatggaataatgggaagccttttgaacaggctgcaaaggccgaggtaccaatgctggcgcgcttgtttcgctactatgctggtaagactacttcaagagtgaatttggactgtcccttggttctttttgcttcatttccaatgattctatttcctgatattttttttccaggttgggcggacaaaatccatggactaactgttccagccgatgggaattatcatgttcaaacgttgcacgagccaatcggtgttgcagggcagattattccatggaattttcctcttctcatgtttgcttggaaggttggacctgctctagcttgtggaaacactattgtcctaaagactgctgagcaaacacctttaactgctctttatgtgggaaggttacttctagaggtaggctttagttgaaccctttcatccctttgttagaagataaaattaattaatacgaactatatataactgatttacagtctttaaccatgttaaccttgaatgttggtattctcatgactgacatgaagaggattatgtagatttcttttgtcaatactactgaatttgttttggatttcatactaattataagttttggttttatgtgtactaatttcttgtcacattgttataggctggccttccacctggtgttttgaacatagtttctggctttggcccaactgctggtgctgctcttgcaagccatatggatgttgacaaggtattttaaagagagcacacataacaatgacatgcctatgctaagcttagaaaacacttctctggccactaaaatatgagtgtctttcaaagaaagttaaccttctcaaaacccctattacttccaatttcagctagctttcacaggatcaacaaatactgggaaaattgttcttgaactagccgcaagaagtaatctaaagccggtgacattagagcttggagggaaatcacctttcatagtatgtgaggatgcagacattgaccatgctgtggagcttgctcattttgctttgttctttaatcaggtttgttctattgtttctctacgaggctaattcacttgaatctcattatgttcatgtcaataattaaccaataccggcttcattccagggccaatgttgttgtgctgggtctcgtactttcgtccatgaaagtgtctatgatgaatttacagagaaagcaaaggcacgagccttgaatcgtattgttggtgatcctttcaagaagggtgtggaacaagggcctcaggtactcttccctatcactcttgagaatttgaagcagctctaaacaatggattttcagttaaattggagtaacacactaattcttcttcctcctaatcttgtgaaacttcccagatagactctgaacagtttaagaaaatcttaaagtacataaaatctggtgttgaaagcaatgctacccttgaatgtggaggtgagagatttggctccaaagggtacttcatccaacccactgttttctctaatgttcaggtatgctttgtccataataacagcttcaatcaagttcaacacatatgccaagaaaaaacaagatcaatttgagtttgttattatacttcatttttttttcccgaacaatcaggatgatatgttgatagcccaagaggagatctttggaccagttcaaacgatcttgaaattcaagtaagttaagaaacattacaagtctatttcagaaacaaaagcttctttggatttcctctaagtatactttgttcaaccccagggagattgatgaagtaattagaagagctaatgcaagcaaatatggattagcggctggagttttcaccaagaacatagacactgcaaacaccctcacaagggcgctgagagctggaacagtgtgggtgaactgctttgatgttttcgacgctgcaattcctttcggggggtacaaaatgagcggtataggcagggaaaaaggtatctacagccttagcaactacttgcaggtgaaagctgttgttacagctttgaagaaaccagcatggttgtgaaaaagattctcagcttaactagtcttatatataatttatatatgtatgtctctatcttttggttttgaataatgagactacaaatgtaaatctctggttgttccaaaggaaagaagttgagccattctctatggaatttagaacattgtttggttggtgctgagattttggcagaggtttttatggttgtaactttgtgtctgaattctgaatctaatgcaatgctttacatattaatagatttaaaagacatgaaatcagaagtagctaaacaagatctttcctagaattcctttaaaactgtggaatcattattatattttaaggtgctgaacaaattattaggggcgtgtttagaaaatcacatatttgtgtgcaattagaagtaattacataattcagtatctttgtctgattatataattacactctaagcatctttaatggagatgcaaaaaaagtgatacaaatgtaaaatatagttaattttgttaaaaatctactccaatagtgtgtcaaattgtgatgtaagtatgtcacacaacaaaaaatatccaaatttgaattagtatgatacaaaatttacattacaataaatgccatatcttttttatatttaccattatattatttttaatattttattattaaattttagttaacatgttcttttgcattaaatgatttgttttattattatttaattttgagcattgcattggtcactaatagtgtcagcactatctataggtggcgtattacgattggttaacgatattctgtaaaaactatttttttatattatatgggatctaaaatttaattacaccaatagcagtatgacactatagagagtgttaggcaccagtggtgtctttta

SEQ ID NO: 161391 - DNA, 1722 bp, Cannabis sativa
ttttttttttgattaagagccaccgtggctaagaacaataaacaccagccccacccagcgtgtggaaaaattagaaaacaaatacaactaaactagagaaaatcaagaacaaataggcaattaagaaagaaaacaacttctaagaatagaacaacataaactagaaagctaaacataggagcagccatctgcatcccaaggatccagggaaccgccaaaattagtcaaatcgaagcaaccaaaccttcagtgtcgattcgcccagcgagccgcatcatgggccacaccattgaaattccttatagtccagtgagcctcccacaagttgagtgaagacaccaaacaattgaatctgtctagcaggctttgaatattgtggtgattgtttcttatggaggagcgattactttgtatagcattgattgcattagtggagtcgcattggaatatgacatcgttgaaccccaattctctagcaatctcagctcctttaactaaagcaaatacttctccagcaagcgagtctgtgtaataggattggaatgtatgaatccttagaatggtgcctttatcatctcgaaaaatagcagcccctgccgactcagtgtttcccaaggcaatgttcgtattgcacatgatccattttggagggggaggaagccagcttaactgtccagcaccatagccatcatgaacggaagctagctccaacagccgtcgattggtatgttggatcgacactggcagagggtcttgtgtaccatcatgtgttaatttatttctaactctccagatttcttcaaacaccactgcagcccctcccaaaaaaaggtgaaggtgcatgcgattaggtcttttatcctcatcagagaaccacaccagccaatcatcccagtttgcagttgtgtggatgtttgtacacacttgccacgaacaaccaaaccatattgctctagcaaaagcacagctccaaagcaaatgtagtgaactttcttcatccatgttacagagggtgcagagcacattatccatggagaataccatactatgtctagccttggtgagaaggctattagacagtattttccaccaagtcatcttaagtcggttgtgtatcctcgctccccaaatagttctccacttagcacactcaggccggtttctatcaatgctcaaggacaattggtatgctaattttatagagaattcaccctttgattctggtaaccagagccaggaatccttcgacgggttgtttggaagtgagatgttaaggatccttgtagtgtcatcacagttaaaccattgtctaatcagagcatgatcccattggttatttcggataaagttacttaccatgttgattcctcccatggcatcaagtcgaagtattggttagagacgccctcccggtacccaaggatcaaaccaaatggatgtggatcttccatctccaatcctcctacaaaggccctccatgagaagggggcggccccgaagaatagccttccacatcaccgaatacgtgtttttaatctctgagtccaaaaaactttggttttggaagtatttgtccttcattagttgcccccatagactgttctcatacattaggaatttccaagcccacttcaaaagaaacgtcttattagtagccagagtcgaccgaaatccaagtcccccaaccaccttaggggtacagtgttgggttttgtgccctaa

SEQ ID NO: 161392 - DNA, 8176 bp, Cannabis sativa
  modified_base (4902)..(4905): a, c, t, g, unknown or other
ttttttttttttttttcaatgggcgacagtatgtatttaatgtttgtcataaataattaggaaattactttatatactatttttttaattttttttttttaaattatggtatcgattgttctggtaatttttatgtagattgctgtgtaaattttagttacaatttaaattgttctgttagttgctctatataaatttttatgtgagtttctcaacaaattaaaaaaaaagtataaaaataaaaaactccaaaatatttttaggattatattacaatttaaatgtaattgtgtaattataattaatagagtaatatttatttatttaaattgatgattacatcttacatatgaactcatctaataatagttagttttatagaaaaaaaattaatattgtttagtaattaatgttttaaatgaaaaaaattagtaattatatagactcaattttctcaattactttaattacattaaatttaaaaatgtgtaattaagttaaatgtagtaattatttttaattcccaattccaattagatggtaggtttatttttttacacggttgttacgagttgctactccaataacaacaatttattgtgtctatagttgtactgatttttttatacatttttttaatgtttaaaaatgaatatacatgagagagagagagagaagagaatacttgtaattgaatattggtaaagaatataaaatatatgaaatagcgtaaaagttagagaagtgaacactctggttgagatgattgcttaaggaatgtttgacaatgaggaaatttatttggtcacacccactaactacaatttgttataacacagcaacaacatctgtatatttttagaaactcatttcatttaccacttacttgattcatttccccaacaatatattatattattaataattacttcataacccacagttttcaattaccaaaaatatttgttgggtctcaatttatgtgctcaaaatggcaattcagtgaagtcttcacaatatcatatcaacacacattttgtaatttttaagttgtttttaaattttagaattaaaaaaaaatggccacagctattaacaaagaagggtgttctttaacgagctaagtgtgctatttaagaatgttatagttttattgtttaaacttttagggacaattttgttccatgtggctcgggatgcaaattctgcagcacatgatttggcaaagcatgccctttagttagacgataagttatcttagtttgagaaagtgatgccgccgattgtaaattattgctttgttaatcatgtgtgatttgatcaccgtcaaaaaaaaaaaaaaaaacccacttttagaagttttttataagatttattattaactaataaacatttattatatttttctttagttttttttattgttatcattatttttattattttgtagcttttatatagaaattattataagtataaacaaaagtaaagtcaaacagagatatgatccctattggcaaagcttaaaataagttatttctagcttatttaattaaacaaaatacactaatttttaaagaaattaggattccaagtttactaaaaattatatatttatgaagctacaaatacaagcaaaatctatcccaaacacaatatttaagcttttaaatttgaaccaaaaatggtggagtacaaaaatagaattctagaattagccacaatgtttcttaatttaatttaatagtctgaagaaagtgatggtagaagaatagatagatagacacattgccaacatatttaacatgagttggcctttgaaatttttaaacattggtggtggtgcctcacctaaacggtgacgttttaagaagaaaccacaaagggaacaagtagcatcaaaagtacttatcttgatgatgatttgttttttttacagaaatagtttctaaataaccagaacaagaagaattgaaaaccatgcttgaattgcaagaacttaaaacctaagccaaagctcatatcgttaggtaagtgagttgaagactctctatctaggacagaaatagcagccttgtggttgtgtacctgtatttgcacatggtattatattgattgggacatgattttgtctcgtgattgtatttttacgaaatgtattccatgatgtacgacaaccgttagatgaggacattatttgatctgatggttgagattgatctaggaataattaaggttaaaaaatagtaacatatcctgagacccatctaatgtaccacgaaatacattctgtgaaagtacattatgggacaaaatcgggacaaaatcgtgtccctatattgatatatatatttacataaatgtatgtatatactgagagagaggttagaagtacatcaaacaatgattttctgccaaacaatcaggttgtgccaatctaatcattctagtaccaataaagttttcagaagatatgaataatcttaagctttgaaaatcttttcacaactatatgcttattacacaatcataagtgttgcttcaaaaaaataaatatttttttacaataagggcctttaaaatccattatagaattctaaatccagaagatagtttacaacaaaatttagtgatataaatataatctcaaccagctgttacactaatgctatacattaccttccaattttactcaagcttgttaaataatacaaattaaatcactatttccttcaatcaaacattggctgatacttcatcaactccaactgcttcatttgaaatgtcttttttctttgggggttcttgagctttttgttgaagagctttgtttggaaccaagattatgaatatattcctgtccctaaagtttttggcttcctctgttgctagctgcaacaacaagcagaggtgaacaattaactctgaaacttacacaaatctgagcataagcccataatgaatatttggaaacatgagatgataaatctgagtcatgatagattacataatcaccaaacaaaccaaccaatgataaattgaacttcatttttttactgttcctatttttcggtagagccacaatctttctgaatctaagagatttgacagtccataaatttgcaagaaaaataattgtatgttgtttgtgaatattaaaaataaagatgacaactattcaaaaaacaaaaaataaagatgataaatacacacctccccaacatcgttctggaaacgtttgataagctctatagcaatatttcggaaatcattttcacgacctttcaagttaactataactttaacctgcagaaattacaacaaagatttaactatacatgcaaaataaaacaagagacgagataatgtgtgtaggcaaatgctgacagttaaaaagagttttattaaccttgtcgccatctttcaaaaacttcttcgcagatctcaagcgtacggaataatcgtgttgatcaatattaaaactgcaaagagaattagttaaagtaattagaaaaaacacaatataataaggatgtcttgtttccaattttaaaaaggtagaaacttaaatgaggaagcggaataaagagcatcataaacagttattttgcagccaaattccaaatttcattatatttttttagcaactcacagttactaaatcaaaagggtaattatttttctaaatggaaatctaattcagggagataaataaactaatggaaggaaattcacattacacaaaacatgcaccatatgcctcatggccaaaccactaacaaggattctttatttccccttcattcttttttcagctcttgcaattttcaggtcttttgtttgtatgcacatgggtccattcttacatgtgtattcctcagtataaaattagtcagctttcccctccataatgtatataccattataaaatgcaccacacagaacaaagaaatactaaaagaaacagaagttgtataatagaatagaaataagactagagtattgtaccccatttttagctctttcaaatccatgcgacttgctgacatttaacagcacaatgtcatcagtaacttttcacatatctaagaatcattcatgaacggtaatgagaaaaaaaaaaaaaagaactatagaaagaaggacattcaccagcacttttcttctgctgttctcttttcttcttttgttgttcatatctatatttactgaaatcagataagaaatggatattatggtttagaatagatttcatgctctctgtccattaactgattacttttccctttataaagaaactactttctaaaactgagattttaggagacatatgtatgaatcataaatgatctacatagatagctagctttgtgtgtgtgtgtatacaacaaattttttttacttgtaatccattattttgaggacgggtgggtctgcctccggcgataatataacctgcaacagcaaggaaagtataagtctatcaaaatacaaaaatcaaccgcaacttgcattaaaaaaactcaaggtgaatgcttccatatttcatgtcaaaagaacacaatgacaaagaacttctattcagtttatatatataatgtctaagcttgaactccatcatgaacttaataaactcataaccccacatagcctacttagtcaacaataacaacatactctaatattcccccgtcatagaagatagagaaaaggaaagaaggccttcaaaaccaatgataaatcagtagctagttagcaacaattggaaattttcagattattccttttccattgaagttgccatctttagccacaaaagggaaaaaaggtactaaactttcaaaacataacattgtaatagctataagtatgtataaacagatatatttatatatatatatnnnnatatagagagagagagagagagacgtacaagatcaagaccagcatcgtcagccatttgaacagcctcagacttagtaacgactcccacctacatagatagatacagccaatattaatcacaaatcccaaacttaaacacagttaaacaaactatctgattataaaacagaattcaaatatcaaaaaatgacaatgttgtgaatttttagctatgcattcataacagtagacacaacattaagtcactaaccatattctgccgttcatcaataagcctcacggagcctgacctattttcaaaccacccaacaaaaaacaaaacccacttcaatttcaactccaattagctcaaatttcaaaacccaccaaaaaaaattcaaattttggacaacagaagaagattaatttcgattaacctgatggtggacaaatcaagagcttggtcatcgtcggagtcgttctgcttaaaacgcctagaatcttggcccgagtaacgagacccgccgccgccgccataacgggatgtaattggagctccgcaagtggaggaaatagaaatgtgagaggtgaatttgatgaggtcagggtaacgaattttaaggccgaaaagtctggaatcgaaggaagatagaatgaatgaagagggtgccgctttggctggtgctgtggtccgactacggaccaatttaagcgaacagctggtggtgataccagccatggcgtttgagctcaactatgctacagtctacactgataagtggtaaggatttggcacattattgcttatatttttctccttccttatccacaatttttgctaatgagaagaagaagactacagaaggaagatcaagactattgggccgtaagtgggccgtgaagaaggcctgaaatatttctggcccaaagctgtagaaaaattagattggaaaatttgaatgtatacccactttttctattttcttacaaaaatactacatgccacgtgtctttatagggttttgccacatcaattattaaaaaaaaatcttcttttaaaaaaggtaattggacgttggatgtaactgtttgtaacagttgtttactttttttggttttaatctatttaaaaattattctttattatttttaaatattaaataatcattacataaatctcactgttcatcttcttctaattttctttcttttttcgggcagttattgtgttgtgggaagtttattttttttttcaaatttttctattattcttattactattattattatttataatactaaatctaacaaggttcagtatatattttagtcaaacaacctttaaagttatatggttctgttctcactcataaacaaattgatcattctaaatcctaaagtcttcaacctcactattatactctttgccaaatccatgtaactccttacaattattatcattcaccatcatctaatgtctctaaatccaagaagcttaaagtatttgaggtaaataattctaagtttacacgtctattgttcacaatagggaaagattcataggtcttgttttcttattttcattttcaagtttatgtcggagtaaaactgtcatatccccctaagtactaagtactcatccgattatagtgatcttggtaccgtcgcaaagctaatttggtgatctaaaaattttatgaagaacctagtttccaattcggtgctattctatatcaaaatttatcatctttccgatgctattatcatcttactcataattttagaaaaattactttcacttaaaatataataactctctcaattttgatctatttttaatgatctatatattattttaaatcttattcgattctcataagtttcatgaaaaatcttttgttaattcggagtcataccacgtcgaaaagtttgttttcttctatattatgttattcatgtcttgaatgttgtttttgaaaaactattttagtaatattataacatctctctgaatataagtctgattctaaaaattttagtatcatttaaaggtaattaaatattcttaaactttcatgaggagagcattccatagtttagtatatttctatgtcaaaactttatgtgtttgttgtctcctgtaattcactactctattctttctcagaatttgttttagtaaaactataataactctctcagttttaataaagacaacttttactgaatccatgtaattcttggttaaaattataaagaaattagatagtttatgtgttgaattgcataatttaattatttgtatattagaatatgatttacgatttattattatggatgtatgtatgatactgagaatgtataattttggagacaatatgaattatgtgaattgatatatattatggtttttatagcttgtatatgctgtatctgtatgttgcatgttgtatggtgtatgttgtatgctaacgtcccatgtaaagtgagggaccatagtgggatatgaaacgggataaggtcgttgaatgtagagatatcctaccgtgcctttttctgggtcgtgtatgagattgtaattgtgcagtatgatacggcgatgttgccgttgaatgtagagataccctatcctattacaatggtagggttgcatatgcccaggttattatatgggcaagttaggcccgggatgttgtagggccaagttaggcccgagttatgtctgtaatggctatgatatgctaatgttatggcaatgatattatgattttatagtattgatatgattatattatgagtatgatattggatttatgatctttgtacatatgtatggtgtgaacaattagtatggacctatatgataaaggtttccatgtgtagcaatatttggttatggttataaaataaggtgtataatattgctaaaacttaattagtacattaatgatatgtgttatattgtatgatattgtatgataagtatttttttattgggcttttagctcactcccttattttcccctacaggtattagacagggaagtgctactacgtatagtgagcaaggtgagttttggtatgtatactacgagtggctacgaacgagcaaatgatcttgaacgtaggtggtgccttagttttattttaagcagttgataattctaaacacagtggaaatgtataatttaaaaccatttacttatcgtattttgttttacaaatgaaggatctgatgcgtgtcgtaagccacaataaatttactaattagtatatgatttagaacctataa

SEQ ID NO: 161393 - DNA, 12102 bp, Cannabis sativa
  modified_base (10911)..(10912): a, c, t, g, unknown or other
agattgatagggccgagttgtggatgttaggccgaactaacaagaaaggagagctatctgttgaggcggcatcagtgaaagctaagattgtaagtctatattgtattacttctttaattgttaattcacaatactaagtatgtgatttagcattttattgtttgtttaacaggatcattacagacagctgcaaaccgaggggaagtggacacccgaagggtctaatgatttgcttactatggcaataggcacccctgagaatagaggccatgttaggggtgtgggagttggcgtgacgcccactcaatattttgacactccaacgcccatgtcaaggaaggggaaagcaaaagaaacttcaaataacacccgggtcgatgaagctttgacaagagatacgaccaatgagcaagtttcaaatctgcagaaaaatgttatgttagaacctcatgaagaagctgttaacctcaacgagtcaaaaggtcagaaatctctgttaactaaaaatttgcacaactaatttatctcaaatgctaactaactccctaaagagaataggaagatctacatttgatttcccataagtccttacattacttatcatcccacttagctaatgtgcctttttttaaactatcggtgtgcttttatcatttgtgaagtgtgaaatgacatacagattgcttttctttttcacaaatgtaaatcctttagatgataatgataatccatttcccgaggatggtggtgaggaaatggatgatgctgaggggttcgataatgatgagaacgcgagtggtgatgaggagataaagaattatgttgctggtagaggaccgacattgatgcgtgaggtatttaaagcccgaagtgagggtatacgcacaccaatagtgttcaatgagttcggtcaagtcattggcccagcaagaacaaagttcatatcgacacttggatccattgtacgcagaactgttaacattaagcatgacagttgggcaaaagttcctatttccgagaaaaataaattatggaaaatcgttgaggtatgagtctattatcataacatgtgttgtttgtaatgtgtttcatgctatgagtttattataatcgattgcttgttattgcaggagacttttgagatagatcctaaagcaaggaaaaagattttacagaagagtggcaaatattggaagaacttcaaaacaaacctcaccaattgttggatagaaaaacatagatacactaaacccgacaagttgaaacacccaccgagaggatatatatcggtgataagaaaaatcgattgggacaactttgtcaaagttagactgagcccagaatgggccgagaagagaaagaaaatgcaagcgttacgagctaagcattctcacaatcataacatgtcaaggggaggttatatttctaaggaggagcaactaatgaaagaatgtgatggccaaataactgagattgatagggccgagttgtggacattaggccgaacgaacaagaagggagagttgtctgttgaggcggcttcagtgaaagctaacattgtaagtttataccgaaatacttcttttaattgttgttattttcacaatattaagtatgtgattagcgttttattgtttgtttaacaggatcattttaaacggctgcaaaccgaggggaagtggaaacccgaagggtctaatgatttgcttactatggcaataggcacccccgagaatagagggcatgttaggggtgtgggagttggcgtgacgcccactcaatattttgacactccaacgcccatgtcaaggaaggggaaagcaaaagaagctttggaaaactccaaagttgaagcgttaagaagagagtttgaagaaaagtttcggcaacaagaagaattcttcaaacaacaacaagaagaattcttacgccgacaagaagccatgatgaaagcattcatggagtctgcgagaggctcgtcgtctcatgcagtaacgcctgagttggacacaacacaaccaacatgtgtaacgaaccttgaacccgattaatagaaaaaagcatgagttttctagcaaggaatgaaaaatgtaaactggtgtagatgatcaatgtagaagttggactgttgtagagtagagactatactatgctaaactcttaagttaagatgtcatatggtaaaagaagctcaatggctatgattttgataagagcctagaatgggataaaaattgtctatttttgctagatgaatgagattcatagttacaaaagaagaaaacaagtaatatggggtctcaaccccaaattcttggaattaatatgattcccttcacttattaatttgtaacaattaatattaagataatggtgctctattaacaatgtttcattgctttaagccaaatgtaaatgttattaagaggcaccagtaagatccattacttaactagtatacaatagtagtgctctttagtccttcctaaaacaagttactttttctttcaaaaataaaataaaataaatattatattgttttgttgattaaatttttttaatggggtgaagtgggagagagataacaattctttttgtttggcaagagagattggaggagggaagaaatagttagatggagagcaaattcttccaaatctttaatttataatccttccactaatggaagagtccatactctctctttttaattgtttaaaattacaattataccctcttaatatattattaaaaaaatatttataaggattatataataattttataaataaatactccatccttctactactatattttttaccaaacatcttaaaaggattgttacttcactctccctaccttctattctacatccttcatcaactctccatcctctcgatcccctaccaaacatagtcgaagtgcaaccaaataaaataacaaaaatgtatttttaaaaagctaattaggatttttactccccgaactttgacatgtataaaatcatgcttccaaacttttcaagttgttaaaatttttccataaacttttgagattgttgggtttaaggacctctgtcaaattctactcaactttacaaatgcagctattgtccatgtactgaattgtgaccctctaaattttaatatctaccaaattgtaccctttaaactttgacatatatcatatcgtgccccctgaactttaatccacgttagaaatctgttagtaaaattagataaaaatctttaaatccaataatttcaatagttcagggagaattttaacggcctgtaaagtacatggggcatgatttggtacatgtcaaagttcgggagataaaaatcctaattggccttttaatttttttttgaataattagtatttttgccacttgaacttttgacactacctgatcttgtcccttaaaatgacttgttaaaaattttccctgaaatataacaattacataattatcccttttttgttaaatcccgttttttttaccgctaaaaattaatattagtactctttaactttgaataatacaaaattttgtcttattttattaaaaaaattaattttgaatattataatgttctattaattttgaaaattaattaaaattattaaaaaatctgacaaaaatatttaattaattaaaaaatattaaatttacttaaaaaaaatataaattgttttttaaaaaattatttcaaattttattttatttataaatatgtatcttaaaaattaaactaagattattaaaaatccaataaataatttaaacaaattcagaatttttaacaaaaaattaaatttttttatatttgtatcttaaaaaataaaaaataattaaaaatttgattaaaatataaattatttttaagaaaaaataaaaaataaactaaaaaaaattattatatttacttaaacaattttttttttccctctaatcataaatttccctcttttttttttcatctgtaaggaaaaaaaaagttcactcttttgataaaagggcgggatagaatcaacattttcctacccactttcccggaaaatggtaccgacgaaaggccagtaaatgggtagccactgccacaccaaggtaaccaaaatctctctcaacatttcccatttttttgtttgtttgttgttgtccatttttgcagaccctacttcactttctctatcagggtacaaaattcttggaccatgttgttttccgacttttcaaaattgcatgaattgaaaagggttttgtttatcaaagctattatgtattgaaggggttgatttggtttcttggattaaaaaggagactgaataccgaatacccatttcttgtatttgatttgggttcaaagatgacttttttcttgtattaaagtgtttgtttatgttgtaagggttataaagttttagttgcatttgcatgcatagtctggtgatcaaagttttcttcttaaaaaaaaaaagaaaaggtctttagataagatcatattaaactatttgattttgatcctatggttattatggaaaatttgagtttttatgattaatttagctacttagttaaaaatctctcttttaacactatatgaaaaatatgtttatatcaaaaatatctaactgtatctcaactttctttatctctctcaagtgattgaacaacaacttaaccatataatagccaattcaatgtaaaaatgagtgatattttttaattaaatagcaaatttcagtatatatacttacatttcgtgataatatccatgaagagtgaactcatatattatcaagaagatttgttatttggaatcaattggagctcattttttgtgagtagtgttcatcagtattcagtatactattcctttttttcctttttgatttgtcttttataaggtaatattataatagttctagtaataaatttatagctaggatgaaactgagtgtgatttccagttggtgcttttattggaaatttaacactggttggatagaatgagatatatattggttttgcttaaggacttaattagaagcaagagaaattcctttggttggctcttatttatttcctttttaatggcttaatttgcttgatgagtacgtaccagtttctacaggcttcaatataatatagtaaagctttgcttgtgaacatgtgtaagagagccctgactttctttaattctaatttatctttgtgagtttgtatataaccgaaacgatctttatgtgagatagatttgttgtttaagtatcactcttgctttgaatatgatcataatacttattaacataagtgttttatattggcaataatgtatgaaaataaatacctttgatagtaaattatgagtgatttttctatcttgaggttttcagttgtttcacaggacagggtctgtgaatcatgcctaactggcggtgactcgatattgaaagaatctgcaaagaaagatagagctgtcacaagagcaatgagtaacaaacaattttcagggaccagaggaacaaggtcatccaccttcaaagagccgaaaggtaagaaatctttgtgaaaaaagacaaaagatttttgttatttgaacgagtaacatagtttatgtttatgtaggtggtaaaactaaggatgttcctcaacttgatcattcaatttcaaatgttatagaaggagatcattcaagttctccaccagatatttggaggtgggtaacctatcccgagtcctgatcttgagtttatctatttttgttatctttaacttgagcattcttttgtgtttggttgggtctatatataatatacttattagtgattaagaaaatgtttagttaatattttattttactttggtgatgttcaaacttttgacaacaaattcagagatattaaaatgagttttgaaggaataaaatcaacaattggagcagatgcaggctaagattgtgttggattttggatagtaaaatttttgtctgataattattattcaatttatatgtgtttgtttgtctttatttcaaatatctgttattgatttctaataataattattctttcttattttgacaggatcacggaccaacctgatgatgagatcgatgaggatgaggaggtcgaagatatcatttctgatgacccgaatgaagaggaggagaatagttcgacgactaaaggggtagtgaaattggcaaaaataattgctgataaactcaatggaattaagagacacttgaagttcaacaagaaaggaaaatctattgggactccaaatagagagctgcaatgttatttaggaatgcaggcgaagacaatggtgccgataacaatcgaccattggcgccatgttcctgctgcaatattagataacttatggaaagatgtaaatgtaagtttatctaacttagctgcacatttataattgtagtatagtttgtgttactaattaattaaaaatttgaagtaatctcttgctcgtgtaattgggtaattgctgcatttggtgtaattaaatttaagctaattaggttttttgtttggaactttgacatatatatgctccctgaacttttcaagcagttaaaaattctccctaaactattgtccaatttcattgacggaagtctgacgtgtatgaaagttcaaggaggggcacaatttggtaaatatcgaaatttggggggcacgattatgtatatggataattgccgcatttgtaaaattgaacagaattggataaaaggtttttgaatccaacaatcttaaatagttaggggagaatttttaatagtctgaaaagtttggggtatgtaaaaattcaagaggtgaaaatcttaattagccttacatacctatccattttcaatttcttgatggcgatgatttgtcatgactaacgagtcttccttgttattttattgtcgagttgttctaccatttcatcgaacatgccattgttttcttcttgttgccctgtgtttgattctgcaatttgtgtacctttttcgattattaacatgtcttgtgtgattgttgagtctcttggatgttcaaacacataatggatattcggtggaaaatgtttatatgtcgttcgttcgagttactcattaattgtcaaatttcataggaagctttctacttgaatgatggaatgaggaaagaaattttgagttcagtaagcattaaatggagacatttcaaaacaagcttgaacagaaagttcgtagctccatatttggagaacccggaattattgaaagcaaaaccccatgctctcgaaaaacctccacctttatataaggggattacggaaaagacttggaaacaatttgtttccattagagcaactaaagaattccaagtaagagtatctcgtatataacaatttcaataactttgattcattattattattcatggattgactaattcatttctaattaaaataggagtataggaagaaacaacaagaaaggcgcgccggtataaagtctcctcatggattgtcaagtcgtagttacaatgagatagaagctgatcttgtatgtgagagaagtgatcattttgttaataatttgaaatgttttgttgattccatactaacttgtttctaatacagggaagtgaatttggcgcaaatgagtcaatagaccgatctattctttggaaggaggcaacagaagattcttcaggggattatcgaactgagcttgacgagttaacaacaaatgccattgtaagtttcaaagttgcgaaaaaattattggccaaataccattttagatcctatgtttaacaaaatttatggattgaactctctgtttggtcaaatgataattttgatcttgtcaaaagaaaaaaaaaagaacataatagatatactctgagctggaaatgctatgaccaattgggttatttttgaacttctttgtgctagattctgttcgatgttggttatattaaaaaaatttgactaaaatttggctcaggtactttatgttcctttttaaaaaaaatacaatgtgtgaattttcatttaacaaaactgcgggtctgatcggtaaacaatttctcccaaaattatttgtatcattttccaagtattcatttttaactcttgtcattgaaattaacatgtaggataatccgcttgagaaaagaaaagcaggtgggcttgtagagattgggaaaaatgatgtattgacccaagcgttggggtcttccaaacacccacgtcgagttcgaagccaaagccaaggggtgagtcagacagactgctttccgaagccaactgagggtgtgagagaatctcaagaacaacatggcggagtgtactttcaagattttgataagttgcagcagtcattcgatgaaaaactgaagagtcgtgaagtagaatcaaagaaagaaagagatgtgtttttggctaagtttgctgaactttcaagccaaattgcaacactacaagaaaatttaactggccattcttcaacaagtatgcctactacttcgccaatatacgagacacctacacctatggagggagtaggggagttttgcactcctatgaatatcgaaacaacaaaggtagcagctaccaagccttaatttcataatagagttttggtaattcggtaaatgttatgtttagtgtgatttaatctgtatataaaataagtaatgtaatctcatactaattcaatagtatcatagacattgcaggaaacccaaaagtgcaagttgttggggaagaaagacggcgatgttgttgccgttggagaagtcatagctaagcaagggaacattcatggaaaacccttaggaaagggtaactactgcgttgtggtaaacgagtgtttggacaagaatgccgagattccaattccaaatgggaacgagaagactttagtagctcatgttgtcaatagttccgttgcgtggccatctcatttgatcattcatggcgacgaagaaatagtaagaaaaattcaaaagaaattataatctaaacttgtataaaacaactaacatctttcatttttttgttgttttcgtaaacattcaagtcgcggaagagagcaaagaagaatgagaagaatgtttctctacctattgccctgatgacacaagagaaaactcatacttccatacaacttcctaatcaaattgacactaccccattgatctccaaaattcctaatgagcttccaaagtacttgaggattctctttagaagcataaagtatatggaggcaggtctcatattccaagtccaaatggatgctgaattattaggtcatccacatattttatgcatttctcaagaagatataatccgatttggcttaatggagaaggttggagtaccatgtatttcgttttatataaggtattcgagtccctcttagatacttacataacaattgttatagttttctggtctccagatatcgtagggttagacgataatacgtttaaattttccatgcagagttctatattccgaattagcaaacaaggatataaatcactttattggattcctcgaaccgagtttttcgtcaaatgttggcgccattgaagtggagcgagctcgtttgatatcgattcgcttagataagtcgatacaaggtcaattttggttattaccataccatttgaggtaagtttttttttttcaattaattacaagttagttaactttgtatagttatattaataactaactttgtatcttaattgtgatgttagatatcattggactttaataataattgataaagatcaccaaatttgttacttccttgatgctcttggaaatcctccaccagaagatcttaagttacttatgtccatgtaatcatcctaaccctattaatctttattataatttcaaatttaaatcacttttcttaattattatttttaaattttttagggttttcgacaaaaatggcggtgctaaatggagaacaatcgagtgccctcatcaatcatcaacagcgaaatgcggcttctatgttctaaagatgatgaaagactttgttacgaatgaggcaccgattcggtggctaaattttcatgtaagtatttataaaaggtcattagtgatcttaattatatttaattgttgttttaattatctaattagtttgattttttttgttctagtgtagcgagaagaatccgtacactttagaagagatcaatgaagtacgcgatgaatgggcgtttaacctaatcgaatggatgccataagttaattagtttgttaatgtaaatagaaatgttgtgaatcttctttatatttactataaaaaaaattaagagcttattttttattaaaaaaaaaaaattaagggcacaattaattttacaggttctacgaattaaaattatttttgtatataaaaaataaaaaatggacaaacaaatttcaaaaatgctgattttgaacttatatatccaattaaaatggacagagtcgtaacttcataaataaaaaattatttttataaattaccgttaatttagttataaatataattctcatgatattaggattatatcaatcaatattaaatgtttaaatcttttttaaaaaaaggttataaatatcaagattaaattaaagaaatcctaatgatattaagattatgattaaatatagacctatatatatatatgtatattacattttggtgttttagttttatgatcataaattcataatattttagtttgaaagtctctgcaatccattgatcgcttaagtcttatatttcttacttattcttccaccattgtctaattaaggttagcaattttcatttattttttttaaataagaatgttatatcatttttaaataataataataataannttattattattattattatatctcatctaataagtttctctttcaattattgcatatttaaatttaaatgtaattaaactagtttagattataaatatctaaattaaatgaatcctaatgatattaagattataattatcttttaaatacaaaacctatattttttagaatatatgttgtgtaatttaatttctttgtttttagtttttagtaataatttgaatttattacgatattattaaatcttatctaataagtttatctttatattttacatatctaaatttaaattaaaaacaaattacttaaactagttcaggttctaaaaatcaaagttaaattaaactaatcctaataatattagaattataattaaataggcctatatatatatgtgtgtgtaagtgtgttgggtctatacttattacgttttggtgtttttaattaattcaaaataattaaggtctcacttattaattagtcttaatattccttccttaattattcttcgagcattgttaataaggtcagcaattttcatttatttattataagactttatttaataatttttttttttgaaaaaaatataataaataaataattataatataaattattgtaagaccaatataaatataataataaaattacatatatgttttttaataatttaagtgatgatttcatataattacagttaaagaagattatgaggattaatagtggattgggtttgatcaagtcgaagttgcaaaagcgtcacacatcaacaaaggttaattatgttattaataatctcttaatattaattttcacttttgagtattattaatacttatttttgtttattgtaacagaatgaaaaaaccaatcaacactctttgtctttgactgagaaagacactgtaattccatcttcatcttttgaaaaaagtaattgatttgtctcatttattttgatatttttttaatctatattgtatatttcattcacttaatgcattaataattattaataaatatatctttttttatttagaatgtccttcgaagaaagctcttcctgttgagaagttagtgtgtgccaactcaaattacacagctgcaaaatatgaaatagaaaattctaccgaaagaaaatcaatcttaaggagaccatctagcaaatatgaaactccactagatta

SEQ ID NO: 161394 - DNA, 8213 bp, Cannabis sativa
tgtctcgagagaagttggagcatggaacaatgggaatgataatctcccagtcttgcctcctccttgatagaaaaaaacacccgaactcggctctctgtcaataagatggctactgcccacttgaaacaaaaatactttggtaccaaataaggaatggaatttccatcagctctcaatttcttcctctcttgagctttcagttccttttcttcttcgagacaaggttttgacgagtgtaaaagctgcaattagcgcaatttgcaaatgttctgcactagttgttttgacgctaatcctccccattttctgactattcatgttggcgttgactgataatttcaagttcctattaagtcgaaactcagactgtagatttccagtcaataccatctccttttttaaagagagaagagtcattgtcaggctgaccatgtcattcctgactgggtagtctcttcccctaataatagcttcaaagctcccaccatatgctgcttgcccaggaccactcattctaccagcattgactaagaatttcaatctcttccccaatgaaatggaatctccaagcttggcaccaatgtaatacttgttatcaaaggaggtcaatgaaactccacagtcaccaatattgtgccacaattctggaagccttgtattgctgtggactgtatacatcaaatcctttccagcagactgaacatctagaccaacagaataagtagctctcccaggtcccgagtaagatgcagcgcactcagattgaatactaaaatcctgcttgtccttgctcatctgcccagtgactgaggcaaagagatcctggtttatagccatagctgcttcaacacttactccatcaaatccaacatcgtgatcccatccttggggatcaaggactggtcttacaagccatggatcacttgtaacaaggccgcggtatctatgcacagggaaatctgagtcaaaacttggaggaaatgccgcatctggtagcgagacatcttctggggatgcttgccgagtgtctgcattatcatcatttgccaacttttcccccatgtgaaacgtgctctcccttcgcttgacatactcctctttcaattgttttttcatatatagagtctctctataatccaactcatcgagatattcttttttctgtgacttagtcagtctctcaaactgagattttgtcaggatgcggattggaggcagttggtcatactcatcttcttcctcggcatcaaagattaggctttcgtcaatctcaccgtcacctccacttggattcactatcggacgatgcctaaggagcgatgagaggagatgcggaagcgaaggtagcctagtagcattcactggccccagctcaatactctcttgcaatttcaagatgacattgacatcactgagaactttagtacaaatgcataatagcaaaaattgtgatctccaaacctgtccatttggaagaatcttttcccccatcgtatttttcttgcactgaggatggttctcaactaaaagtacaggggtttcaagccttgggtcagcaactgcctgttgtatattctgctgcacaaaatctgtgtagtgggacacataagattcaaaggttatggggcaaccattaggtccctctggaagtgcagaggaagaatgagtcatgacaagaatggtgttgaaccaaattgaagcaccaaacacgtcagtaataagtttgaaaagagggaagtcatcagagctcatactgacaaggtctaagcgatcaaagtataatactatgtcaggtggggattttcttatgaatctcttcacagaatgtaggatcttcttatttcttttagcattacttgcagatggtggtaaaagaccaggagtatcaatgatggttatcctaattccattaacagttcccacaacctcttgaatgtggtctgtggcaggtcgaaatgcatccgtcgttgtttttgtctgatcaaatatagaatttattgtagcactcttgccaacacctgtttttccaatagtaagtattttgataggaaaatccaattcaggcaggccagctgcttctcgttcggctacgatagctctggccttgttgcttacatggtagattttttttagatctgattcctctgcccgtatcaaagttgctaggtgaattcgatatagaacctttgcaactagaagattgttctctggcagcccaagccggcggagaagaagcagaaacttaacttgaaggtcctcaatctttatcagtggatcaaacttttttccattgacaccatggggggaattgttagaataattaatcgcaagttgcggtgttgagggctgtggatgattttcttgattactattagaagagcatggcgcctgagagacaggtgttgcctctaaattagaagaatgagtttcacctacagaataaggagatcaaatacaaattataattaaaaaacaattaatgataaataaacaatgcgtataataaaattcacggaagatgacagaaaattggcccaaatggtgcaggaaaataatcaaagtaaatcgcaaagtactcatgaacagatccaagtctctaactggcccagagctactattagtttacatcacaatggaacagaacagaatgaagagaaacaagcgaaacaattctcttgccttaagtatatctttttcttcatctttttttcttgatatgataagttatattaatgagagatgatgaattatcatatgtaagaaaaatcagatttattgagaaacatcatataatgtcataattttatatcttgttaaacatgtaaaagtgaggggaaaaaacagagcattgaattaagagtgccaaacacagtacaagaaattgcagtgaagaaactaatccaaattaggagaaagcttcattcccctatgcaaccgtgttaatttcaattaaaatacatccgcacaaaattatcttatttgagttatttttaactccagtcaatgatagatagtcacttcccaccatgctcaaaattattttgcccaagttttagaaaagaaagcaataaaaggtaaactaggtctgcatcgtttctaactttctttcctaaagcctctctcactccttccctcacctcactaaaacaaaataaaaataaataaatagtaaaatcttcagtaggaaaccatctgctgttcactaatccagttaaaaactcacaatcagaaggttaacaattgtgcaatacctcggtcatcaagctcttcttcaacaggttcctcatcaaagaaactgtcactgcctgatagtggtctagaagagaccactgacttggatactatctgagaaaaaaaccattcccgaacactcttcatctttctgagaaaaatttcaaatattagcaaataaaacaattactgagctaaatcttttcaaaaggagtataaagaaaacagaaagtaacaaaaagataaacctgtatagtcccaaacatcaaaagaaaaaacaaaatcaacatggtacactacacactcagtaggtttaaaataccaattttgaataaaaacaaactttcataaagcagttagaaattttaaacccgacaataaatctttaagaaaagaaaaaaggtagcttcaaatgcatattaatgatattaggcaagttaggcattgcatttacggctcttagttaagataatgaaataatttcagctatacctagatgctcatgcaagctaattctacagtttggtataatattacaatttgattggtacataatgtaaaaattaatctacttccaaagataatcataatcccctaaaaccaacaccaaaaaagataattgttttatactgaactgagcagagccataaaaccattctaattaataaagaaaattattttgttttgaagcaataaaaatctcccagcaaaataagaagcccaaacaatttcctcgagtctttaaattttgcgattgtttctatgcaatagagtgaaatacgagtatgtgtataaatataatatattttaaagaagagagggtttacctagaaaggaacaaattaagccgaaatcaatccaagctggaagctattcctctaaaccgaacaaacattggaaaccataatttataatttgattaaagaaaaattataagaattagagcatggaaatcccaattgaaatttagatgaaatcggaacttgttaaaagtgtggaagtgaatgtgtgttggtggtcggtgaaaacgaagagcgagaaagttgtgaggctgaggaagaaaacgaagaaccagaccaagatcaaagatagagattagagagagataagacaagagggattttttttttttttttttcaaagaaaaagaaaaagaaaggcaagagggatttttgataaacgaaaccgaacccgaatctcaaacccaaactgggaacgatccgacccgatggtgtgagtgagaatcaagtgctcaccgaccacggtttcttgttctcttcgtaatgccacgtggaggatagctaaattgaatatgaacaatcaataaagaaaaaatatatattattaaaaaactcagcaaaacaaaatcttttggaaaaaaaaaattcaatttggtaaaatggaaatggaaattaggatataataaaatagaattaaaaaatatatattattatagaataatataatttaaagaaagaaaataaaaaataaaataaataaattttgagcgtgttattttaatggattgatctcctatttataaaatatgtgagtcatagattagaaaattaaagaaaagaaatagtaattaagatttggatatccacaaatagttattatttataagactccttcttagatgtttataataactgtctcgttaaaaattttacccaaaaaattgagtgggacaaaactcggtcaagggaaaaatagtgcaatgaaattactccccctcattttggtattctttgagatattttaattgacgtattccaatcttgtgaactatcttcttgaatgttgattttgataatgatttcgtaaataagtctgcaagattattacttgatcgaatttattgaacatcaatattaccattttcttgaagattgtgtgtaaagaagaatttttgtgaaatatgtttaattctatttcctttaatgtaccctcctttcagatgagtgatgcaagcaacattatcttcatagaggactgttggtacttctttagatgttaatccacatgctcctcaaatatgtcgtgccattgatcttaaacatacacattctcgacttgccacgtgaattacgagtatcccagaatgatttgaggaggtaaccaccagagtttactttgttgacctccaagatatagcagtgtcaccgaaagtgaacaaagagcttatttgagatctagccttatgtggatcagataaatatctcgcatttgtgtagccaatgagttgtaacccacaattaataaaatagcacagtcttttatcaatagtaccttgaagattgtgcttaatccctttccaatatctgtatgttggagcaaaactaaatattgctaacaaattgatagagaaagctatatcagatcttgtgcagttagcaagatatattaatggtccaattgcactatgatatggtacttgaggaccaagaagctcttcatgttcatatctaggttggaaatggtatttttccacatcaagtaatttaactaccattgggctactcaatgggtctgatttatccatataaaactgcttcaaaatcttttcaacataagttgactgatgaatgaaaatcccactttttaaatgttcaatttgtaaaccaagacaaaaaaaaatcctaaatatttcatttcgaactctttctttagatattccacagcttctgaaagtttttcaagagttttaataatattcaagtcatcaacatatacaataatgataacaaactcaaaacttgaactttttatgaaaatacatggacaaataggattatttgtatatccttcctttaaaaaatattcactaagtcaattataccacatgcattctgaatgttttagtccatacaaggatctttgtaatttaattgagcactttacacaaggagtttcatgtaaagtgatatctagtgattcatacaaataaattgtgattatatctattaatcgcgtattaagtttttcactaacagccttgctacccaaatatcttaatgttattgcattcaccacaagagaatatatctcttcataatcaatacatggtctttgagaaaaatattgtgctacaagtcttgctttgtagctttcaacttcatttttctcatttctttttcgtacaaatacccatttgcatctagcaggtttcacaccttcagttgtttagactataggtccaaataatttgcatttagtaagtgaattcaattctatttgaattttttctgtttgttttggccaatcttttctattttgacattctctgacagatttaggttctagatcctcatttttgtttataatttctagcgctaaattgtaagaaaaaaaaattatcgacaactacttcaagtcgaaaccattctttccctgtattgacataatttattgagatctcattatttctaatatttttaggtacatgaatctcttcaagagatttatttatatcaacatcttcctcaaaattatcaacccttcattaggatcatcttgataatttgctcattttcattttcgagaatgtttatctttggaaccgatggtctaccacattttaagtgtgctttagactcattagcaaattgtccttctgggacttcaattcgagttggagcattttcagttagagtgtgtgattttgtaattttctttgggtcagtgaatgcatctggtaattgatttgtaatattttgcaaataaattattctttgaacttcaagttcacattattttgtacgaggattaaattgagataatgattgtccattccatgtaatttattttttcagttgtttcttttaccctctccctaaagttaggaaacttgtctcatcaaaatgacaatcggcaaagcatgtcgtaaatatatctctagttgtaggtccaagatatttaacgatagacggagatttatacccgacatatattatcttcctcctttgagaaccctttttttttctttatggtagagctattggaacaaatactgtacaacaaaaatccttagacaggaaatatttggttccttaccaaaactagttggaatggggagaatttgtgatatgatattggtcttatgtgtacaaatgctccaacatgtaaactagcatgcctccaagctaaaatttagagttttgttctcataagtaacagtcttgcgtattgcaattaattagaggcgtttcatgaatgattctgctagaccattttgtgtatgtacatgagcaataggattttctacttttatctctatttacatacaataatcattaaaaacatgtgatgtaaattcactagaatatcaagaaaaattgtcttgattgcatagtcgggaaattgtgttcgtaatcagattatttgtgcaagtaatcttacaaatgctacattacgaatagataataagcaaacatgtgaccatctagttgatacatataacaattaccataaaatatcgaaatagtccacatagtgggcaaatagatccacatattattggattttgtgctctaactaaaactttatttcaatgttatcttgaatttcatttatcaataaaggaacaaaattattttattacttgtttaaatataatgcttggttcacatgtttgcttcatggtcattagtttgatttataaatacttttaaatccttatcacattgttattcataattgtaagaaatcaagctagctgtaaattagttgtacatttacaattaatgtatttttcatttactctagtatgactaggtgttcacattgtattatatataccctttgttggtaggaaatgtgacttccaaacgttggggaggacaaattagttgctccaagggtaagcttttgtgtattaaactaattacacactttattcatttctttctaaaattagcaacgtaattttgttcttttttgggtctaggtcatgaattgtttggtggagatactaacagccg

SEQ ID NO: 161395 - DNA, 1481 bp, Cannabis sativa
gtagtagtagcactatccctagaagaatcatcatgactacaatcagcactcacctgacgaggtgaaattagctccttacaatcagacaagtatgtagaaccatggcgattagttccaaatcttctcaagccatcttcagaagagcgatcagccatgactaaagcagtttcagtacttgtactagttaaccctgttcctgttctagcagaaaacgaagattcaaccctggagttatgaactccatggatttgtgaactatgtcctgaagatttaactacacaatcagctgaatgatcttccatctacaggaaaaaaaattatcttggcacttcagcaactaaaggagctcaaaacccatgtaacaaaactaaaaacaatcaagaaagttctgaaatccaaacaataaaaaattaaagtgggagtttctggcttaaaagaaaataaaagaaaaacaaaaacttaattatactcataatcataataaattcaagctgagaaatgaaatcgctctcttgattgaatttgaagacccaaatatatctgagaagccataaaagtaagaataggacagaaatatgagaaatggtcacactgacactgaatttgaacaaatagaagcaaaatattaatttagtagaggaaagaagagagtagagtacctcatacgtagcgcgagaagacgagccaccgcaaattaaggaagagagtctggagcgattcgatgaaccactgagtcggggacgagatgaaccggatcccaatcgactgctgctggaacccatttgagagaaaatagcttacttggagagattcagtaagagaaaaggaagaagaagaagaagataactgagaagagaactgaaaaggaactaggacacaatcccaaactcgaaacctctttactatttttaataataatatatgatataataattaaacagaataaataaataaattcaaaactgttacattctttcatatccataaattaaaataatattattacaaacaaaaaaaaattactaggggctttggatttattattgatattctttctttttttatttattttgaaaaaaaaaaatgcattttttaatggggacaaaatcggttcacaatctaaattattattcttttaattggaaaaaaaatgtattggttagaagtaaagaatttaatcatttgtttatagtgtcaagttatgttaatgtaaattaaatattaggatttgcttctatataaattaaagaatgtcggtgtgatttgttcgaatttataaattgttatttttttttattaataataccatttagtggaataattaattggatatagtaatagttgatatattaaaaaaagagtaatttttttttttaatatgtattattggtttatgtttagaaatttttacatcgaaaatataaaatgataactttattacctaaataccactacacggtaaactaaacatttatatcctt

SEQ ID NO: 161396 - DNA, 5839 bp, Cannabis sativa
tcgtatcgctcgattcctcaagaaaggaagatacgctcaacgtactggaaccggtgctcccgtctacctagctgctgttcttgaatacctcgccgctgaggttttggaattggctggaaatgctgcccgtgacaacaagaagacaagaattaaccctagacacgttcaattggctgtgaggaacgatgaggaattggggaaattactccacggtgttacaatcgccagcggtggtgttcttcccaacattaacccagttttgctaccaaagaagactaagtctgctgaatctgagaaaactgcaactaaatcgcccaaatctcccaagaaggcctaaacgcgttaatggaaaataataggaaaaactaggtctggttatgtaattaggtcttgtatttccccttttcgtgttgttttggttcttgtagaaatatgtagttcgatatatttttaatttaatggaaattcactctttttctgttaatttcttgcatttatgttgcttattttcgtatgaattctccgtaaaatgattgaaaaattagctcaacaccgattatcaatgtttaatatacattatttgtttttaataagaagtaataattctattaattaaactgaaccaaattcaacaatttggcaaaagccccaacaaatcttcttacaaattggatctatacattttttctcaaatatactcaaattttgatttcatatatgatacccgctaaaacagcgtaaaaacatcaaatataatgagattattttggatttaattctctagtacatttacaacatttttggtgcttgctaagtttgtaaaaagttttgctttaaatttgaataaattttatgatgtgattactaaagggaatagagaatattgggatatagttaccaatactctctatgcttgtgttgctaaaattatgttttttttggtgttgttttgacactatatttaactttgtacattggagatgccgttagtattacattttttctaatttttctttttatccctaaatgttagagagtcttaaattattaatgtgtggaaatattataatatatataagatctatggactactctttttattgctaatactagattactgtactgaattgtaattaaatgtgctggtttgttaattagtttgtggattttgtgttgtgtgatttgattagttttgctcaattaattggaaatgtgttgagaactgaggtatatacgttagtgctttttaattatttgcttgtgaattattggataggttactgtattgatttatttatttactcttctatgttctgttatgtactcttctacgttcaatagcaaaaattaagtaaagttgtactgatatctcatttcatcaatttgaagaagtaattgcccttttgcttctatccattatatcctaaacaaggtatatattagcatgtgtgattagattacatataaggcctgttttactgtaaatttatgcttattttccatttattttatatatttttcagtcaatatttacatctttaatctgtataaacaggaattaatctctgaaattaagtatgagatattcaaagacttggcaaacttaaactcttcaataatgcacgtgcgagacacgtgccatccaacacttacgtctgattgtcttaatcccattcgtcaaaattaaaccttgcggattgccagcgtggccctaaatattagattttacaaattatcaactttatgattagattggtccaaatgaaaccttgcggattgccagcgtggcatacccttccacactatataaacgtacctaacatgaatttcattacaatcaacagagaataacctgttttccctccatttccaattttttcaagaactcaaatctcttcagagaaaatcttccaagaagtttcagcaatggaaactacaaaagcaaccaagggtggagccaagggagccggaggaaggaaaggcggagacaggaagaagtcggtcactaagtccgtcaaggctggacttcagttccccgtgggtcgtatcgctcgattcctcaagaagggaaggtacgctcaacgtactggtaccggtgctcccgtctaccttgctgctgttcttgaatacctcgccgccgaggttttggagttggccggaaatgctgctcgtgacaacaagaagaacagaatcaaccctagacacgttcaactggctgtgaggaacgatgaggaattagggaaattgcttcacggtgttacaatcgcaagcggtggtgttcttcccaacattaacccagttttgctaccgaagaagactaagtctgctgaatctgaaaaaactgcatccaaatcacccaaatctcccaaaaaggcctaaatacattaatggaaaagctagttgatatgtaattgaaattaggtcttgatttggttcttgtagaggttactgcttttcgtttgttttctttgcaatcgctttaaagattgtatttttagtattaggttgtaccctttgcaaatctttttggtttggttcttggcgaaatatgcaatggaaattcacctttatttatcattacaatgaccctttgttagtttttttggttaagtttcgtaatgtgggattggactggttcagctctatcaattgaaaatgtgttcaaaacttagttgcatacacatacagtatagatttgtctttttgaataaattttcaagtttcattaaccatggaccccaaaattggagagcttatttagatatggtgtatttgtttttcaattttattgcaaattaacctcttgtatatgatatgatcacaaatcaacaataaccgaaatcgaagacagcaactcaaattttatgagggtttgttttctttgctgttaaagtccacattcaaatttttattgctaaaaatggcgtcgaagaaaagagtccgtccggtgcagaagaaaaggctgaaaacgacatcatcatcatcatcatcatcatcatctgctgaggacagaatttcgagaatacctgatgcactcattctacacatactctcgtttcttcccactgtggatgccgtttccacaagccttctttcaaatcgttggaaacgcatgtggtatttagtccccaacctctctttctccattactgcttctcgttataaatcatcacaggaccaggaaaagttgtgcaattatgtagatagttgtttggaacaccgaaagaaagctatgttttataattgcaattcagtcttaactagttttaagcttcatatggattgctatgaaagaagcaaggatcaccacttagataaatggttagcttttgcggttgagaaaaatgttaaggagttaaatctttgcttgagggtagagaaataggaaggtgtgtactttgacttgatgattctctactccttacctaaaaccttagcagtcaacgcaagatatttgactatttttgagttgaatagggtggagttgaactctgattactcatatagttttccatcattaaaaacattgtcattgacttatgtcaactttgtaagtacatctgtggtagatatgatcttgttgggttctcctttccttgaaaaatgactgataaattattgttttttttatactattagttcaaatctgctccaaatacgtagttcaagcctgaagttcttggaaattagactcgttgaaattcattggattttaaagcaaattgaagccataaatcttgagtcattggaactaaatggtgtttgctttggctcattaaatctctctgtaggcaaggcaattacaaatctctcattgagttgtgattggcgtatgaatgagtcttcttcattgttggagtatttcatttcaaaccttcctctgcttgagaatttgactttgggaaatagtggaatagggagcttaaagcacataaaactctcgaatcaacacttgaaaagtttcaatgtgaataatccttatgatgatgaaatgactgttatgattgaacaggctccataattagcatcattttgttatacaggtaatatcaattttagtatttcaatggagtcatataattctttgaatggaacatttgtaattcttgggcagcatgagaactatgatggagactggtttatcaacatgatgaattttcttatgaatctcaattgttcctggaatatggtaacactacaagttgacacagctgaggtacgtttactagtattgttttgatttgtggtgttatttcaatttattgtctatcttatattttattcgatttcctttactctgtacatgaatgaaggctctcatctttccgaaaaacttgaagagaatgtttggaaacttgaagattgtttctccttttccgttggttaattgggatcatcttagagtttttactaaatgtaaaccagagaaagaatcagaattgagagatgttttgctgtggattttcccatctttgaagacattatctatagcaaaaggtcttcttaaacaatgattttgggtagggataactctattctatggctgctgagattactgtaatgatttctatcatttgaaatattttggttgctggctaagtttgcaatatgtttaaatccagtaaactagtggtcacagaaaactaattagtataattatgatacatttatgatgtgattactataaaatattttgccctgtgtgaagtgtgtattgtcctccttgcacttctgctattcaattgaactgaaagtaaaaccaataacaaaggttgtgagtcaaacaagatgaagagggctacttgggagagatacatattacctaaatttatcattactatcaaagaacagtcataatttactataaaatgtttttgacttttgtaagtttcagtttgttgctaaaaaaaaaagagtaaaaacaacaacaaactaatcaaattgttaatccaaacaataagtggctgttctgttacaaagttccagtcttctagattattactaaaattaaaattagtagaaaaacaattaattaggcttctgtgtgaataataaggaaggattctgttgagaggcaaaatattttggtgaagtgtgatggattttgtagaatatgatttctcatttgagtaattttttttttattataataagaaaagaatgtcaactatagtaattatgaaagtaattaaattttagaatcaatgctattaaataggtaattgactaagagcattttaaggaaacaaagaaattgtcttgaatgttaatggagtctaaaaaaagtagttaaatgagttgtcacacttagattgatttaatttaatatattatgggatactaatttttaacaattgatcttaattcaatttttgtgaccaagaaaataagtaaggtgattcaatttaagaatattaatacataaattgatcatatttataataagacatatatggactcatcaatgatagtgctctggtgctaatgatttgcctgtcttagggtggggaatggttgttgaagctgttctataatgtttgttgtttgtttgatttggtttttttagtgtcgcgcatcttatgtgtgtaggttttttttggggagtttgtatctttttatgctcatgtgtgagtcttgagtttattgctccttttgtatcagtgtgattggtcgatagttatcatctcttagtgagattactgttttttcattagacttgtaggactcttaccttgaattaatggcacgtttactatacagtaatcagaattggaataaattaacggagaaatgtaacggaataaatgaaaaataatcggaatcaatatttgtaatatgt

SEQ ID NO: 161397 - DNA, 10423 bp, Cannabis sativa
ttttcctccgtgattattgttataagcagctaccattttctctacagcaaaaaaccagcagaaggctaaaggatagcacagaccaatcacgaaccaaactctcgaaccaaaaccctaacaaatactcgaatcgagtcacgaaccgaattgcaaacaaacacacgaaccaaaacacgaaaatcacacaaatcaaaatactaacaatcacaccatgtcaaaagacaagacatataaattattattaatattaatattattttaaaatgtactgaaatactgtaaaataaaaaagttctacatctccagcaccatgagtgtaaaaattaaccagcgaaaaataatataaagtaaacttgaaaaaatctaattatacacttaaaaatatacctaatcaaaataaaaataaaaattataactaaatatatatacattacacatgtaatattaactatatatattattgtggatattgtctcatatggaataaatagtagagaattgagtcatatataaaaacatgggctactctactccaattggttttaaaatggaaccccatgattcttaacatggtattagagccataccccttgcgcaagtgatcttatccgatccgcacctatacagatagtgatcatgtcaattttaagggggaatattgtaaaaattgtctcacatgaaataaatagtaaagaattgagctaagaatataaactactccactcatagccaattaattttgagatagaaccccaatatcgcattattcatcaaatgctaatttaggttttgtgtaaacgaatttatttaatatcaaataatctgaaacttcgagagaaaagacacttcgaatctaacggctatctggattttgtctcattttgtggaggaatcatggagtggaatcaccacccacttgctcaccacagcaagtcacaccctaaccatgaagaaattacttaaataaaaacacataaacattaaacaattctccaactttggcttgttaatggttgatttatggcctagcctaagccaccacaacctcttctattctacccatctcagaaagaattttcatttctaactccctttccatggctgaattaagctccttctcaataactcctatcaattcttctcgctttcccactaaccaccatagttccccaaagttgagcactttaaaactcacaagtcaaaatcaaaagtgtgataaactccttgttttcagtgattacgacccgctttgctatgtgaaatctgggtttgttaaccccaagaattcttctcatttgtatggtgttgaattgggtggaagtggaaccagacccaaaagccaaaaatgtaaaaatttcccaattgggtgttctaaattctcagtcttcagtaattacaagctcactggtacagggccaaggtttcatcacagtacaaatgagatgggggctatcagaggcataacctcagcgggaagttcagatagaaataataataagaagaataaattcatttcaaattctacttcagcactgaatatggataaagctgtggagaaaaacaaagggggtggtgataattactatgatgccattgttattgggtcaggaataggaggcttggtggcagccacccaactggcagtgaagggtgcccgggttttggttttggaaaagtatgtgattcctggtgggagttctggatattaccagagaaatggttatacttttgatgttggttcttctgtgatgttcggtttcagtgataaggtatgttttccttggtcaattttaagctatttttcagtacatttgtgggctagatagactagagaattaaagtgctagttgaattccaagtaatgaaaagagaattacatagactaggcactagctttatgtttctatctatgatcggtagaaattagcaattgttttgttttcattttctgaaaatttcataccagttgttactcaatctgagcagggtaatctaaatttaattacacaagcattggcagcagttggttgtgaaatgccagtgatacctgatccaacaacagtccatttccatctgcccaacaacctttctgtgctagttcataaagagtacagtgaattcatagcggaacttactagtaaatttccccatgaaaaggaaggaatcttgaaattctacggcgtatgctggaaggtctatatttgtttttatctcctagattggctgcaacttcctctggggcattttggcctttacatgtaatacataacttaccttaaacagttgcttaaacatttggtagatcttcaatgccttaaactcactggaactaaagtcacttgaggagccaatctatcttttcgggcagtttttccagaagcctgttgagtgcttgacacttggtaattacttatgctgacatagaatctgttgatttttgcatttgcttactacaatattttctggttagttatgtgttaaaaaaagagtattagaaagctaagacatgattaagttaaatctttttctatctatatcagtatcaatttttcttagatgaatttgcagtttacatgatgttataatcctctgcagcctactatctgcctcaaaatgctggagatatagctaggaagtatattaaagatcctgagttgttgtctttcatagatgcagaggttagcctcaacttcttttcatctcttaaaatttgttttagaagtttatgctcatttattttctggctttggaggtccacaaaagacctatgcattgatatgatgaagataatatacttgtcgtggatttgcagtgttttatagtaagcacggtcaatgctttgcaaacaccaatgataaatgcaggcatggtgagtttctctttcaatcatgttttatggaccattttgctttctctgataaatgttccttatatatttataggagatattaagctcatgattattgaccctcacaaaagatatttttatgtgtttctgttaggttttgtgtgacaggcactatggtggaattaactaccctattggtggtgttggtggaatagcagagtcattagctaaaggtctcattgaccaaggaagtgagatactctacaaggcaaatgtgactgaaattataattgaccaaggccaggctgtgagttcaaatttactattgattgaatgagcaatcttaatataattatgttcaattcttttataagccaaaaatatgatcttgacatatatgaatattttcttgtaggtgggagtaaggatgtcggataaacgtgaattctttgccaaaacagtaatatcaaatgctactcgatgggatacctttggttagtttttagctaggatatctaaacattttacatgactagttttagaacaacaatctggtgcgctacgtggtttttcagtaatatgtagttgcgtacaatttcgcgttattacagggaagcttttgaaaggaaaagaccttccaaaggaagaggaaaattttcaaaaagcttatgtgaaggccccatcttttctttccattcacatgggagttaaagctgaggttctaccaccagatacagattgccatcactttgttctcgaggtatttaaacatcttggtagtctaattttgatggaaatacgcaggacattagaatcagaatgtgttagctgatataatcaccttctttttatgcttaatcttttctagaatgattggactagacttgagaagccgtatggaagcatttttttaagtattcctactgttctcgattcatcacttgcaccagaagggcgccatattcttcacatatttacaacctcttccattgaagattgggaggtaggtgcaatggtgtggtaaaagtgacaaaaaattattaccaatcgtcttcccctctaaagaataagaagagcttgttttagttgccactaattgaggaggaattattttatagggactctctccaaaagaatatgtggaaaagaaggagcttgtggcaaatgaaatcattagcagattagagaagaaactatttccaggactagcatcttccattgattttatagaggtatatataatgatattgcatctttttaaagacttgtattatgaaatcttgaacctgatcaataatttgtgctggcataaaggtaatatgtgtttgcattaacaaaagaaaaaagaagaagaagataaatatgtgttaagaattaagatctatgggattccaacctaaaatcgatttgacaattaatggagtgactcatggttattatgtgtaataatgtcttcatatctttttgatgtggaacactcttatgtgtcctctcttaagataatggcactttttgggctcactaatcttgaattggatctctagcaacttttttcctgttctcgctattcttttgaatcgaatctctagtggtttttttactcaatattattttggattggatgtctagcagctttgttttcttttttatttttctataaggctcaaaaacttaatccataaggttctaatttaaaaccaattaacaataagtggagtgacttttggttcttgtaagtgtattaatgtcctcacatattttcgatgtgagacactcttataatatgtcggttatacattgtattttctctttaaataagttttctgatgcaattttcaaaatttgaccatcattgtatgcaagtgcaaattcctttttggctttcaaagattgttcaccaggagaagcagtaatagaaaaataaaaccgcagactaacttcacttttcttgttaactgttgctttagactaactccatttcctctttttgagaattctgagaatgattagcagtctattctaactatatcctatcatgataggtggggacaccaaagacacacagacgatacctagctcgtgataacggcacttatggaccaatgcctcgtggaactccgaaaggcttgctaggaatgccgttcaatacaacagtgagctatttaactctagttgatggtttactgtccatagttattttgagcatactgaatcagttgagcttacaaatatgaaaaaaatgcaggcaatagatggtctatactgtgttggtgatagctgctttcccggacaaggcgtaatagctgtagccttctcaggagtaatgtgtgctcaccgtgtagctgctgatattggtaagtaacattgtatagactaactcaatatatatttgattttttttataacttgtgtcataaggcatacttagatcaagttggaacctagaccatcattatctttcttggtatgattttgacttttgggggataaaactaatgattaatgtcctaaaactagcttataaaaacgaagtatgaataaacaaaagaagatatatttatttcacttgactgtttttttctttgcagggcttgagaaaaagtctcccctattggatgccgccctccttcgaactcttagttggctgaggtcactggcttgaatattatgcaggaaagtacaaaatccaatgtgttggcgtaatgcattgattgcttgcaagagcaaaatacaaattgttaatgcacatagatatgcactctccatttctttagtaggagctcaatcaatgaatcaatttccgccattgattcaacttggttcatcaaagttttcccatctcctatgatgaaagtaaggaaaagggcctgtagaagtggtatgtatgactgatgctttatatatataaaaaaagaaaattaggagttgattgcaaaaggtgatttctttcttgttttgaggattgatgaaaggggaaagagaaattacatgtatagaaaaagcaacattatttcttacaaaataaagaggtttcttttatcattacttttgtttagattagctgatagaaagcacatacagacttccaagttcatacattttccaccttgaaattaactagtgaaatctaaaaattcattgctaaatcataacaaccaatcaagtttggtcaactagacttgatatactaactaccatttcattctgaaagtaccacctgttaactaaagatgttcaatataaaggaaaaaaaaaaaactcccccatgtaatttgttgaactcttcaaatccttactatcacaaattctaagcttacagaaagcagaagctctagttcagtgatcctttcttgctttccttagttgatatgaaacttggcctccacaagatgagaccttaattccacagtaaatgcaactgtatccaaacttttatttccttctaagctcaagattggagtttcatccatcgcaaagataggtacgcaaagaggcggtaaccaaaaaccatggctaccagggcacagacttctgttatgccactgtctgtttgtattccgttaatggctggtgtcatgtgcccgtactgtaccttgagaagaagcctgtatgtgtggtagttgaaagacatatggcggatccaagatatgaatgctggaactttctgaaaatttgcaacaacagaaaagtgttactgtttcaatataatatttccaaagagtgagtttatttgaatttaatattaacaggtcaaagaaaatgtttggggattgaacattgttaagcaaagaaatggattcttacattcacaaagaatccaccagctagcatgaaggtcatcacagttacagaagccagagttgtagctttctttatgtccattaatgtagctccaatagctagcccaagtccctgcaatttacattattccattttcattttccaacataaatatatgatcatttttgctttggagattctcaaattaaaacactaggtttcagcttgtttgcttgataaattgggtgtggtattaaactaggctatatagtgaatctgaaaagggtatgttatgtatacctgagctgctacaatgcagaggaagactgtgagcatggttaggaagaagggacctgcactggtcttcaagcctgccatgaaatatactacaagaaggaaaagtattggaagcaacaggtcaagtggaaggtcacttgtggttctggccaaaaagtaagcgcttaatctatacatgtcagctgctcgttccttattcagcattgctcgttcttgtggaaaagcaaaaattgcagtgaagacgggaaagaatccccagaagacagcaatgaagaaaagcagtccggcctgcatttttgaaaaacagttagaattcccattctttagaacagtacatctttttcattcaagtctttctttatctttcattttacaactttactagtcaaatttatattcgttgagaagatgatggcgttacctgatcttgccgacctttgagggaatgaccatctgactgccaccagagtaaccccaaaatgactgccgtggctagaacttgggtgattctcaaccagctgaagtaatcatgcctccgttctttaattcctcgcctgaatagtatactatattgttggcaccagcttgccccccattccctttttctacaggacactgacttcagctcttcatcaagaggaagaggaacaatcagtttcttcttctctttgtctgcaactttggtttcataggcctccacaagatactgttttacaacaaaaacaccattacttatagctttgcttaaggaacaataaatctagagaggttgcttcagaaagtttttacctcatggacaacagcaggagacggttttccattaactgtatcattatctgaatttcccatttgcactttatcctctagttctgatggcaaagaaacatcgtttatatttccattcgcaagatccagcaagaactctgctgggttcatggcaattaaaggggagcatcctatggatgagaaataatccatagcttcagatgctttcccgaaatagagcaagctccctttcccaagaaggatcaatttgtcaaatttatggaagagcctgctcgatggctggtggatcgttgttaccacagtttttccagcctgcaatacaaaatattacaagttagtatcttctgtagccatattgcttctaaattttctgttgtaattgttaccaactcatggaacttggttttctcttggaattttgtataccaattattgtgcctgctattcatagaaattaaagccagtggttacacgtgatcattacctctgcaatgtcttgtaacatctgaacaattctcaaagcagttgtagaatccaagccagaggttggctcatcaagaaacagcagggaagggttgattatgatctcattgccaatgcaaactctcttcctttctccccctgacactccacggacaaatgagccacctatcatagtgtcttggcacctgcatatgtgaatttcctctggttagaccgttgctaatgccaaatgccgagttgtcagtgaaattgaaaatcagagaaaaagagaaatttctctacctctctaatcctagttcatagataacatccattgctcgtttttccttctcctctttggttagcttctttggcagtcgtaagagggctgcatatcttaatgtttctttcactgtcaggtgaggaaacagaacatcatcttgtgtcacaaatcctatcctgcattatgtatcatatcatttggttactcattgacattacaagtctgatttggaatatggttggtcaatataagtaattgaattcttacttgcttttcaagtacttggaatatggttggtcattataagtaattgagccaccaacagatgtctgcactatcctccctccgagcaaatttagaagtgtcgtctttccactccctgaaggtcccatcaaggctagaacttctcctggatttactgaacctgtaatcccatgcaagatgtctttctcttcacttgttctcattccttttatagttatcttgtatgttacttctttgaactgcatacatagtttggacaaaagggttaataataaacttcattctttagtactttatggtaaaaagaaaaattctttgaatagtttgaaactacaacataacataagggcaacacagttacgactctgaagagaaaatggatcagatttccatacccttccttccaatatttttatgtctttgatgtttcttctatgttctacattccagagccgttagttcgagggctcgggaaaacaagtgaaagttatcttcctaaaccaaagtacatgtttctaagctagttttgtcaattgttgaaaaagaaaaagcagttctgttttcgtcctataaattctaatgttaagcatttgtgttttggtttggaaagaagggcaagtcttgtacactaaagtcatgtagaatgaaactatgtacaagactgaacctgatcaaatttgctatatttgctagccatgttctatggttcccgtagttggtgtctagatgaatctccttcctttttgcctgtccaaatagatagtaagtaccacatcaaaattcttgaactatcaactatcatcatcacatcaggtttcaacaccggttttgcagatttgggaagcaaaattttgttgcatgactacttttgattaagtgtttcttagtttctatttcttttttccccctttttttttaccttgagataaattggcaacgtgggttcggttcgaaatttcggtttctgaatgccagcttcaagatcttcagctgcaatattgaaatcaaagtgctttgttaatacaatttgttcttcattcaacttttgtcagccaatgaacgagtgtataatgcaaaataatgatcaaagtccaaacttttattgcatgggatgctcaaagtcaaaagtagatttttacataatcaaaacttttattcagtttgggctttaataagctattaatctgcataaaactagatgtaaatggcttgagaaagtgtggagaggaaacacaaagaaaatgactttatttattttattttttttttgaaaaaattaatgatttaaatttgaaccaatgtaatctcacacacacttgacacttgcctaacagtatcgttattatctgacttctttttctagtttggtgaagagacagacatcccaagtgaccaaaagtcttgactttggtgaagaggtagttggggaatctatggaaattaagagctcaatgaactgacgtcacatactaattaattaaatcagtcaattccaagatttttttagaggacccaaataattttgacacctaattaaagaactatcacatacagacacaagtataataatataggagaaatgctaaacgacactattattggtgcctagcaccttcctatgtgtcagtatcgttattaatctaactaagtatcgggtctcatatagtttaatataataacttttaggaaatatcgctagccaa

SEQ ID NO: 161398 - DNA, 1597 bp, Cannabis sativa
taggagtaaattaaaatatgaagaagataacaagaggtatacatcttcaatagttcattttattctgtcattactaaaggatcaacaggaaatgaaggaagattattaaagcttattcattgatagacaatgaaagaaaattataatgatattctatatagtagaaaataaacaaaccacaaaattataaaacttgaatctgtcaaaatataatcagataagataaagatgatgatagctaagttaactagtatgtagagaataccattatcatcattacaatggctccagaaccagaataagatcaagaaaaacgagtactctattttccctactcaaaaatcagtcttgtaacagagaaaacatacccaacaaacaataacattgagaacactgaattttactcttaatacgaatcaaaacaaagaacaaagcaacacaaacagagtaatacaccaaaatcaaatccgaagcaaacccatatccagaccctttttcttcatcatcaaatttcatagatagcaccagaagaagtaatcaaataaaaatactaatctcagtaccctaatgaatcagttcaagcacacctacatataaacaatccatatccatccacttaaaattaaatataacaatttgggttttattcaaaatcagtgattaaacatgtccaacatttcaattcaatatcttaaatttcatttgtaataaatccaaacaaagaaaccctaaaaatttatataattgaaaaattgagagaaaggaagactaactataagaataagtacccaaaaccctagaatctatctctgcatcttcagatatgaggtttgacgacgtccatgacgctcttaatcttaggagcatagagctggtaaaccagagcctgcctcttagctatctccagctgagcctttccatcagaatacgcagaggctacagcagaaggctcattgagcttctgggtttggcggaaagcgtcaactgtgcggcgcttcgtgtactctctgatgttgtaatcggtgaactgccgagctgtgcgaagaagggatcggaagagagccaggacctccgctctcgctggtgctgctgccattgttgagttgagattgagaataatataagttgtgtgatattttaaagggaaattatcattctcataccaattttatgaaataatttcaataataccttttttttttctactatataattttaaatgaggttttttttttacaaaactattgaattttgagtaaaattttacaattttactattaaatgaacaatgcataaattattaataaatgttcatataatttgtcctcaaaattgttaaatctagaagtactcatgtcatgagagatatcttaatattataaaatattgattatttaaaaatgataatcgtgatgaaaacggtactctaaatctaaaaaagacttcatagagaagttagatataacatatttgattataattgaacccttcaagtggttgtaggtacctataaatgattcacacatactgtggaagaattatagaaaatatatgatcatagataatatacggtaatattttaaaagtgataacaata

SEQ ID NO: 161399 - DNA, 7877 bp, Cannabis sativa
gactggggttggggtttggggtccaggtcgaggttcgggttggggttcggggtctggatctaggttcgggtttgggggcagggtctgacgtcggggctagagtccgggtccgaaatatttatgaaagaaaatataaataaattataattaaaaaaatatataattacaagttctttaagagtgattttcttttgtttttaaaattttgattctcatttttaaaattaaaaagcgaaaatagttttatagaacgtgatttctgaaaatatttttacttatctaattgaaaaaccaaaaaactgattaaaaagtgtgttgcagaatacacttataatttcctcaaatgcacatctgaatttgcaatgtttatgcacattttctcctgtgactcgctttgtgatcatgctaatagcagttggttaggattgtgagatatggtttagatttttcttgagccaagaggagtattttgaaaattttcccctttaacttattgacacttgtcatagctactgatgacttttcattttaaattataatggattttgttacagtacaatgggggtccgcaactgactaatgatgactactgcaaggattgccttgttgatgaggcccgcactctggtttgtgccgatagctacagagtttgcagaactttaatgaaacaagttgctgaagatgtatttgcagggaggtgtgaagatggagcttactttgtttccaaagcatggtatgactgcaaagtttatatgtttctaccctctgggatatctgctgaatatttgttgtagtgcgacttatttgatatttctttctaccctgacacctacagatagtacattatctgttgaaccattttactccttgcacatggatagaatataaagttgctatttctttttatgattggcgcactcaagtgcgtaattgagacaaagagtctcaataccaagagatccaagctctgaaatttggtctcatcccaattcccaaacccctcaccactagactaaacctagtggcttagttactcaatattattattacctctctctcctttttcctttttctttttgatgggggaggggctttgtgcctctcatcattatcatcactcttacaatatgtctttagcattcacttatagattagttcccttagattctactaatttgagagaatgggaatggaaagtgcatcccaatatcacagtttactattctgattaccacctatatataggttgcaacagtggcttaaaagaaaaatacttgatgcaccatctgaagctgatggaggaccaacagcttccatcaggtgtcctcatggtgaacttatgcctgaacaagctgtgggagctaagagattgattattcctgagaatctgtggctgtttttttatgaagatgctagtgcagtaaaacctgatgataccttgggttgctcaacattttgtttggattcaagagaatgttcccagtgtactgatgaactgtcagaagtggcttgcattgaagattctttaaggttggttgacttttgtcattattgcagaggtgacacggaatgcaacatttcatgactattcaacttactgttttttgtagagtggtgaggttcaagcagcgccagaatcatgagaagttagctatggggaaaacctttcccctttttcttgattgcaagtattatttggtaccatcttcttggctttcaaaatggagaagctacatcaatgccagtggcaagaatgtatcatcatcagtgaagcctgggactttagatggcataattaatatgctaaagtgcgaaaaggtagcttccaactgtacctgttatggatgaagaattccttattaattgataaatggttgacataggaaacagaatgtagactaaataccacgattggtgaaattgccccgatttgattactttcccaacaatttgcctatgcaataccaaagaatacactcaacaccgagtatgaaaagaacagaagtagaacacttttttttgccaaaagtttcttgcctggaaatggcatttgtaattgatttgtgttgacttcctttgggactgcttaacttctcttctggtataggctttggtattgtgtttccatagggcgttcttatatagttttacttacacacacatgtatatatgtagatatataatgtaggggaatgtgaaattctatttgtgtagagattgctcttttcctctaggtcagaggtataaagtttctcatttatttatgtgtttacgtgttaagggatactttgtgctcgaggatgatttcttgcacttgtacttttctcctttcaaatacagttattcagttattataatgaatatctggcttaaatggttatgtgtttcatgagaatttgatgtcagtcaatgaaactttggaaagaatgctcttgctccaagacatttctgttaaaagttttcagtcaaagcttgtgaggaacactggttcatgtctgttatataaaattaactttaatataaaggggatgcctgttgtgacttattcttgtttcccccctcttctttctcttctctgcttaatagtaagttgaattttttccctttgaatccttattaaattgtctttactattctatacagcattcattactcatagaaaggccaccagatcttgtttggaaacgtgattcaatattccaaaagtcttatgctgtaagtacctgagaccaatatatctctataagcttgtgaaatcccatctttcttcagggtttttaataaagaagaaaaatcttagatggtagagtgagctggtgatattattattaccacaaaaactatatccgttactagaattttttttttttgacatgtgaaatttaattacatttgtttctaagcaagctactttctgcttcaaattactctttttgtatgcaataatcttgctattgctttgagttttgactaatgtccttttttaaagggacttcagacagatgggttaactgtgattactgaacatgactggaaatgcttttgcgaagaatggggtggcattgaagggaatggcatatcagcctggatcgaatgtagtaggggtgcagaaagtaatgtcaatggttcatgtgaagagatgccgagatctgaagcagagttgagctcctacaatgaaactaattatgaaactgagactatgcaactaaatattaagactactcctgaggtatcatgaaacaatgctttgtttacattacttcggcaactttgaatatgatattcttctcaggtattcttggtccatgtgtgaatttttttaggaactagtcgctcttggttttgaaaatttatggttgctagtgtttgcataatcttcctctttcatcttaatgataatttctccaaaatgtgtggcgtgtattacaaccagagggattgcttttgtgtaaaataaatagataacttgcacccattggtgtctacaaacctccttctctgatacacacatcgtgtgcagagtgcagattagttggtgaaaatcctgcttgcttgaacttaattttgcatcgtagctttgttatacgtatgaaagactttacgaaagcatctgtgtatgtatgtatgtatgtatatatattttaaatttatgctttctatctttaatcatatgtacattaacttgcgcattaaactatgatagatatgtgagcaatgcattggagaacgacaaagcttggagctgatgcagaaacttaattattgcaatgaggatgtatatgtttatttcgttcgtggcaaagaagctcccaagtcaattttacaagcatcggagattaattttgatccatatcgccgagtttcaaagcgctctaagaagacaaactctggaaatcaaatcagtttaaaagtttctggctctacaacagtgtaccagctaaaaatgatgatatgggaatcttttggggtaagttacatgccatttcaacatatatatatttatatatgcatttttaaaaaataaattgaaggtgcctttctatggttaatactacagatcattggtactacttattcaacaaattcgattggttgatacaagtttattttctgttacaataaattgacaaaataatagctggtccaatagttgcttcagccgctgcaatggttataataaaaatagaaaaaatatttccttttaattggcgatacaggcattattgttttgtagtgatcattgcttctttgatttatcgcaggtggtaaaagaaaaccagatacttcacaaaggttcacgaataattgataaagaatgtgctactcttgcagacatgagtatattccctggagataagctttgggtgattgattcagagattcatgagaatcgagatattgctggtaattattggctttgtacagtaaaatttagtataactggacaagttattttagttattacacaaatattatatgttttaaactgaaattcatggctggggctattaaatttctagcagtgttctgagtctcctttagatttagtctttggctctctttctgtgtgctgtagacatttgtgtgttttgaaatcttgtgtagtttgaaattatgatgttttacataaacttgataaacatgtctgttgtcttatttgattttggcttcccagatgagctttctgaccaaaaaatggatgtgcaacatactgaggggggttttcgtgggacacttttgactgccaattcttctcaagttgtttaagaaccatgctacggatctttgtgaatatccagagttctgtaaattctctattgaatatttgtacgtgaagctgcatttagggtgaccggtaattttgaggtatgttattttatttctacttatcttatgtgcaatatgtacacgacctttatctgttagaaattaaatttttataaggtttgaaccttgggtcactaacatgttacctcagcatgcagtgtttacttgagtccaaattcacatgaactcttcagtttgttaccatgtattttggctcttcaacgagtcttgtgcttgtgttgagatgaaatgcaaccgtttcatgttaactagtgatcgtattgttatgtatcttttgactgcgtgttcaattcctcaatggctgcagggttatttacctgtgtgtgcgtgcactcaggcataaatttcttctgcctcctgttttccccagtttgaaatctgaatcagtttgtcgtaagaagcggtagtgacagaaccggtttaatccggcttagaatgttatgagtactaccctgaaggtcacaataatgtgttactaggccaaactctttcttcttatctgagggggcagctgtggcatgagaagagaaatgggcatttgattggtgttttcttctaagagggtcttaaaactttattcagcgtgtcattttattgttgattttattagagatacttgtctcaatttttattttttatttttatctcccactcagtgagcgagcgagtgagcaatttgtagacaaactagaactgtcgtagcgtcgatagagatagagatgtacaacattgtatcatacacgtctgtttactctcttgtttattacatatctcttttaccttgacctgtgttcatcagataagttttgagattagaaaattgaaaaatatggtgacacccaaaggatgaagttcacatgttggacctcgtttattaaggtgatcaattaacatggttgttgttctgtttggttctaaattctaacacaaacaaatgaaaaatagtaaggcatattaatagcacaactagctctctgctatttcctgtcttttaatgtagttaattgttatacatgtcatttcatttgcaagtaaatgcgattttaaaagagtagaaatagattgtgttgttcaaaaataaaataaaaatatatattggccctaaatgaattggcacccccatggcatggatgagtcaagtgtgtcctttggttacttccttttatcacatccaacgtttatggcctcgtgaggtattggctcctctgaaccaccgatcccaagtcacctctgccggtcctcttgttctgttaacatttttgtgttaataaataataataataataataacaattaaaaaacagctattgttagaaaaaaaaaaattatgaagaaaacaaagacacgagtgttgaattttgttgcatttacttcagattttattatgtataccatatcaaatgtattgtactttcaagaatttcttttggaaagtgggcagtatacaagggagaaactatatttggagtaaatttttgctcggtttctatatagtaagtatctcactaggttttgatcaattttgaataatttcattactaaaaatgaaatttaaaataatcaaattgcatgcatataaaaataattagatatgagtgtaattaaacggagtgtttgaactttatttttgatatgataacttattattttttttttttatatataaaagaatagaatataagctataattaaattgtatatcgtcgtataaataaattaaatacagtttaaaaatagggagttaatagattaagctgatatacagtttcattataatattatttaagctgaaattatagttaatagaatagaaacttaaatagaaggtttcaatttactatatagtacataataattgtggtttttattctttatcatataatatatagtcaatgtttgtttaatgagaaagtaaaaataataacagtgatttagaatttctatcttacgtgggaagtagcggatctgggatcgtttccaggcttgaaatgagtctgtaacaaagagatgatatgcatataaatatacatatatttatgtatttatataattttaaataatcttaattactcactctgcgcatacaattgaggattcaccaactgtttccagttcatgtagttctttctgcatcaaaatcaatcttctatatatgttaatatttcacaatttttccaagcagaataattaaacccaaatatgtacatttattatgacctgaattatgttgatttgggtattgagttgagatatagctgcattcatcctatgcctccccaagaaagtgggatttggttttagctttgttgctgctttttccttccgatcttgatgaggataagatgaagaagaagattgagccacctctacctctacctctgcctctgctctttcatcttcttctctttctccttctcctccgcctctcaccgccggcgatgatgatgaattttgttgtacttgcttttcattatccattgctaccacaatcataatattataaattcacaacaaactcagggatctaattatttttttggtgatcaaaaatcaggattgtgatatttcatgatgtattacatatatatatatagataaataaagaagtgatttatattttatttttaaaaggagagagaaaagggtgggtgatggttgagatggtggacctagtttccccaacatgattaaaagcaccaaagaagactagacctcaacctatatttatatatcactattcttcactattgctatttagttatagggtgtccaacaaatggatcgggtcagccccacccagtattattttggcctgccccgattctcaccttagacattttattatttttttgagttttttacactacatattaatttttttttttattatggagtgatttttttttttcaaaagtactatatactttctatactgtgtactgtgttaagttgtcactgttgttccactgttgtttttaattattctattttgttgttttacgattattttataagaagacaatattttt

SEQ ID NO: 161400 - DNA, 2497 bp, Cannabis sativa
taagtttagagcaatttctttagaatttatgtgaaatagagcatttactgtatactatatttttgataaatttgtatattttctttattatttttaggaaaatactaagtttagagcatttattaattttaaagaaattttaaataaataaaaaaagtttagatgatatgatgtagcatgtttttaatttaattttttaaatattttaaaaattttctatttttattaaagtatcttatgtgagtgatctcctccattaataataataataataataataataattgtatataacatatttttacagcctttttcttttcttttaaagtaaaaaagatgttggtaaggattttttctgagttgtaattttttttttcttgcaataaagggaaatgctaaattagtatgatgaatttatgaatatataaaatataatgtaaataaaattataacacatggagaattgggaggtgttttgtattcatagaattgggataccattgccatttatatattgttttttcaacattatagaatattagtaaattgtcggttgatatgtatctatgatagagaatcttaattaaagtttaaaaattaattaaaattttggattcattttcctaattctactgaaaagacctttgttcaaaacatgcagataatatctgttttcaaaaaagaaaaactaggagaacttccttccttagtttaagaatatttaggattgggatggaattaataataatttgtagacaacatatataccatttctataatgtaatcaagataattaatatcattatccagaaaaaaaaaaaaaaaaaaacaataacatcatcttctatatatgtatttaaaatttggataccagttggtctcttattagcacataggttgagaaataaaaattacttaatttacttgagaaaaaatcttatgagtatgattttgtttatggctcttatatttcataatgttaatgcatctaattacggtatgataagtaattaaaataatatgccttatatatatctagaaatattacctcatactcctgttaaatatatttacgcatagacaaattatcagactaacaattatttactgataagaatataaaaactatttaattaatttgttttttgttaattgaatccaatctaaaaggtaattatcattcaactagctagtcgtgtttctaagaattcaataatgtcacattttttgtttcgacaattcataatatatatttttcgaacaaacacatttatttatgaggatatctatagactataataataagaaatatgtaatatatgatattctacgacgctttatttatatcataaataaataaaaattgtattcgaattcattaaacaaagatcaacaagcatataattatagaataggttctctagagcctagactctaattaatttatacataatagtgttaagggacgtatcccattatgtaaaaaaagtcttagaaccagttacaaagtcaaaaaaatttattttgtggggcttttgttataaatatttgtggggatttgtatcgttttatttttgttgtaactatcatcaaaaaattaaaaaaaaaattaatacatatttttttgtctatgagcaccccataccttcataagtaagttcgtctctgtttggaacattatatactattattggtgtaaatatcaaatctcgcatactttaatttagctaaaattaaatataaaacatattaaggaacatattccatcatgtacaaagaaaaaaaaaatgctaacacttaagacgttatatactgttagtataattaaatattaaatctcatatattttaatttaaataaaattaaatataaaatttattatgaaacaaaagagcatagtatcttaatatataaaaagaaaaatgataacaacataccaaatctcgcatactttaatttaaataaattatatataaaatatattataaaacgtagtatcatgatatgtgaaaaaaaaaaatactaacaacgctctaaaacattaaatactattattaatgtaaatacgaaaacttgcctactttgatttaaataaaacaaaatataaaatatattatgaaacacagtattctattatgtaaaaagaaaaatattaacaacatcttaaaatattacataatattattaatgtaaatattaattaattctcgcatactttaattcaaataaaattaaatataaaatatattatgaaacgctgtatcctaatatgtaaagaaaaatactaatgacatcctagaacattacatactattattaatgtaaataccaaatctcgcatactttaattcaaataaaattaaatagaaaatagaatgtagtcgtagtatcctaattagggatgcacacgggacggggaattagcggggagtgctccccccgtccccatccccgcttattccccatcggggatggggcagggacggggcggggaatc

SEQ ID NO: 161401 - DNA, 24017 bp, Cannabis sativa
  modified_base (23480)..(23489): a, c, t, g, unknown or other
tgatttcagtgttctatctaaaaccattactcatttggatgtgagcaggagaaagagcttcttgaaaggcataatgcatggcttaatgatgagttgacgtccaaagtagacaatcttattgagttgcggagaaagcatgctgatcttgaggcagatctatcttcaaagcttgcagatgtaagttttccttttacattattttctaatgttttgtttggctagtaaaatatttgtatatctgtgcatgataggtaatgtgtgggtccttactatctttatggtttagaatcctaacttccttatattttcaggctgagagacaacttgaagagtgttctacctctctaaattggaataaggaaagggcaagagagcttgaaacaaagctaaaatcattggaggaggtaaaatattgagaaacgaaattcggttgcatctcattccttattagttgggtattttatattttaaattctaatcatgtgtaggaattatgctcaactaaagatgttgcttcagcaaacgaggaacaactatctgctgaactctcaacagtaagtgctgctaaaagtgtgcatattgagatatcataggccaacaagttttgcttacaatacttatattagtttatacacgagtcgttgtcagtataaatttaataagcatacattttgtctcattgatcttctttacttgatttgttttactacttttatgctttaatttggtaaagaaaaattgtagtgtgtgtgtatgttggcatttattatgctttgtgtgtgattcatttaccttcgccaactttttaggttaataagcttgtagagctgtataaagaaagttccgaggaatggtctaaaaaggctggagatcttcagggtgttataaaagctttggaggtgattgttttttgggtctatctacaattttattcaaaattgaatattcatcgagtatttttttttcaattaattcatgatgatatgatcctttattttgagcagacacatcttgatcaagttcaaaacgattacaaagaaagactagaaaaggaagtatctgcaagacaacaatttgaaaaggtagctacaattgtcctattacctcaagatacgtgcatcaaatcaataattcacttgaatatcttcctgtgaatgattttagttgatatctattgaagaaaatttcgtgtacacattaaactagttatcccatgcttatgtattgtgcttcatctggcattttatatggacaggaagttgcagatttgaaactgaaacttgaaaagtgtgaagctgaaattgaaagaagtaggaaagaaaatgagttgaagcttcttcctctcagtaattttactactgaatcgtacgttcaacttaactgtttatgagcattttctaattttttgctattcacttttattttgttttgttctgtgattccctttttctccttgaatgagtttctgatgttaatcaatgtttatgttaatttctaatgatgcttttatctttttttctataatatattttagaattataaagaagtatgtttttctctaacaaaaggataacgctaatgttctatatttataaaaattgacgaaaagggaagtttgaaaatatgccaataaagatatcaacaatttcaaagagtttatcaacaatatgaccagtgcttcattacatatcaactataagtagctatatttgtgtgttttcttgtaatactgactcttgcatttagcatttgtagatatcgtggtctcttaaactcattttttttcaaaaaagcacagcttatatattcataacaaaagccactataggcgtgaccttggtggtgtgtgggggttggggtaagtggagaggtctcacctgggacgcccatgtaaggaggctcttagtctcatagagataggaaatataaaaaaagtggttgcatttgaataatttaacctatttataaaacctaatggtagtgaaataatttgtaggtttctttaatatttatttttcaagggcttcttaatttttgaacaattttggattgcccgtctcttttgggagaatgtgtggagggtcacttttttttttttgaattatcttttcctgcattattccatctttctactgataatgacctgcctataattttctgaagaagagtcttcatttttacaatacatgttagcatgcctatggtgtaacatgaactggttttatctggcaggtggattaattcagctgacacgaatgacacggttgagaatgaccgaatgcttgttcctaggatcccagctggtgtttcaggaactgcattagctgcttcacttctgcgtgatggttggagtgtaagctactagtttacttatattgtttgtttcattttttcaatcattgtgatttagcacggaaatggatttattattgctatatccttattttctattctggtacgctaaatagctggcaaaaatgtattcaaagtaccaagaagctgttgatgctctgcgacatgagcagatgggaagaaaggaatctgaggcagtactgcaacgggtatggtgtccactgcttctttaaataaagaggatattgtttgattgtttttatttcaatatattttagtgtcttgtgctcttatgtctgtaaaatattgcacagataaggtaaattgcactttcttttcttgaactatgacaccttaaatgtgttactccctatgttttttctttggcttactttgatttgccaatttttttgttttcttggtatgaaattccttcttttctaattgacagaatcaaaatggttttaacatgtcaaagtatgtagtaaagttgagaaatattagaactggctagtattgattttttttttttaaaggaaaaacgcctttccgaaaaattgcatgcttttacaggggatctgtgaaaagcaccataattctgtcatgtgaattttacctcaagaattatttgtttcctgcaatattatctgaatttttgtttcatctgtattggtcctctgattaattgtggcagctatggagaactattgctcttggcggttatttgttctggtgttaatgtttcttgttgtataaagtttgtgaaattaactttttcttttgtagatcctgtatgaacttgaggagaaagctgagctaattttggatgaaaggggtataagttcttactttctttttcatgagaaacaatatgatcctagtttcgaaaaaaaaaggaaaaaaagggaaacaaaatttattacattagaaacagaaggattacaaaggagggtatctttaactacaattgaagatgatgtggggtcatcttaaattacgaactaccaaacaatctataagtaaattggaataagaattctgttaaaatccttagtctaaagcatctaaacggcgacccaaaatttattttttctttcaataatgatactgtctttttcctagtgagttttcaagtgtcagaaactaggtctggtcacatggatgtacactacgtttgtaaataatctaagcataaaaaggcatagattaaggcacattatatatttggtaaacataaataagaacaaagatgttcaagtggttcaaagaggaaagaagtgggaagggtttaaaagtgtggaagttaaccggttactatttacttactaaagcgagtgcataatcacagcttattcataatgcagtgctgttacataacattttttttatttgtcacaataccaatattatgcttgtggcatagattaatggtaatgattttttttttttgaatttaaaccattttagaataatttcactggaaaagaaaaattaatatgctaattgtagtagttcataagatagttgggtatgcttactacaaatgcaaaattaaccacaatatctaattgagaataaatacttcaaaaatctaaacatagtaatttaactttagaaaaagataataaaatacaacaaatcataagataaggctaaatgatttcggtcataagataaggagcaattaggacaagaataaatagctaggggaaaaagagaaaccctctatgtaaaattccagagataatgaaaaaggaggtgaaggggatacttgatccctactgcactgtataactgggattttgcatttgtatccacgttggttttgaaaatattggcaacactatttcaataattttataagcatctttggcatttatgcagcggaacatgagagaatggctgaggcatactctatgatcaatcagaagctgcaaatgtcaacttctgaacaggcaaacttggagaaaatgatccaggagttgaaggttttagtcatgtttatctcacacagttttattactatgcttgttgggatttgatctctaacttcttaccttgtccatttgtttttaggctgatctaaggaggcatgaacgtgactataatcttgctcaaaaggagattattgacctccaaaaacaggtaaaagaagagatatcagagtgattatttacataattaacttgatttgttcgtataaaaactgtttgatttgtctctacctttttcttctttctgttttgtgaagggattgatagatattattttttttttatttagtctaaaagcttgcattaatcctattgtaacctagtttggtctagtcttcttgtgtgtgtgtggagggttgttaagtgtcccttgtgtgattgatcaagggaacaccaatgtgagatttaattgcaatgatcatcaacatcctagactcaatgagcagtgtatagctcggattgtaatgatttatggtaatcaataaagatctattgtaacctagttcgggtcacttttcatagttctactggaaagtggattgttttgttattcaaaatttttttgttatttgggagtcataaacaaggctccctaataaatttgggaggtcagtctatgacaagtgacctctggctttttccaaaaactaaaaatatatatattgttatttatttattatttatgtaatttcatttttctttcaaaacatgccttctgttaattgacagtatagtgatgggatgttcattgtgtatcctatgttttttttccaactactaataatcagtacactactaagcatgagaggattggaaccatggctgataattaacaaatattttaaacttcaatattatattgggttttttattgatgccatattttagaagagtttgaacatgactttgattatatacatgataaagaaagttgcaaaaagggaagagatgcaaggatggaaaagaaaaaatgttgtggggcaaaatgatgaaattaaagctatcattttcttacagtaaatgatttaaacaaccccctttcttacttacactaaatgcctcttcttcagaattagaagaagggatccgcatgcctatttggtagctaagcagcttggtactgcactcttgtaattttttgtgtggcaaaagttgtacattttgaacatgctaaaatttagaatttgatgttatcaatccaaaatcgacacccaaggttaatacgtgcaaactagaatatgatcaattttttgtccgcaatgtaggtttacctagggttgttttagatggacaattgagattggatttgatgtcttcctttgggagactagccttttgataattccttatttttctggctgtgaatgttataggttacagttcttcttaaggaatgccaggatatacaaattcgttgtggatcttctggtcaagataacgacacttctattgttccgtttgggatgattatagattcaaatgctgaaaatgtcatctctgaacgtcttgtaagcttgattatttgatattttgcatgattatatgatatttagagtatttgtattcctcaggattcagatttgttttttccactatataaataagtgacattaactaggatcaatattggatgtcacattaacagttgaccttcaaggacataaatggactggttgagcaaaatgttcagctcaggagtgttgttcgcagtctttctgaacaaattgaaaataaggagatggaattcaaggttggcataatgactttacgttttacataaacagtttgtttggcatttgccttttttttttaatggagtctttggcttatgcttggatatgcaaacttgttcttaacatcatactttggcatttaggaaaaacttgaaatggaactcaagaaacatactgatgaagctgcaactagagttgtggcagtactacagagagctgaagaacaaggacagatgattgaatctcttcacacatctgtgagaattagttttgacagatgctagaatgtgttttaacttgttgctataattagcaactttcttgtcaagctgttattaaagttttttgctttgtaagcacaggtttcaatgtacaaaaggttatatgaagaggaacacaaactccattcggctcttcctcttcctgtagaggctgcttcaggtctctatcgattttccgatcttactttgaggtttctgttgagaattgctgtatagaatatagatgtaactttatcttgaaaagattgttttcttcttgagatttctgccttagatagaccaatcctgtttattcattattgtttatttattttctatttttaattttgtctatatacatattttgcagaagacagaagacccaacttcaagttgcttcttgaaggttctcaggtatgaggaaatttttgcaagtttttggtttctttagctagtctttcctgctttgcactaataacttatcctttaaactatacaataatataggaaacaacaagaaaggcccaagaacaggctgcggaacgagtgaaacgtcttgaagaggagctggaaaagtctaggtaaggtttaatagaatgtagatgtttttatcttgtgatttgcattctccagttcttgttagttgttaaaggggtttcattccccccttatatttatatctttgtcatagaatataaagaagatgttaaggagaagggagttggtcttcatgggattacaaacaagtcttatgtgtgatctgaccctatttaggaatatagtttccctcctgctctttatttaggttcctaacttgccatctagctcttttagatttttatttttttttccttaaataaaacactgatttggattgagattaattgttttatttcttttattttatctttgaggcttggccttagatgtgcttgtgtgtgctgtatatgcttatttgtttataaatcttttcttttgatctgaaagagggtgaatccaagtatgctaattccgattagggtcagtatgttttctcttatttgtttataaatcttttcttttaatcaaaacaaaccatttttttaatccctattaatgcatgtttactctattcattctatttactgttgtatttttaaatattatattctctttattcattattacacctcttctctttattcatgattctgtattgtaaggattgagattgcatccatacgctcagagcgtgaaaagtttgctttggaagcgagtttttcaagcgagagactagaccgattcatgaaagaatttgagcatcaggtgactataaattagaatctctctctctttctctctctcactctatctatatctgtatatgtatgcatacatctgtatttcgctatcttgctgttatctgtctttagtgttcaaggatttctttatacagtttatagacgaagaatgtggaacttggccctaatatttgtctaaactgatttttgttttgcaacttattatgtcagagagctgaaagtaatggcattctagcaaggaatgtggaattttcacagttgataattgactatcaacgaaagttgcgtgaaaattctgaatctgtgaatgctgcgtcagagctgtcgaggaagttgaacatggaggtgattggttttagactaatgtttgtagattgatgttattcagaagtactcacattatattttgtcttacccaacaggtttctgttctaaagcatgaaaaggaaatgttagttaatgcagagaagagggctttagatgaagttcgtagtttgtcagagagggttcatcgcctgcaggttgtattttccacaaatactatgttctcttttttaaatgatatgttgtccttaaaattattcttttgcaggctagtttggatactattcaatgtgcagagcaagttcgagaggtagtttagttatgaactgattatttattatttattttttatgtgtaagcagcaaatttgttttttgatatgacttatgttttgcttctgactacaggaggcaagagctgcagagaggaaaagacaagaagagtatacaaaacaaattcaggtttaacttttcttcgtgatattttcagtaaaatttattgatttagatgggtgaatcttatgtgattattaatatttttgaatgttgtgtctatattggaatttggttaattaattagctcacttaatccttagagtatttataatgactatgaatgtgtatctttgcagagagaatgggctgaggcgaggaaagagctacaagaagaacgggataatgttcgagctttaacccaagaacgtgaacagaccataaaaagtgccatgagacaagttgaggaaatggcaaaggacctaagtaatgccttgcatgctgctgcagctgctgagactagagcgaccttagcagaggttttctttttatcaatttgtccttatatatgtggcagagacatgccaaatgttatatgcatgtaggattgtatatggccatgttttacccacccctgtaactttcgaggcatggcaagctgacctgctccttgggtttatgggttgggttgactagaccctttttacttttgtgatttttttttaataaaaatgttctagtcagattgtgatgttttaaaactaagattctctagtttaatacaagtaatcttaagattttcataagcaaaaaaaattttctagtcacattttcctcacatgttgccccaaataatttgggtgcaagcttgattcagcagagtggttccctgcagatctctgctcactagtttgcatgtgcatatatgtgtgtatataggatatgcactcatatgctgacttgtatagctgtattcgaaagaatctactcttaatttaacttatgatttgttcattcaggtgaaattgtctgatctggagaaaaaaattaaatcttcagatgttaaggtatgtttctaatgaaattttgagaatggtgtgtttattatgggtactgagaatgggaatgggaatagaggtatcattatccttgtttacttgcctaaactcagccctttttgtttatgtccaagtagatgtaataccattagctcttgtaattgatgtataagaaattgtgtttcatattataataactgtcgtcctctaccgctctgttatggtaggatcttgatattgatggtgcaaatggatcttcctccatttttgggagtgaggtatgtgcttgtttatgtttatttattttttttctatatgattgaatcttagtccaatgagcatactactatcatctgctgccattattttcttcaaagagagataactatttactaagaaaacttgtgagagataataaatatttcgacagttggccttttattttgttctatttaagcatgaatctaggtgcatagagaggaaagtatactgaaaaatagttgttagcctcttatatgcatctatctctggttctcttctgaacagctgtactttatttttgaagatatgggaagataactccttagcttatcccagtaaaaattaaaaaagcaaaatagaaactctaagttcataaatgtgcctttgctgtgttgaattaatatggtctgccattcgtttgattgtataaactatgaatttgttgtgttaaaattagaaggtttgctattcatttggttaaacttgccacagaccattacggatttgcgggcagcaaaggaggagattgaaaaattgaaagaggaagcacatgttaccaaggatcatatgctgcaggttcctattcgctactctttgaaattctcattcattaaaggcaacttaaccaataatattatttcattttgattggcagtataagagtatagctcaagtgaatgaagatgcacttaaacagatggaatgtgcccatgaaaactttaaagttgaggtagctacgtggttgcttctctttctctcgcttaattagattgtttttgtttttgtgggatgattataaaattttgccatgattaatctgtcattggaaatattttgacaggctgaaaaactaaagagatcactggaagctgaactactttctcttagagagaaagtttccgaacttgaaaatgaatgtagcttgaagtctgaagaagtggcttctgcagctgcagggaaggaggaagatctttcttctgcttcagcagaaatcagaagtctaaaagaggaaaattcagctaaagcgtaagttttttcatgatgcttatgttctaaaattgaaaatcttattcggtcggtgtgtcatatgttgtcttcatttccaggtcacaaattatgactatggagatccaaatttctgctttgaaagaagatttggataaagaacaccagcgatggcgtgcatgtcaggataattatcaaagacaggtcagctttattctagtccatcttgttggataggttgattttctgagagacaccatgtttgtgtacttgctccccaaccttgaataaaaatgatttttctttatgttaaatattttcaggttatcctccagtcagaaactatacaagaattgaataaaacttcacaggctttgggtttgctgcaagaggaagcatctgagatgcgtagattggttgatgcacagaaaagtgaaaatgtaatttgtgctcacatgaaactctttccttctaatttattttatttattattatttttttttttttttgtgaacagtggggattagaatcccttcctcttcccacaatcactcacacaaccaaccacttgtgctagcctattttatttaaaaaatttccttaaatttttcaggtttcaattattttagatagcaggtgattgctgaattcaaattctagattcgtgttggttcaacataagagagatccttatattgttaagcagcttcgttttattttttcttttcaagttataaagtgactttgttggtttggagtttataactgagaaatgcttgatatgtgatttggcttagaattagaattgatagtttcctattttgtttaacttccagagatcttgtttcccgttaatattgaatccttgagctttttagttttgttcagttatttttgcctttttctatattgagtggtttttgtgttggtatgaagatagttgataattagatcttcttagtggtcttatagacattataggatatggtggagccgccaaaggtgtggtaaggagattaaatccttaagcttcttggttttgttcagttatttttgcctttcctatattagatggttcttgtgttgaaacgggggtagctgaatgttaggttttcttagtggccttatggacagtatgtgataggtggagccaccaaaggtgggttaaggtgatgccgaaggggtgtgaataccttagacaagggaaacactttaaggtgggaagactctgcagaacgagaacattgagagtgaatattgggtacttgggacgagagatgaggaggagattatgggattactgcttgtaatattcttgttgttgtattggatctatttttcattactactatatgtagtatgtatgtgtattgtggattagttgcatggactgacattattttgacaaaatgagtgcaaaagttctattgtcagtttatatcttagtattaaaatccaaatatttttaattccaaagaagatcagaaaaggaaacatcttcaaaatcttagtatcaaacatccattagagccacacaacacttggctctatctaatgagtattctatctctattccatatctttaaaacctccattaatcctttgcagccacagtaaccaccatattgtgtacattctacaccttccaccatgaattttgtgtttatttattttttattttctacagtttgtctcctgcttcagcagactgaatgaacaccattcacaagaaattattttttgaatcttgtgtgtgctttgttgttgattttccacctggtttttgttcttcttagaatgacctaaagtcaaagtgggaagctgagaaggcagcagctctggagttgaagaatgattttgaaaagaagtacaatgaactcaatgaacaggtatttgttatatgctttaacatgtggtatgttagagtggtgtttataagtttgtggtatggctttaccaattaatttcattataagcagtagtcagtaatagaaatacatatcacagaaacaaacagggttgtctcagacgatggacaatcacttagtgtataaaacatctttttatttaatttttatagttttgggatgtgggggtaaatattatagttgttccgaacattttgtgatattgcttacatttatcactcttatggtagttcaagtttgatttgatttggtaaatctctgccttttatagcttatcataatgtgttttcatacaatgttttcacatgctctctgaaatactttttttttttttttgaaaataaaacttaccaagagatttgtggtttctcgttaggttcctttcacgtcagaacttttttgaatttacttattcttgcatgtgttttttatttaatgaacttcagcttttttattagcctatttttaatgtttgttcaaacatttttagaacaaaatactgcatagtagacttgaggctttacacattcaatcagccgagaaagatcgttcttcatctggattgtctagtggaactgctggtccagatgctctcagtgatgctgatttacaaaaagtcgtacattatctgcgaagaaccaaagaaattgtatgttctatatctaaacttcgtaggttttcgatgcagatgtatattttaaatccacacctgatttcctttttgctgtcaacaggcagagactgagatttctttgttaaagcaagaaaaattgcgacttcaatcacaagtgagtttaaagtttacatgtttgtttatcattcttcttcttcttttttttttttttttaagaaaattgtttgttatgagatctctgccaatcttcaacaattattttacctaattcaactttcttttgatctgtccaaatacatatatatatttatatatagggtgttctacaaaagggtgtgtcaatatacccctttatgttttttgcatccgaatagttctaactctagttttttaatgtggcaatgcatatggtagttattttattttaaacatccaacaaattttcgaaaacttctgaataatttatcgtacagattatagggtttaaactatttatttcacacgcatataaaataaaataggcacaagtcacaatatgtgtgacaaactgtttgaacctaattttcggtactataaattattttgaatttcttaaaaatttgtcagatgttctaaatatctatgatataaattataactacatcgatacatgataacatccatttttggggtgcattctagaattttcctatacataaatatatttaatattttctttatcttcactacttggtggacaattcctttttttggtaaacttttttttttttttttttataaattgtgtcagaaagaattgcaccattattcacagtagaagattagtagtttttggtataaatcttagagaagatttaccatagatgctgccaagtattttggatttggagttaaaacaacaatcttagggaaagtgcattagtagcttcagtgcagttgaatagtatagtaaagatttctgggattatgtatgactggatctttaatgattattttttcccttctatcaattgtcaagtatatctctctctaaggctaataaattaggttttcaagcttcaccattgctcagaccttacacaatttacatcttctggtttattttttattttgaaaagaaatggtaacaacaaagttctgttcccttacttgtgttggccaatttattctcctttcaatcttattctgcaatgcctctatcttctgaatgtcaaacattatatgatagtcagtttctttttgtgtgacattggatcactttgtgattctttatcaattgtttttcagcttgagagtgcattgacggctgcagaaacagcccaatcatcacttcattctgaacgtgcaagttcaagaacattattattttcggaggaggaaattaaatcattacaactacaggtcattcttattaaatgtttttattctcttatgtttgttcttgctttattttttattttaatgaataaatgttgaaactttgggttaaatctcccttcccacctctcctttctctctttcaaaaaaaatctcccttcccacctccagtaccaaatatatgttaatatgaaaagtttttgaataagaaagataatgaatattttccctgccctatttataatccaattcctaaatgaactataggtgcaccttccttgttagcttttaagaactttccctattttattattatattaaaattaaaattatactttatatttgaaaattaaaattgaaaatttataatttatatttttgcttatttgacgatgttgtgtgcgtactgttttggctttaggttatatatataggaaaattgtttggtgagagcatcaattttggtcctacaggggaatttcttgtttttggtagataagagaaattataaaccattttttttatattatgatgtgcatgatagttatactaggcatcttatctgtttttagaaacttttgaataatttatagtgtagaaaatagggttcaaacattcagttgaatgcgtgcaatagactattttaaactatatttcagcagacaagatatctattataactataatatacaacatcaattaaaaaaaattgggatataatttctttaagtacgaaaaataagaaacgctgctacggtaggagcaaaattgatgctcccacctaagaagcttcctttatttatatatatatatatttatataaatgtatagtgagcttcttaggtatttttttatttccagtacctagagaaattatatcctaattatttttaaccacaatttatattttatagtaatagtagatatcttcccagtttttgagaaatcctgaataatttactgtatcaaaaataaatttcaaaatagtcactatttgaagcaagtacgcgtgctactcactattcaagtcctattttcggcactgtaatttattaacaattttttgagagtaggcaacatttctgctataagtataatatacatcgtcatataaaaaaaagttaaagacataatttctctatataccaaaacggaaaatgtccctacaattcgaaggaagattattttattgcctaatccgtagttttcccattcgataataatagattaaattctttacaggtgagagaaatgaacttgcttcgtgaaagcaatgtgcaactcagagaagaaaacaagcataattttgaggagtgccaggtagcactctgtcttttacgttccatttccaatttggaagcttacatcaatcaatgaccattttaattttaattaaaaattattgttccttattagaaattgcgtgaagtggctcaaaaagctaatgtcgagattgagaacatggaaaaactcttaaaggagagtcagattcaggtggaagcctgtaataaagaaatactcatccagaagttagagaaggaacaactggaaaagagggtggcggaggtatggagctttatctctgttaatcacttcagcagtcacagttacaaggcttttcctgaaaaatatatatggattttcctgataaaagttgttcctttgtgttgtttatgacattgtttatctcatatagtgtgtgcgtataaaaccagacggtctgtcaatcgactcatatcatatgccctataaaaccttttgtattattgattacaaagtgaaagttgtgaactagagttaattgatgaaagaagcttctttttttccgtctgtaacttaggatattatatctataagacctatctagatggtaaattagtgatctggtaattggtagccaagtcctatcagagtatgtgccgccctgcctcatcatgtaccatttacgtactcccatgcatgcacattatatataaatatgtcattcaatattctaaccttgctcttttctgaagttactcgaaaggtgtaaaaacattgacgtggaagagtatgatcgtttaaaagacgaagttcagcagatgcaggtgggtaattagagatgttataaagtattgcttaaggaaaccctaataagttcattatgttaaatgcattaaggtggttatcaaaattttatctgttcaaccatttaaaaaagaacagttgaaagaataaaattggccctatattgattcttaacctcctaatatggtggttacatgttaatgttaatgtaagaggaaaggattcagcccttctaccttttctgttctttgctagactagaggtttcataatgatattaattgttgattttatttatttatcaatttttgaaaaggagacaaaggtcataacttgacctcctcccaaatttattagggagcctcacatttatggcggaggaaaactgtggtaacaatattggaaagtaaaagagaaagcttaagacagaagaaatagtttggaacattcatatagtaaagtaataaaacattaaaacaatgagctgtttaaaccatagacccacgaacagaagaacgactattatttttatcttttatttttttaagtttttgttactattcttctattaatatgcatgtcctctatttaacaggtaactgatttttttccttgcttttgttttcttgtttcaggaaaaattgaaagagaaggattctcaattagaggaaaacaaaaggcttctttctgaaaaacagggagctgtgtcactgttggaacaagacctctgtaattgcagatcagaactatctgaaagggagaaaaggataaatgatagtttacaggctgaggtattccagaatagttattattttttcctactgaaatggttttttttttgtcttttccattcaaaaaagaaaaagaaaagaagatttggtctattgatttattgcatcctagagttgttctcaattatatgttttacatgcacaggcaagtctgaaatcagaagtggaaaagcagaggaagatgatttctcagctaaaggttgttaaagatatcctaatgtcaaaatcttcattcttcacctattatttaagagcattgttatggggcactgcaatttactatcgggtctcacattttatatcattatgttacatcaataggtgtctggcaccatggtgcatagaaattctcaatatttaattatttattttctaaatttggaaccagacaatgacatatttagtcacctccctaccctgaaagcttgatttaatgacatttcttttctctctacagaggagacttgagattctgtcaaaggagaaggaggaactgagcaaagagaatcaagctattactaggcaattggaggagcttaaacaaggtatcagaattcagagctgtctactatctgagatgctacagtatagtacctcattcgagcttttacttaaatatataaatatgaattacagcaaaaaaatctggaggggatacatctggtgatcaggccatgaaggaggagaaagacactagaattcaggttcgtgcaactatcgttttgctgttactatcttttttccccttaatttaattctcttcttacatttctgtcgcttatgctgtttgcatagattctggaaaagcacctagagaggcagagagaggaattgaaagcagaaaaagcaaggcgactgaaaaatgagaaggcagtgatggattcttataaaaacatcgagcaggttctttgcggtctctgattgcaattaatcaaatgttaattcctgataagatggtttagtttgtcagtaatgttgtagtatctaatcctcattaatattgttgtgttgataacttgttagttgtttttttattattaattattcgtaaatttaaacattaagattatcatttgctgtatggcttatttattttgagactggtttctgatgtgttgcatctaaaaggtgtttttatcataagatagtatccacactgggattgggttcacgtacatttttgtatatctataaatagtttttgaactgtcacaattaatcatttaggtaagttgtgttgtcatatacgatattttccatactgtaagaactagtttctggtctttcacaaataatcattttggtctcgttaccgactttaagacgtacaaaatctgtgtttatgtcattctatgtgagtgatttcttttacggagaacatgcttatctggacatctgcttatgatacctttaattctctcatcaggagaaagcaaagtttcttgatgaacttgagaagcacaagcagtattcgaagcgtctctcagatgaactggacaagtataagcatggaaaagaaagtctcccagaggtaataacaacatcttcaatttgatttgtggcctctttagttgtcagttttgttttgttgggagttgggttttgcttcaaattttgtatctgctttaaaatgagatttggattagcttttgtagtgaccagatctttggtagttttggtcgataagacttgggggtactttctccacaccgtgaatagaaaactaatgacaagatatgctaacattaaatgtcgacaagtcctatttcgtttttaatatctaacatattgggttctaaaactcagggcacatcactggctcagcaacttcctggatctgatttggaagaacgtagtagtgcctatgtgtcagccgtagaaaattacgaaaaagcatcacgttcagtttccagtgagcgtggagctcatgccgtcccttcagaaactgcagttgctgattctactgcagtggctacaactggtctttcttcttcactgatcctttccaatgattctgttttcattattataacgttgttacatgtcttcattttctttttagtgattagttacataaaaccttttcaagggtcatgtatcactactcatatctccactgttgcagcttctgcaggtctgggaacgagtttaccagccaaatcaactgaagaaagtgaaagaagatctactgcacttaaatctgttgaatctcgtaaaatgggccggaaattggttaggccacgccttctcaaaccagaagaaccccaaggtgatactgagatgtccgagacagaagtagctaataaacctgtaacatccacagaaacagaaactcaaggcaatagttcttctgtacctgtgatacaaactaaccttcgaaaacgtctgtcttcatcttctgattttggttctcgtgaagaatcaactacccaaggggaaagtggctctgatgtggctgtacatttactgaagaagccaaaagggtcagaacctctacaagagagagccgaagggcaggtttctgctgttttggaaagtcttgaaacacttccagccatcgaggaggtctctgatgttggggatttgcctcaagctgcaaatgaggaagccattactgatcttgagaaagaagaggaagttgcaggggagaaggttgatgagccaaaagaaccacagataggagagacaaaccaagttgattctcaaattgacaacagtatcttggaagagaatttagatggggcagcagggaaagagatggtgtctgatgatggagcccttgataatgctgatcttgagaaccaatcatctatgatggaaattggaggtgacagagaagagggtgagctgttgcctgatgctgcagagctagagggttctggtgatgcagtggggagtgctgaattagtggaagcccaggctcaacctgagcctgctgcaacgccagtcgcttcacctgctagggttgatgatgagattcaagatgctagtgagcttacttctcaagacattccgagtgatgagaagaatgaggaagccgatgtacctgaagaaactgctgaagtttctgataaatcaaatgatggtaccgaccaagcaccagtggagggggatcaggttgcagaagctgcttcagttgtctccgaaagtactgtaacagtacctacttcagaagcttctgtttcaaaacaggaaagtcccagtgttgctacagaatctgaagaggtaaaacaggtttcgccgttgagtggtggatccactaccataaatttgtcagaacgagccaggcagagagctatgctaagacaagctggagctggagtagtttctccttcacccagcagaggccgtggtagaggcgtgccacggggtcgaggggtacgtggtagacgaggacgtggacccacacctagtgaacaaccttgaaattttaaaggttattgtcagctgcactagcacttctgtttcttcatagctctatttcagtggtcattttatgaattttgtaagcagtttgtgatgaaggattttggctaagctttcagactttttatagaagttatagtaaatatccctaaatgagtattagaaagataatgtcctcaagtcgtaaattagagaaaaatggctcctttcttttctggcttattttttattacttatatttatttttcaatttctaaaatacacatgacatcattattgaaatgtcttttatactctactccatataaatcaaatgatataattgattagatataaaaacataaatatatatagaaaaattaattactgtgtaaaattattctctaaattcctgcaacaagaatcaattaataaaatctgattaatatagagtatgaaaagttaaaagaactaaatccaagagttagtaatcatgaaatttaaaagaaaaataagatattggaaacagtgagaatataatacgatatcgggataagttgatgaatgctttttttttttttttttatctattaattaaaaatgctttcatattatatttcattaaaatgtatccatttttgtgagtggattgttaaatatacatttacaacctgtttaagtttaacacataatttacattaactaaagaggtataatatagacatcatttatatggaaataaaagtaaaaattaaaaaatgtaaaataaagtaattatacaatgtaatttcgagcaagagttccaatcaaagaactctcaatctcatgttttttttttctctcaagaatactaaaacccgagattatacttttataaagtcgaatagctcattacagttgttcatggattcccaactctctttctttgtaatctctctccctctcaatcttgcttgcgaaactcactttctaatcaaagtgttaatcctaatagcggagtcgaacatgtgcttttaggcactctaagaccaactaatttaggaaggtagatggataagtaggttaattagataagtctaactatagtaacgaattggtggataggaggaattaacacaacaaatttcacattagtttcttctagccacaatttgacagttgctccacatgatcggatgatgatgatgatgttccatggcaaggcaatacttagtgaccattcttaagcaagttcaagcatttactcttttcatggtaaactagattcatagatgaattgaagactggctctttgaaagtattcttgcttttcctcttagcatttctactcttgaagtaaccaaatgtgttccttgcctcagttacaaccataaactctgcttctgtggtagataaggacaccactgactgtagctgtaatttccaacaatgcagtttccatttgttgtgaatgcatagcaagtagttgatcttctagtgcctttgttggcagcatagtctgcatctacaaacccttcaagcacaactttttcatccatctttttgtatctgagacctatatcagttgggcctctcaagtacctcaacttccatttcattaagttcatcccagtggtccaagtccaaaatttgccatgaacctactcaaaaaacttaaagcatgtgctatgccaggtgcttaccatgatgtacattacatttattcaacttcatcttgtaacttttggactctaatactttgaaagaacaaactgacctcctaatggtagagatactctttgaattttgcatgttgttcttctaaatcactagagctatgtagttggtttgctcgagacatgttgcaccatcttgctgtcttcttaacacttctataccaagaattttttgaacaagtccaagctttttaataccttttatcacagtcttgtccttgcccattatgagcatatcatctatatacaataacagaaaaactgaagtaagattgctttaagttcttgtaatagttattgtttgctggtttccacctaaaaaccaagtggctgctacatgtagatgtcttcctcaacaaaccattagaaaagcagttttgtcatttttgaccccatattgtagggtagatctccctccaagccgtacatttcctcaagctgctctaattcaagtgtgcactaatagaaaacatgagtctgagagttttatactttaccacaagtgagaatgtaagtaaagcccttagcaactagtctagccttaaacctcacaagcttatcttcattcataccttctttgaccttaagagtccacttgcaataaatgactaatcttttggcttagaaaccaagtcccaagttctgttcttgtgcatccattccatgttgtgctttccagatagtgtttcttcaaagctgtttagctcaagaatttcaatgtgttggacagactgctgcattacccttctttctcgatctatggataattggtaatcagttagaattgattgttgttgtgtcaaatctggataaaacatagtgaaaaacaagttcaaagaatcaaaatcaaacatttagtaatcaaatgaaatgtaaaagaaacaaggacaccataaattatactggtttagagacaagttcaataagaacttgctcctaatctagattgtataactcattacagttccccatagattcccaaactctttctctctctctctctnnnnnnnnnnctctctctctctctctcaatcttgcttgctcaactcactttctcatcaaagtgttaatcttaatagttgggccgaacatgtatttatagacactaagaccaacttaaacttatttaggtagttagatggatttagttggttagttagataagtctttaactataataacagattagtcgataggatgactcgaggagttacaacaaatccataacttatgtttcaataaactcgatgtaaagtttcatctaagtttgagacttcatacttattattattagaagaactattttatattttattttttaaaaacagtttgagttactgtggcagttgaattactacgtggattgctatatgaattttaattggaatttaggctgttccgttgcctgttatgtagatttctgttaaacaaaaaaaactgttttaaagtgtaaaaattaaaaaaaaaaatctcttattattattagagtaatttgcggcaaaacctcctcaactatcccctccaaagtactgttccattta

SEQ ID NO: 161402 - DNA, 1527 bp, Cannabis sativa
taacatcacgtcgaggtttctctttaattggagagccacccttatgggagctcctatgccgtgtcggtgatctctccctccgtgatggactcctcctacgaggacttctacccctaataggagattcggaatggcgtatattacgtcccataaatcgatttgtaacaaagtaatgaaccttgttgcctgaaacctttaaatgaattgtaaaagtcaatgtcaaaataccttcgtttctaaaagaataattacaactttaagaacattaaaggataaagatgaattaaaaagtgcttagttcaaaagcttaatataagaatcctaattgagtgttcaaatacgtaccaacatccatgttgaaatcaaatacccatttaaatacacaaacttacacaaggatacatgggtataatgctagaccatttcaacaaacataacaggtgcaagaaagtaattaaatgattagctcataattagaaaactgtacttaacaatgtgtgattctgagacctttgggaaaaggtcacgagaatgatgcaggagacctttgggagaaggttaaattatgggtggcaacttgggtttacaagacaaggcttttgagggctttacttttcaagatcttcttagagcacggagacttaattttcactaatttatctaacctttaggttgcattttgaactgaccaatgtgaaccacggtttggtagattcaaactgccgaaaccgattttttttttttgtatatgtaatatataatcaaggattaaatctatttttgggcattttcaaatctaacacagaaaaaatcaatctttttttctctataaaatataatcaagaatgaatcatttattataaaattttattgaaaaatacaaaatgtaaaatttattggtctagagtagatcttaaaggcgtaaacaactttctcccaagttaatcaaataaaaactttctcataaacatcattcatagtacacacatgtacaaagtaaaagataaaaaaaaggtttgagatacccgattgattcgagatctgagagtgaagaaccgaagaggagttggctcagaaaattttcgagcaaagccagaggtgggggacgtacgactggggatggaggggtgaggtggagttgggaggcactgtttcaggcgtgattggtggaggtgggaatgagcgggttggggtcgagaaagaaagcaaaggggctgggcgtttttcgtggttcaagcgacacagaattgggagggagatgggggtggtgccatggtgggtttctggtgcaagttggtgccttgcttttttttattatttgtttttttttaaagaagctctgcttgctaaacagagtaactttggagagagagtcgacaatagacctttgaccaacttgaacatttattttatatataatatatttaatagactatgggctcgtttggaacgcggtattaggtcgtactgtattgtattacattgaattggattatatatcatatttttatataatactatgttaaa

SEQ ID NO: 161403 - DNA, 3462 bp, Cannabis sativa
  modified_base (3419)..(3425): a, c, t, g, unknown or other
tcgaacagtaacagcagctcagccgccgccagtgatcctcttttggctcggcgctgcgccaactgtgacaccacctctactcctctatggagaaacggcccaagaggcccaaaggtaattaattaattaattaattaatttaattattaattatttatgtttttatttaattattaattctcttttggtcatttcaacagtcactttgcaatgcttgtgggattcgattcaaaaaagaagagagaagagcagccgccacgtcgacagctaacgtcggcgcagcttcgggaatggtaatagagccgagccacatgttcagccatcatcacaacaacaataatccatggagcaatcatcatcatcatcatcaataccaacaacactctcaagctcagaaaatggcttgcctttctcctgcagccgcggctatgggaaacgagtttcggttcatggacgatgaaaatcatgaacccgttaacgattctaacggcatttctttcctctcttggcgtctcaacgttacggatcggcctagcctagtccacgatttcacaagatgatcatgatcaccaaaaaaaaaaaaaaacttaatcaacggtcaagatcgatcgatggtagtattagtagtagtagtttaattttttgaatcgagaaaaaaaaaaacgttatatggcaatgatgacgttacaaatttcaacatggtcgtctttgcctaagctctcagtcaacaaaaaaaaaaaatatatatttttcttctttttggtaagttcctttttctccttcttacatagatggagtgaaaatgggataattctatgttcttataattagttttgctttttcttttgagttcttttatatttctttttcagttacatataaaaaaactttttgtttgttcttcgctttttctcatcacttctttcttttaagactgccagttatagttaatataatattattatttaataattaatgatataatgaaatattattattattattattataatttataacgtaatagtagtagtagcaatagctatgatgatgatgagtctattttttttttttaagtttgttcgtgtgttaaatatatggtacgaaatctcatgttatatgaaactgcaagtttatgttaccacctgagtctctgaagttgtttctatttttcctgaatttcacaataagtgaattcatgagtttcaattatttttattttctggggatatatgcattttttctgattgtccaatgcacatgttggatcactgttgttcgtctgaaccggacactgtttacgtttcagaacaatagaaaagcttttgtctttttccggcgctaaatcaaatctcaccgtccaattcgtctaagatcagtcctttttacattcaaaattattaaatcccaacctctcgaatctttttctttttccatcataacatttataataattaattataattaatattatacataatcatacttaattatactagtagttatatttttcttcgaaactagtttttgcatactagaaaagtcaacaccagtagcatataaaattttagtatatattgataattaattaagtttaaaatgaagattattattcattaatttatgtgtttgaaaaagaaatattgtaacattatttaattttagtactagttggtcttctcgtcagagatattattttcagtcggtcaaactatatataataaaaacaattttttggaatacatgctatttaaaatagggaagggtatatttggacgtacgtgtactacgtacgtagttcaaataaatttaatttgttttggcagttatgtttcttaacttttcctctatcctgatttggactgttatttttcaattttcaaatggaaaaagataaagttaaaagaacagaaataaaaaataataatttaatttataataagatctgagtgtaatgctaagtttaattctctatttttattagcacttttatcaatgacattattctctttgtttaatatatctgtcatttgttgattgtgtttttaattatttgtcagtattattattatgatttaatattatataattacttacagctattttagctttacaaactacgttctcaaaaaccgttttctttttctgccctaccataatttttaggtgcataaccttaatttaataacaataagcttaattaacatgttaatagctggctatatatataggtaactttaattaatttgtgtattaaacacgcatgcactacgtgtgctgctcaagtattttataatcatcatatcagtaatttttgccaaagtaatttgcacaattacaaaatattaacatagataactgatattttaaataataaaaatagtaaagttgggatttgaaaagttaattgttacgtgaaccaataagtttttgaattatataaatgtatagcatcacggattcaagataagcatttttgaagttttaggtaggtttgtactttgtgacattaatttgaaaaatgttcaatataacaaaattattattattattgaggggtacaataaataacaagtttacacgagcaaagttcatgtgtgtgtataattgaatatatatatatatatatattatactacagggcatcttttgtacttgcttgtgaagctaataaaaacaaaaacattccgaccagtatgtgagtttctttgggatttggggggaaacgaaaagtttcggcggaattgacctttgaccaccagatttccatagggctttttcgtaattttactacattgatgggactcacgttagactatactcccttttcattaggccggtccggcccacaacgtgtttgatagcttaaacgggccaggcccaatatatatcattgccttttcaaagaatagtacaattggcaagtaaaaagtttgattggagaaaaaaagtaagcaaatattttcaataaaatttgatatatgtttcttttaatatgtatatttttctttaatatattggtgattgcacaatatcatgtaaatatactctacacttaagttttaatttaaatttctacaaataaatcctttgttcaaacatttgtggtgtaattgtataaatttaactcctgaatacatataaatatttaaatttaattttttacggaaataatacttaagttatatttttggaacattcgtaggtaccagaccataagtatcaagttaatggcgacatgagagttcttaattggttcaggtcattaaatttgtatttttatttaaaatcatttagatatactaataagaaaatgacacgtggatattaacttgaaacttaactgtcatgtacttataaaagttcaaaattataacttaaatattattaccgttaaaaatttaggtggcgtttggttnnnnnnnatgaaatggaatggaatggaaaagaaacaatttttat

SEQ ID NO: 161404 - DNA, 3817 bp, Cannabis sativa
tacccagattttttgcaataataatttaagctattttgagtaattaatgtgaatttaagaaaaatattttcacttagttgtgacattaaattaagagtcgtagtgcacgagtcacttttacttttgtattgtctttcaaagaataatttttttccaagccctttttctttacattcttaaggtatttataggctcataatggtggtaaaaatatcacttttgtcttgcttgtttaattatacttcacacaatttctcaaattgggccttaggtcatgatttcttatctatagggatgtgcttggactcaatataagtatttggtgagacaagactttctcttactaataacttgacaattgaaaatgtagccgtcaaatgtggcatgggttgtcgcaaaatcagagaattatgagtttaaaccattaaacacactttccatggctgaaagtaggtttaccttctccatgccgtattaaatttgcacacggtgacttagccttggccctcacgccgaattccatacaatcgagctatagcctctccagggcacgtcttctcgcgaaggggaaaagataactaactaccatctcgaaaaggtcctctcggagatgactaaactcctgaagtggttcttgactcacgcgcctcaaatgtatgttttgttgtagcatgtcccgtagtgggggtcccactaccacatggcttcctcctagagtgccacctattttggaaaaaaaaattaggcaatatttacccccaagttctggtttgcaattttatgaattgggacttgtgaatacatcgattgatattctccctcctagagcactgactcactgacatcttgtctactcagggcaacacttattatatggtttttggtgggccatttaatattctaatctctcaattttgacgaagtcgattcatttctttattatttgattttaagacctctattttgttgtagggttacagacaaacgcttgagtactgcaaatgtccattgatatttgtgctttttgataattcaccctagccatcagatcgtaggggttttgatgaattcaaaacgtgactgttggatgagcaacgatctagatcgcctcttgtggctataagtacctttacctttctttcttttgaacttttactttctcgcccttttcagaaccttaaatcatcaaagattttaggcacactagattttgttatgctctttctctgacaatgtcaagcatcactctaccatcgttgtataccagagcttttaactttgactacttctcttattcataagtagtttaatgaattttaccagtccattcatttattctcttttggtaattgttttgcatgtatgataatatgatattcttgctacatagccgttatttaaaagattttcatcagtcattcccttttcccttcttcttttaccacggccactctgttcgggagtttaagctatggcattttcccccttttttttttaaccttgtgtcgttttatcttgaacatggtgtgaccaccacctggtgcatagtataagaaatttttaatttttggatatgccagtatttggagggggcctcttcttggcggttagaggacctccattttcttttctatttaaggtttgatttgggggctaactgttgagcatgtattcttgtttttcagatgggtgaggttttaaaagatctccacccataaggattctacgcttttgaccaagaagttctcacacttcattctgagagaaaaatgtcaattctaggagcttcttcaaaccctcaagcctagcaagtggccccactccccctcattattcccctagaggatgtccttcatggcccggtcccattactcgattatgtccatccgaccaccagttgggaggctgatgacctacattcattattggaatgtgttcatcagctgcaagagatcattgaggagaatatgattagaccccggggagcaggagtattccatcacctagcttgagatttgaagactcccaatcacaattatgaaaggtttagagcctagagctaaactcatctcatgtccggagcaagcttaccactccaggactattttatcaactttttggtttttgtaagattaactccctaccaacttattcctcaaggtgtttgttttaaggtactacatcaggtatgtttggtaaaattgatatgcaagtatatgaaattgaaacaagtaatataataataaataaagtatcattttcttgagaattgattatcaattactaattaattaattctactttgcttctatttgatgaatagtaattgttggataaaaagaaaataaaacaaacaataattaaaatttagaaaaatagcaataatgaagacaaggattattatgatcgccaacaatccttcattttacttcataatgtaattacccaatttttgttcttcctattcaattagttgagttaagaagtatataatgtgtttaagacttataaactcaatctatatgaaaacttctaatatttttatggtaaattatcacaaagataacattaagcataacaactaataaaatcatgcaaacaacctaggtactttcgtcctaaatcaatttacatctataaaaattaaagtatattcaaatctcacatttcaaaattttgatttgaattcataaatcacaattaaagttgatcagtcaataattagaaaattaaaacagattatatggaattgaataaagagatgaagaaggaattgaacaatcacattaatctataaaataaactcaagtggttcacataataataatttaaaagaaattagatatataaagatattctaaaacaataaaaattaaaattaaaaacataaaagatagagatagaggagatagaacactgtttggagtcctcgaattgtgccttctactcctagcattccttctatgctcagaatttactaaattatcgaatggtgtcaaagctttgccatcaaccctccttttataatgaaaaatccaagtttcccataaaaaacaccaaggtcgcggccttacaagagatttcttcttttctttgatgatttttggagtttctagtttctaatttcactacaagaaaatagatttttagtgactaagttaacttagtcactaatagttagtttttaccactaatatttagtcccagaaatttttagtcatgagacaatgtttaattggaactaaaagaattaacgaccaatttttagtcactgtttactatttagtgactaaatttgtacttagtcactaaaactttgacgccaaaatatatagttgtggcggtagcactaaattttggtgactaaagttacttagtcactgaaaatcctaaatttgtaaaaaaatatttaatcagttaaaattaacaatttttaataactaaaatattagtcataaaaaaattatacttataattattgatgtttatattatttagtcactataaaacataagattaaactactatatttatatatgtgattatgactaatgtaatttttttttaaaagaaatatgtatatatatatttatatacaagatgtaggacacgtggttcacttgtgtacagtatataattacaataataatttatcatatgttaaggatatttttttttattttcttttaatagaatatattaagcaaaaattagtagctataaaaaagtaaataatatattaaaaaaactattatacctagaaattcggtagtaattaaaagatggtgattttttcatttttacactttaaaatagt

SEQ ID NO: 161405 - DNA, 2479 bp, Cannabis sativa
aataggtggactaggtcgagggtccacgtctatctagaaaataaccgaacgtagtcccatgaaagttcaaccttagccccgaagctttgtagaaaatatgcaaagccaagtgtataaaagaatggatgatgtgatatatagacaacaatgaaaaataaaaagagtatcccatgcatcaaacaagcctactgtactcatctcatactgctgcttctttcactaaatccctgattccaattttgaactcaaacctcagggggctttccagcagtggattctcaatctaatctcattagagaacaaccattatcgttaccaggcactatattgttgttggcagtgtaaataactgacgttttgtttgaatcggaattgaggaagagacaaaccacagcacaatcatctacttttgagaacgggaatttatacctccaggttcgcactgcagtttccactacgactttagctgcagtagactgaggggatgatgcaactatattgacaacttcttcatttgagagaacgtcccagatctgtgggaaggaaaattcacacatactacttatgtacaagttgaacacagatttgtcaatcttagtagtgaaagaaaattgctagaaaagaatatatatatacctaacaaacatatgttatcagggtcagaagagtgaaatgataaaacaagtacatgcatgtatacattaacgccataataagcatataccagttcgagaacaaaggctatagctgctttgttcattttacatgcataaatgcaagatgcatatagttgcataaatcacaaacgaaaagataggtagatcgactcaaaatgagagatcaggaattatcaactcaaaatgagagatcaggaattatgtatgcatggaggacttaatgcctttgagagacaaatgacaccaataccagcagtcctctatacttctaatcattcagttgtagataatatcaagtgccccaatattaagtccatccccagaaaagataatagcttctcctatagctattatatgtagcctttgggtgctctctacacatgtttattgatctttaatgaagcagagaattccccaaaagcataaaccactggtgaatagctaatcaaagtcccagaaaataatttaactggaatatgctcctataagataattcaactgaaatatgcatagatccacatccacttcaataacaaaatttcttaccccatcagttgccaaaattacaaactcatccttctcactgagacgatggtaagaaatatcagggactgatattaagccaaaatcttttaaacaaaaatctccaaaagcccgggccatagcaagaccaggggaattactgttgggtagccaaacgcgatcaacatcaggctcattttttagtgcaaatatccgtcctctgaaacgcttaatcctctctgcctcccctatacagacacaaactaacaagaattaacactgtcctgaaaatttacaaaattatacaaactgcatgacatgctagaatatctagagataagcaataaggcaacataggaacagaagttcttgaataaaattttgtttctctagtcagctaaaagttaagaaggagagagaagagaaataagatacttggaagacttggtttaaggtcgacagtcaattgcactgccaccaaaaaatcatcttcatctctcgtacccaaaacagttcttgagtccccaatattcccaataacaatatcctgaccctgcaaataaagtctaatagttaagagggcatcattcaatgcaaagacaggtaaggatcgattagtgaaatctatctacctgcttcaccagggttacagctgttgtcccactggaatagcaatcaatatgaggatgcactttgagttccttatccataaacttaaaagctttcagaaatgagtctttcaatgttgaaatgagctcagtctgttcatgaccgtgcacaagtttaagtgaagatgcacattctccagtctctggactactacccaaagcataattactagctcctgaaaccccatttttggagccagcagtaatcagatcccaacgggaactcagctttaaaggcagagaatccctcacctttttggcaaccaaatggccataaggaccatggccgtcgaaaacaccacagaaaatggtatctgcccttgaaccaaaattctggagaacagaaagaatgtcattttagtaaccaatgatggaattacttccaatcttttaataggccccaagccaagaagataacacaaataatcaaaatataagtcacaagtcatataaacttcctaatcattgctacaattaattaagcaaatcatttttcttgaaaaaacaaaaccaagcaaatcattggtttattgagaaccaatgaataaccatcatggtcttttttgaagtcatatattacgcaaacacagcagtagaaaaccataaattcca

SEQ ID NO: 161406 - DNA, 2036 bp, Cannabis sativa
  modified_base (1988)..(1992): a, c, t, g, unknown or other
ctcttaccaaggacatgaagaggaagagcgagaggaagaagaacatcttagaagcgatatcaaacttgccactaatggagcaccaagctaagcttgccacgcttggagctccaatgaacaagaaaaagaccggtctcagcatcgccggtaaggcattgtccccggacaatctttgataaagagtaacaaaaacaaccaaataatgcgctatacccaacgagaacatgcacaccgcagtctccttccaccccatttccgccgccgcccgagcagccaccaagttcccgatcaccgacagctgactcgttgggttagccaccgtcgccaaaaacctcttccccttggtcagccactggccgtagatcttaacgtcgagaaccacaatggggacgacaaaaacccaccagaacacttggtagtaaagcgtgttgggagtaacgaagggtgaggattgaagcaaaagaagccaggagatccacggtgcgaataggtagttgactcccacttggtgaagaaactcggtcttaaccatttggaagtgtagcaaacatctgaggatgtagagaagggactgtaagaccaacgtgaacagagctaaggaccataagaagttgaaggccgttgatggaaccaggcgaaacacttgtcgtaatgagtgaacgtcgtcgtttggctccactaggattttccatagcaatgcttggctgcagagtgacatgcttattcggaagtaaccagcgtgaaacctggttaatatagatgataatatgggttgctttgtactactcttcgtcttcacattattattattgttatgaagatttaatgctgtgtcgttggtgatgatgagtttgggtgattcaaccacaacctcgatctgggtttgtgagtgtgattcatccatttgttactttcttaattatttttgttctgtgaagagcatatatctatttggaatggatttgaatggtgcggtgtggtgtgggtatacatatatatagataaatatgtgtggttgattagtgacgagacgtacggtgtgtggggagttgaaaaggggataataaatgataatgacgaaggcggcttagttggaagaagattgttagaacaaatggctaactcttttagactaaaatgtgtgcgtgtattatggtaggtatagagggtagagtactcatggactaggactaggactaggaatgttcatgactggtttcgaattctttacagctaatattgatcaagactctggctagtgcgccgaggtggggccatacttcttcaattttcacattaatggtaatggctctttttcttatgtgccactagtactgctacataggcaattcaattaattaaaatatcggcatcatatcaaaatattatcaatttttgttagccaaaaaataatatccaattttttttttctttgatccggagagagagatttgagtaatagtaatgattatgacataatatatgtagcttttttaaaactaaatgatattttacatacaaaatttaagttaacgtagtctttacttaaagttattatgtatgccttaaattaaatatatgaataaaaattaactaaattacgtgtttaacattatctttatataaataaccagagattttgtaattacggtttagttttattttgagaattaaaagataattaaggtttatattcgaaatagactcttaattattattttttataattacggagatatatttaaattctagatttattaaatatgatatatttgtaattttatgattttcatattttatgtcgagtaacaatagatagtgacatacaatctatatagtcacttagatatggtctgataccttaaaaatagcggagtaatatagctatatatttagaaatgtcgagttattcaggggttatgattttagtattagaatattttatttatggaaattattttctaattaaggaaatgattttctatttnnnnnaataaataaataattgattttctgttaaatgaatattttatatt
